United States Patent Application Publication US 2007/0054278 A1 - sequence listing, part 19

SEQ ID NO: 93597 - DNA, 77653 bp, Homo sapiens
  misc_feature (1)...(77653): n = A,T,C or G
cccgttcttttgcctgtgagttctagcctgcactgcttgaggcttgtgacactgtctgagcccttctccaaatactttcattgtcggaagtcaatatatagtgcctaaaacaaaaagaaagggagtgtaagcaattgtttaaggctacttagaggcattgaaataaatgacaacagaatcaatcagtgccttggggaagaaggaaatgagaaactggggtgaaggattgctatttttcataacacatattgtagaactattgtgtatacaaaaccttcataaagatagaaacatgttttcaaagaggttaagcaagttgctttactgtcgtacttctcaaatatttagttaagtagaaaaattctaatggtggaatagtgtaatcagcattccccaatcttatttgattctagaatctttaaaaaatttatttcttaaaacaattacttattaatatccacaaaggcagaaatgttgccatttggtaaatcatccctgtatactaaagtacacaactttatagaaagcagaaaataccaaggtctataggaagacatcatctagcacttgctgtgtgcccacctgctcttgtcctgggcattgtgctagaggtcatagtgtgtgcttgctcatttaatcagcttctgatcatatctgatgctttaattttgagtcagcctcacagctcactcattcaagagaaattcagtgagtgcctactatgtgtcaggcacttctaggggaaattacacaaaatacatgtggtccctgacctcaccagagagattccacagtactgaagaagaaaaggagaatggatacatacatattcagacaatccatcaccgtggatcattttgcatttcatttacgcaatccrtttttgtaggctctaaagtaacttttacattgctttcagctgctgcatgatttgctatatgccagcccagcccagcccaggtaggttagagccaaacactattcccttaattcaagatgcatgtccatttgcatcctacattcagggcttcaagggtagagggcttctacaacttaagctgtagtctccttctttagttctctgaagtatagaaaccactgctatacagtaacgtgactgagttgattgtaccatgaaagctctcaaaagtaacagtgagatatcttcaggacatttcagcttcagcttttcccagtgatggccctgagtcctgctttccttagactttggtaatagattaagacataaactcagattttactgaactcctgaaatgtactgaaaggcaaggactcaaattataaaaacatcaaaattcctttttctttgttagataaagtttgctcaattattttacctacaaaagtcatatttgtttatttaagcacatttttaaaaattttggaaatacagttaaaataatcagctatagtccctcatctaaaaatatccatttttatgcattttcttgcaagattaaaaaaaagccatttccatatagatacttgtcttaatttctaacaaattaagagaacaatggccatgtgggaagccactggtggaaaagctgcaggtacacactgggtcagttttccaggccatgacttacagtgcacttgatttccagggagcaatgcatgcctcaccactgtgttgttagaggctatggaccactttatgactgtgagcatcttccttttggatataagtactagagagaaacaaatcattagagagagagagaagtgagttttgattgttaaaacacacgaaagacatagactgctggaactgtgctttgctgcataaagagctgctctatcccaagagttaatagagtgcaggggcagaggcacgcctaggacatcagctgtctgtcaggtgggggaagggtgcagagctatatggattcctcagctggaggtcactaggcgcccttcatatgctacaggagaagaacgtttagcaattgaaaacagctatgctggaaaacatgcctttcaatatagttctttggcttttctcctttgtttaacgcttctaacatgtcatttaatgtattgattttcttattcaaagtacatgttaagcatgttcatcacaatctgtgttcatttcttcttggctaaaataactcaccatatttttaaaataataaatgaaggtgatgttttgggttttttttttcacttttcacatttgaaatattataaatggcttgtgcctttttctaggttacattttaaaataatcacagatagccagggttgggaataaaattattattctcggaactgctttaccattttaaaaatatcagcaccaactttaattcgactacttgctaaacaattatagtttatactatcattatagctctagttataatatcattcagttaaatcttagtcctccaacaggcatcactatacctatacttcatataaaggtggtaagaaagccaagactgagaaaggacaaataattttaccttgattgccatagaaggatacttaggaaagtctcttttgggatactatgcagggggccctaaaacaaatgtctctttgttataaaacttatttatttggtcattgaactccgccttaaattagatgaagccagcaggccttaaatataatccagctaatgtaactggattacaatgcagcaatttgaaatagtcattaatgccatgcttaaaatatgagtggcttccatcaacataatataaaaggattacctcttcctcagtggtccagttccagaacacatggccgtatttcctacaccaatttgacaccataaacaaaaaagacccaaaggccatgtctccagtgaagctcaagacaacaggacaaacactgggacagtgctgctattaccgcatataccaagagctgctggcaaaagtgatgttcttctactatcctgatgaggcaacagtttccacagggacccacaggttgctggaacaatgctgacacctcttttctaagggaagtggattgagtccttcttaggtagaattgccagttaaaatacaggacacccaaatatttcatacgacattcttatactaaaaaattattcattctttatctaaaattcaaatgtaaatgggtgtcctatatttttctttgctaaatatggcaatcttattcctgtggtagggataaattacttcccttttggggtagaaatcctccatttttctctttgcttaatttagggaaaataggaagggatataaaaattttgcttacaagtctgtgttctcctcgtgaagacccacttatttagaggaaaaataacttagaaaaatagagtttagtcaaactggtccggaagtctaagaactcaaagtgattgcatagtctgaagtctgagagttacatattcccagcatctactcttatccataaaatctaataataaataaatcagcataattggtcatgcaaatgggaattagaaaggttccatgtttgccttgattttactattggaaaataacttctccacgcttccattttatcttcagggatttgaataagggaagatggataacagtctaagatggagttgggttttaaaaaaatcagaccattgtggggcacctcaaaagtgggtagtctttaactaaatatgtaatattattcatattgtaaatgttctttaaaaaaagcattacctttttagggtcaggcatatttataaataggtataaacgttagtttttacataatctgaattgaagaatgctgggaaactcctcttatgtcaaattatttcctctccctaaatgctacagtgcttaaaagatcagcatccaatattcattttatcagtttctttaaatctccaggaaggtattattacagcactaatacttttaagtaaatgattttatagggatactggagttcagacagcagaaacataattaatcttaattcaggtcaccagatagtgcaaaaaaggacaagaaggtagtggtgggaggtgaggatcatacccaagagaaataacagttgccccataaatgtgcctgcagtggtccttactcatgctctttattccactcccaaatgtgtcacacttttagttgaagagacagtcatttttgtttaaccattcccattttctcctgctctctgagtacaatccattcactcttggccctactcttgtccagtgtaggctgccaaactggctcaattcagataacataggagggttcagaggagctttccctattcaccactaacttgctgtgtgactccaggcaaattgcttaacatctctggaccttggtttcagcatcatacaatgttgaagtgtcattagatggtctgtcagtcttaccaagaaaggaaagagaaaaacttacatcactgaaatcttgtaattggttcagcaggggaaatatattatcccacccaccattgcttgaccccttactagccatatgttctggggaaatttacttcatctctctttgcctttgtttttgttttatctgcaagcagggaaaaataatgcctactagactatgatgtcatgataataaaaggagttaaatcagttgacatgtaaaagatgcttaatgcattttatctattatcataactaataatagctattactttctccaagaattatttttctttcaaagaaaaaaattagttatgtcagcaaccctgagatagtgttggctctagagtgagttagttataactggcatttcaagaagatgtaattatctttgtttccaattaatacttttcttttttttttttttttttgagacagagtctcgatcagtcgcccaggctggagtgcagtggcgcgatctctgctcactgcaagctccgcctcccgggttcacgccattctcctgcctcagcctcccgagtaactgggactacaggcgccagccaccacgcccggctaattttttgtatttttagtagagacggggtttcaccgtgttagccaggatggtctcgatctcctgacctcgtgatccacctgcctcggcctcccaaagtgctgggattacaggcgtgagccactgcacccggccccgattaatacttttcaataagaactttgtttttaggaagaatttttaaaaagtaaaaattcatattatcataaccaactgctcagaacaaagactttttttacatataaggaattcaacaaaccagaaaaaataatcttgatttctgctcccaagtaatccccatattttaatacctaggtataacacagtcatactattgagcaaaatacaaaggaaaatcacacatttaattttgaaatgacaaattaaagttgttaccttcctagaccgacataataaaaacacatcattacttaatggagtagactgtagatagattgtaaatatctgagacttaaacaaagatttcaaccatatttcattcttttcttctttcaatttaagaagtctactgtctgctgaggagtacttttctctctctggttgcatttatttccaccaccacattcctggtgctgctcctgaatttatcacttacccaaacaatttttgttaacctaagtttcaccagtagtatattaaaacattaaatatttttcttaacagagaatgaagaaatcatttatggtacaaaatgctttgtgttgtcatgaattttcatttgtctggcatctatctgattgttgcaactgcactatttcatgttatcatcttttttcttttctttttggaatgtagaaaatgttagccctggaagtggttaatgtgacgaaaagcacattagaataaaaaaaaaaatccacctcaatccaaagggatggcattaagtggaatccagtgtatcatggagcacctaatgcacacaagatgtggagcatgtcccctggtcrgaacttttaaatactaagtagcagtgaatgggagaaataaatcaaatgggaggatagctggaataataaacagtgaagatgcttcatactcacactccagcaaagcaagatgaaaaagtgatcatggctgtcgtgagctattactgaatgaagaacttcgttttagctcttctaacttgaaaaatggaaaaaaakaaagaaagaaatgaaaagaaaaagaaagaatgctggaggcaaatagcttttttttccttgagtctctcaaactcattgtcagtaaaacaaactgctatgtatcatctgtttagtgacagaaaatatatatattgagatcaaagataatcaaggtacacctggttattatttgtaaagacttaactgtaagtttttaatgattaatttatctgccacataacgctttaatagatcatgtgaaacatcaagggaggaatgtggtactgcatttctaaagcctccttctctgtctctgaatgataataggcatgggagtcrtcattagtcttgwtagacgatggttcctttaggaatctctacgtgttaccttttagagggaaggtcaaagaagccacccctggggactcccctgcaggatacwactaacacaagcataaactgtatggaaatggctaaattgtctttactgagaccttagtctttcgcatcaatcaagtccttctgaactagtaaaacagataagcaccctgctggcaaaagtgttactatccttatgcttgtcatgactggcactacaaatttaacaataaacaggcagttatttgtcttccttctttaaaaaaacaaaataagtgtgccgaaagacatacagttgcaaggaaaactcattttaatggcgaacagaaagacgaaaaaattgctaagtggattcagtgtcactctctttcagtccttcctcaaaagaccctgtatccaggatccaattgtaactgctatcatgcacatggagaaggtaatatgaatcygacaagccaaaacaaagcaaaccgggaccccatggctgccatgtgggagggggcagatttatccaccctcacgtctcagcttcctgagtgtggagcctgtgtcaatgcctcatcctgacacctaactcatgggggaattataagtcatcaataccaatgactgtaaaacactttgtaaataaaaatggcttagaagttccaattaacaacagaaagtaaccctctgggatgtactagagagaaataactacagccataaataagcaatggtgaatttaggttcacttcttatttcaatgccattaaaaatggatctccttccaatctccaatctgaagactcagccatgatattttttctcatttacactatacaaagtcatgcgcatgagtggaagcattgaggaaatacaggattgggcattccctactattttaatatgagtattacaagcatacatactcttatctaccttcatgtcaaacagaaacaaaaacaacaacaaaacaaccagaagtagtataacttaacttagctaactgtatggccaccacagatgtgcggtaaacagggagcatagcaggcccaagaagtggctatagtgcacacccttagtgtacttcatgcttgccccatttagaaccttcacaggctcacacgatggattatcaatctgactcaggaagtatccactgagcctgtagcacaatgtcccaggcactgtgctaatcactgccaatatatctcacttatacctgtgaggaaaagaggcttgggaagcaatttgatatgaccaaattataattaaattaatagccatataatacttactaaatgtcatgaattattctaaatgcattatagaaaaatcaacccattattactcagaatagccctatgaagcaagtactactgttatccacattttaagataaagaaacccagagagattgaataacttgcccaaggtcacagagaactgagacttgaacctgggcagttggactccagagtccatgctttyaaccacttctcaacctggaaaaagagcccaagtttttggttccacacttagtgtctagggtctctgcttgattttaaaaattaaaaaataaataaatctggtaagacacagcagcttatccttcaggtcctcatgtgcctgtgcaatgacagacaggcaaacaactatagggtgatagaagtcacaggaatgtgcagaatagtcaggaaatgtaaataagggagcatttagctcagactggggccttcaaagaaatcttagaagaagataatgaattgtggtttccatttccttagaaaatctagttatatgtgcctctattttttggcaggcattcttgcaacctttggcctaagtatgcacagcatgtccataggaataatttcaaatataatatgaaaaaaaaattagcaccacccttagcttctattaagtctattgtaagatcagggtccatagtagcaaaactcatgctgccatagcttgaccagaaaccaggggacagttcagggtackcagctgcccctctgaaaagatgttagccatgaggcatctatagagcatctttagctgcctagtgagtttggctgactctccaatcaccacagaggtcccgatgggcagaggttctgactatcctgcccagaagaagcatgagggggagagcagcagttgttctacccagcagggactatctctacagcaaacatcacctccaaatcagagctcccaaccttgcagaaagacccccacttacaggaagacaactcagtggggagaaggtgtttggggaagatgaattgtgggaggaggaagggagaagggattggccgacgcaggcagcgtcctcagcttctgtttggcccttgatttctctctgtagaggagattgacctccaggaaaaacagacctcccttccccctccaccccttcagcatagcagtgatgcctgcacaggtcctgtcccggccatacacctaccaagaatacaccaaagccattaaacataccgatctttagtgactaaaaggctgccatctttttagccttttaaaatatatggcacatgtatacaatgaaaagcaatgatgttatagatttattgacatggaaatatgttcactatgtatggagtgaaaataaataggttatgagaaataaataccaaatccagttttgtaaatggttatatacatataaaaaggctagaaaaatatgcatcaggatatttacaatgaagggattattacaagtattttttcttccttgtgctatctgtcttctttatgaagactatgtattatttatttgtttatttacttttttgaaagagctattttagtttttccttgggaagagggagatttttatttcttattttttattttttggagatgtagtctcactctgcctcccaggatgaagtgcagtttctgaacacagctcactataaccctgacctcctgggctcaagcaacgctcccatctctgcttcccaagtaaaagggaccataggtgcacactgggaccataggtgtgtgccaccatgcctggctgattttctttctttttttttttttgtagggacagggtctcatgttgactaggctggtctcaaactcctggcctcaagcaatcctcccaccttggcctctgaaagtgatgggatttcaggtgtgagccactgcgcccagccaggaagtaggagattcttaaataggtgataatagtatcagttattatcggtgttagtggtttgatttcattgaaatagctcaggctaaggaacaatactttaatggcagggagagaagtatgttgatgaactggatttgtcagctctttcctgatgactaaaatcaaatgtgaagtggttattgccatttagcatatccccagaattcagactttatgatttccctgtcactcaccaaatcaaaatcagagtatcccaaagtagatatgttagaagaagaaaaccaaaagattgaataactcaatcaatttgggaaatgttgagctaactrgtgttaaatagtcatctttcttgcaggatttctgagagcctcattatgctaatgtacattgtatatttcccacaaaataacagtcttcccaactttatatttatccatggaattcatttttgccaaagcatcacatgtgaccagtgacaagtgaatgctgcattgcttggcaacaccgttctaagtagtaatctagaaacacctgtaaacacatatactaactccctcaggagaatttttaaatggtttcacaaatataaatctattattttcatcaatgatgcgctaatttcagaaactatgagattagtcatgatattaagtcagttccaccaggttgcttcaccagaagcaccgaagagtttcatatcagtgaataaatgtctgaattcaaaatctgtgacatcactttcaagtaaaggggaccagtctgtagacaaaatagaatgtacacctgtcactgccrttcttttgagtcattacagtttataaatttatacaccatgaaaagctttatttatgttcatatggtgtgaaaattgcaagaaaaactttaaattaattacctttttttaaagaaagcaattgaaatttatcacagacagtaagggaatttatttacatgccataaagcttcttaaaatacagtcatgaaatatgagttaggaaaagtagctcatgccctcacatgtcctcaagacggaaaagcaaattagctggccttaactgcaaaccacagtcttgtggctttggtctctctcctcagcttagcttttgcaggatctcaaaggcagacttgactcaacaatatgatcttttcttttgggtttactcaacattttcccccagaatctacatgatctgctcttaagaagctgagcagttaagacagtttatcatggtttcccctcacacctcaggaatagacaccagttgaaccacatctcagaatccatttagctgggggtgaggaggggtgcttctaggactggatcttttttcctctctctctcttagaagtatctttttatttcactgtgaaataagctgattagtatgtagaaaagcaacagtccgttgatttccacaaatgcgttttgattttttattctgggcttcaagtctttcctgcatacatttaaccgcagcccactccatcaaaggtacatttactgggctgagggtttagggggtgggctcctccctggaatcttgcttacatttgcatgtgaaaagaaagaaatgcttttgagtaattagtcatctgaaattctgcaccatgaggaaaaaaaattgcttttggatatttatggagagaaaaatccatatggacaatgaataccctattaatgcattggggggaagggacagggatgtagcacattatgttgaatttcatccaaacaatgataaaaataatattgccactttcttataaatagtagctacaatagaaagtagcacaaagctgtcttactcacaacttaaatttcttatatttattctatgatcttaaaaagccctttctttttgacctaatatgttcatgccatattgaagaaactcatgatcaatatgtattgatttgatcactaattgcattaattttgctttagaaattagaaaggctctaatgaaaatgtgaagtcacttcaagatagtacattatgggcaggctaatttagctgggctctgtgcatcagattatttcattatgaaccttcaattaccatacaaacgaatgagataaatagccttttctgagcagatttacatttttgaattcgtctataaatttcaagagcttaagttaatttataacctaacatcatatttaatatacaaatagttcaatcatgaatgcattatctgcataaacccttactctggcccttcacattatgctttgaacaacatttgaaacaatcactgttttttaaatacttgcttgtactacatttaatctcttaaagaaaaatgtgaaataaatatttttgttaaaatcttgcatattattgcttagcaattggygcaatgaaaccaagtgatgaagaggtatgctgttcaagatttataaaaccctagagatgtgaaatagtcaagctgattgtgaaattgagtgcagatgctaaaataacatctcaagaaacaagagaacatagagccttttaaattcttaatgtatttctgctgtttgaaaaaacctacctgtacaattgaattaaataaaaaagacaccagaagtagatatctttaccataagattctacttaatttggtcttggggtggagtggtattgtggtagatgggagaaatgtggccagaaggcaaaagtaaagataatgttaaggaggtgcccagaattctgagatatcttgaagaaaaacaatgcatcaaaataaaatctaggtaatattttgcaaataagtatttgaaagttcattctgttctcaggctgtgtatttatatacactgaagaaaatgaaatagctagcactaatggatatttcatgtggtcctataaagttttgaagtggtgctgataataataatggacagaacatgccatctacttttgctgtttagtatttcatgataaaatcatgaacacacagtctgggcatctaattcgtacagttattattattgtacacttaggaattttaaaacctctaaaatagtccaatggttcaatttataccttcattcattattcttattcactgacattataagaccctcatggcatgataatcaaaaatcagtgaattatcacataatttaggataaagcatatttcacaagcaaaggctttatgagagaatatcagggctgarggctcaatagagatcaactagccccttagcactcaatgtgcagtcttagatgagcacctgggaacaaatgtggactctctttgcagacctttgaatccaaatctaaatttagtatgatgcccaggaaattcatgtgcatgttagtttgagaagtacttgtttagtctttcattatctttttataaacatggcaactaaggcaaagaaagcttgagaatgctgttcaaggtggcaaaaattaactcttatctatggctgaaagctatggtggttcaagcatggtgcttygtagatcccagtcatgggtcaggtctacaaaggttaactttgctgaactcccagccagctttgggaattgcttgtaatggttataaagagcatgtttgagagtatgttgatggatggatactagtgtagcaccattccaagaacaatcattctgaatttctatttttcagaatcatttaatcagtccagctcacgagcaagtgccaacatccatctaccctgcactaccttctagatagaaaattcagaataagagataatagttgtatccttaatttacccattcatagaaaaagtgtgagagtcaagcatgacatgtttgtcaatatttcaccacataaaaattaaaacagcaaggggtgataacaagtggaggaatttttagtgtggctacctgcagctgagtatgtacaaagcaagtaaacagtggcccagtatagacacagctgagggcacttaattagtgacaattactacattgttctaagctgcctgtaaccttgctttctccctttagataaactcatttaagtaaatacaatgtcaagaaaatggacaagccctttgacttgctagagaaccatgaaagtgctgtattctatcaattaaacatgattctttcttttaagaggaattagatctaacatttgcttcaaaatttcatacagctctccacacattgtgtatattagttctttagtgttaaatgtgtagcaaatcgatttttcttttcaaaaatttatactaataatgatcacacactaaatctttttttttaattatactttaaattttagggtacatgtgcacaatgtgcaggtttgttacatagttayacatgtgccatgttggtgtgctctacccattaactcgtcatttagcattagatatatctcctaatgctatccctcctccctcatactaaatcttaatggttggagcctttcagaaattacttacctagaaatacgttttaagaaacagttttgcaactcactgataaaaaatattgttaaagggataaacaatttggatgcttttctaattcatcacattaagtgagaatggtgtccaggcagtagtttggaaatgctttgaaaaagtcacaaatgaattaccttttaaaagtttttcacttaacaaacatttattcagaagctagcatataaatctttatttaacaaacctctttttagcaactagtacatgctagatgctataagcaataagacattgtatcagcctttaatgaacttataatcaaaaaaggcaaaaagaatagtgcataaataactgtcatacaaagaggaaggccaaactacaagtccaacttcttcagtcctatagccacggcattctcaagagacaaggtccaggcattttgttctcctctaacatctgcaccaaacaactcctatgtcatctgagagtcagaggatggtgacagcagctcctccagctccctgcctcctgcaaaaatgagcagaaccttgtgcattcaccctgacagataaatgtcttgcatttgctgcttttttctgggaaatgtggtgcatgtaaaatgaatatacttttatttgggacattagtcatggaatgtgggggagaaggagatgtttgacctacttaaatatacttaagtatacaagttaatttcttcacaaactatttccaaacttcttttgtttgacttggcatagaccccaggtgacaccaggcacgcacaggaacatgggaaaaaatgctttgttggtggtggattccctcatggtttcacaaaggaaaggcattaaaactcaaggaaggttttaagactcagtgtttaatttatgaaaccacattttaaaaatccaagcagagtagtcatttaatgaggtcagaaagtaagctgtaacaactttaagctggaattttactgttgttctatcacatgaagaaatgaacgttttctgtctgttaaggatttgagataagcgcctcccaccagttgatacctgacacttgcaatcagctcacaagaaaggggtgctgcatctaaagctacattaactcttcagtaacagctcaatctcacttatccatgaagttctgtccgtgaagtttacaagcactaggaacatgtctccaagttacacacaagagtcctggccctgggccctaaattacacatggatctggagctgaggaaggcctcgaatctctggaattcaccctcctcatctgcacaataggggctgcagtgcatgatccctcacagctccatcatggccagggcagagagtgagatgtccctgtgtcagtggtacagcttgcttgacttcattccttctctagattaaccattcaaggctacacgatgtcaggttgctctctaagtctactggcagggcaatgtattgtggttttccacagtcttcacaaccagcagagggagcgaaagtgcatagtaaatcaactttaatgaagtataaaatctctttaaaaattctgtttcattaaaataaaatctgctaaatgtgtctgggttgagaaatttgacttgcctggtatatttgcctgctgtctgttagtgtttgtgtgtgggaagtcagaatttaaaaattatggccactatagttaataacaatatattgtattcttgaaaattgctgagactggaagcttccagctgcactgagctctgcctctatcccagtgattccccacactgccagtcaagtccctaaggaacttgtctcctccagacgcaagtgcattctrtcctgaagaagtctggttgtgataggagccccgttcttgtagggacagaaaagaaaaggagtggaacatggtccagctgccagaagaaaaattggattgatgaaaagggtctccaatttgggctgctgcctgaaagactttgaaaagtttagttttactccagtccccacagatgagctcttcaacaaccctacagtgaatctgtgctcagtggcccagccaaccagcaactggctgagttggttagcagagcagtgttgtctggctacagctgcgtcacggtgagaggagaccccagcctggcaattagtaccattagtggtcatgcctggaactgcccagacctttgtgtcacttgggttgatgcccagaagacatcagtacaccccttaccacttcatcaggaaatctccatggactatcagtttcatttctcctcacagaactacagggaaaggtaccagaacttccaggatttccctggacaaaccttgtatctcttccccaagtatagcgtattctgatctaggagacatggaccctctggaacatttttttaaaagaacaatgatatctagtatttttccgtgagagacatcaatccatttggcacccaggaggtcatgcaacagaaatttgatctgctgattggcaaaagacaaaggtctgtccatctgagttttgatattgatgtatttgactgtacactggctccagctgcaggaatccctattgtagggggactgacctttcaagaaggcatctatattactggggaaatacatagtacagggttgctgtcagcactggatcttgttgaagtcaatcctcaactgggcactttagaggaaagggcaaaggccacagctagcctgccagtagatgtaactgctttatgtttgggtcagacaagggaaggagggcacattgcccatggccagattttctcgtttcccagccaagtcagaaaatgaagtgtgtgtgagaatttaggaaatactgtgcactgttttgtttcacaatgggcattccagagctgtaaggcatttgagaatttgagaggacaggtrttaagtgcttatctgggttaatattgccttaattagaacacttgcacattcccacaattgtagtttcccctctccattttggtgactaataataccactgtaagtgtgtgtgtgtgtgtatatatatatatatatatatatatatatatatatatatatattttttttttttttgcagttcactgggtattaatgcattgtagtgntatgtaaatttaaagatgcataagcagcattcgttaccttggtatatcaaaaaatggtaagaaaggagattttttaactgttttcaccacaaaaaataattatgtgaggtcatacatatggtaattggcttgatttagccattccacaatgtgtacatatttcaaaacaatatgttgtgcctgataaatatatgcaatttttatttgtcaacttaaaaattaattaattgaaaaaataaataccaaaaagccacaagaggaaggagattaagtccacccacacctaccattctgctgtctaaagataaaggaggagccagaggatgctgggcctgcagggaaggaggagacgcgtatcagcatcctggctgggaacagaactcaagcctctcgactggaccctgctttccttttttcactcacttacatgaaaatgggcttgggatcaataagaataattctgctcaagctttccaatagaagaaaaacagagtaaccagccatgttctgcagctctcacagcaatccttccctccagctgacttgcttctcatctgctacttttcatgacgataacgtgctcccgcatttcatggtgaaagctaaagtctttaaagtggtccgccagtcactacaccacatggcctccctttgcccctcggacctctgggtctcctcaattctcccacagcaccagtggccagtgtgcctttcctgaagcatgtcaggcctcttcccactgaaagcctttgaattcgctgtccccagagcactgttcccccagaagtctgcatggcttagtccttctttgtctactgaatgtcaaccctcttgatgccctattttaattgtaaactatctgcttttcacttttcctcctcccttatttttctctacctgacgttcagtacatattatatgtcttactgttttccttataagttcagaggtttctatcattttgctcactgtcgttcaatgaatgactaaatgaatgagtcaatgaattttamayttaattacatatgcagtgtttgaaagaaagaaagcaagtttcctttaatgaaggtatcattatgtgcatattatakttctttcggccttactcccaaataattttttaatcggtagctccaagattgctacaytgattgaaattctaattatttggctgtgagcacaaatgtgctcataactttatcatgttgacataaatatcagttatttggtaagacaatgctccagtcacctcctcctgctataatgtctaattatctatcttgggctctcacattccattgtgaaaaactaacattagctcatatataatagtcattcatagtctttgcatgtttggtatgtgtgaccaaatgccctttaataggttccatactaatattacatgaatattagtgaattatctagtataaatttctacagggcctcttaagtaaatatgtatttagttggttatgttttatgcatatttagaatttgtttgcattatccaacttcacatgtattatttacctggtgggaatatttagctttctgacactctactttatcctatgtataaattcacatatgttttataatattcataacactaattcaccaaacgatcttgatatctggtatattatcattttcttaatgagatgttatctacagcaaagcatttacttaatcactcactttttgtttgcttggttttgggtgttcctcactaaaaacaagtatctgttgaaaaaaaaggatgtctccagaaagtcaatgagtcctataaagaaaattgtagcagacattttctgaagaaaaactaatgtgtcaaaggtaagtaaagcataattaatttcttgaaatttttttttattttcttccccagcttataaaaagaaacctctcttgtatgttggtcgggctgaaacctaattgcataatctgcattatttcattctcaattgtcattgaaacaactcaaattattaagtgtttgctttctattttcacatttttaaaatctgatcttttgtttaaaaagttgagtctaaagagctaaaatttgggacaatttagaagctaaagggggtggattaataatttggttatattttgctgtccaatcggcatctcatgggagtttagaaataattttagttatttgcttttagtccttcttatataacgctaacatagtggacctaccataggctgttattccaactagtctgatggtttgtttgcagactatttcattaagttcttaatttttttcattaaaatctttatgaaagctaagtggcaatttcacattggagaaatgaagcagtgaaaatggctatcatatatccatcatttaaacacagtacttggggtgccatgttccagcaccacagcttaatgtgccaatactgtgtagtataaacatctcttaataggtacctggggttggagtttctctactgtgttcaacctaaatgagtacatgagattgctattgaaagtgtttttatatctgtttggaatccaaataaatttattgttatggagtctctgtcttagaaaacagatatttagggtctctaaacttttattttgaaatatcagtagactgacaagcagtagctaaaatagtatacagagattctgtgtacccttcacccagcttctcccatataaaaaaatcccatgcaaccatagggctttatttgatttttaaaaaggtattattttattagaacagtttcagatttgcagcaaaattaagaggaaagtatggagatttcccatatgcttcttgtcctcctcccacatgcatagccttccccgtatcaacatcctccaccagggtcatacattcgttaaaactggtaactgcacatcataattgcccaaagtccattgattacattagggttcactcttggtgttgtgcattctataggtttgggcaaatgtgtaatgactggtatccaccattacatgactattcacagtagtttcactgctctaaaactccactgttttgcttatgcatccttttctgctaccttcaacccttggcaatcactgatctttttgttgtctccgtagttttgccactttcagaatgacttgtaaagtgaggagacttttgatgaacctgttccttctgaggcaggatagttataaagataaaaaaccaagccccgttgattatctcttagaactagcaactaaaccccatgattccttgggcagttccaagatttcaagtgcagtattctttatttatatttgctttgcttaaatgtatccagcctattatttaataaatcagcaaaagagaaaagcagagagaaattagcagagatatctttcccccaattccctccccatctcttttttcctcacccaaaacagcactcctggagagatgtttatgagatctgtaatttctgggcctatcaaaagtgttaatttgtgagtttctgggtcttttttctcactgtccttcagaacgggcaccccaggagcataaaggccaagtctgtctcagatctgtctatcatctaatgactgtcttgaattttatagtctagtattatataactgtttctgtattaaagattgtgggtttttaaaagctgatttctattttttcttgaatagatagagagagttattctctctgagaagatgggttctcccttgtctgatgaacttcagagcttaaaaataaggctgatttgaaagtaaatttgctgtcctcttttgtttttattttttggttctgagcccaggaacctttaccctttctcttctcttccctcataatgaacctggtctcttgtctcattctgtatgtaatcccctggctgactcctagcttcagctccagacttgataccaaaacctgtgaacaggggaattaaaagcaagctgtactctctcaccaactttctctgatttctaggcctccttcaggttggaccccaggcttctcctacttcctgtccaagtggagcaaatgcagctcagctggttcctgagttgctactgccccacccctatgtccacgtgctggtctaagaagagggcagggatattgagaaagtaacagagaaggagcaacagtgaccatctctgcccaagtgtgaaggcctccctggccctccaaagagatgtacagacttgaggagatgcaaaggtccttctggttgtaggacttcaattatgatctctgaggatatgcttcaaaataaagtcccccatattgaaaatcactgatctcatttcaaaggataaaagcaatctttactagaaaagtcacacacacacacgcacacacacacatactgcccccctgccacacacacacaatggtaactatgggtggtgacatatgtgttaattaatgttgttgtaataattatgcaatgtatgtgtaattaattcatcccattatataccttgaatatatgcaatttttatttattaaatattttcttaagatctccttaaagtatttcttttaactctttaaccatttcagcaatatcatcttttctttccttcatgttcttattctttcccatttaattttacttttaagataatttttctctctgttttttcaggaataacaatcttcaaggttctccctttttcctttaaaggcagtgattgcagataaagaagctgaaatttttgctattatgacacaaaacagcatggcttgtaaagaattttccagggtcatttgcctgggaggtgccctgtcccctccaattttgtaccagatctgaattttttctctgtgaccttgacaacaattcttcacatattcattcaatacttactaactttcctgggtgtcagataaggcactcaggacacagtggtgacaaaatagataattaagggaagcttacactgtagttgggggaaacagtccataaataagtaattgaacaataagcaagatactgtcagaatgaaaccaggatcatgaagaaaaggaatcagaatgatttcaaaaagcatttgagggcaggggaacctgggactcttttaatgggtgcacctaaaagagggaagacctcacgaacatgtaaagtctgagcggagtcctagaagataagataaagcaaccatgagaagattttctctgagagcatgagaaacaggctgcagagaacatcaagtacctgccttcttcagacatctgtttccccacaaatagccatctattttacctgcagagaattttgcagttattctccttccctccccctctgcctttccctctccctcttcctctctctccgtgtgtgtgtgtgtgtgtgtgtgtgtgtgtgtgtttgtatatgtgtaactctatgaaaaacacttcatctgagaagccaacatgtaagttaaatttaaggcaaatacagagtataataagatttgagggtgtaacagaagtaaaataaccttatttgatcaacattttatttctaccttaaataaaaagaaaaatgtttctatttacaatgatttgatacacttctgtaagtgcataaaagcctataagctatcaaagttcattctattaactaaggagaaatcttaagggctacatctggataataccacaaattcataaattagtaatttataattccccattgtaaatgatcactcagctgatacacatgaggacacctggcaatcaaactaaatattcccatttccagatgcaagacataactaactggttaattgcctttaaattttkggccttatggtttattttttaaaaatcattagaaaatagatagatgatgaaaaaaatgtggttccaaaagtttttcatttttctgaaaaatacttccattatcactatttttagcaaatttaatttaaaaatctttttgtttttctaagctttgagttagggaaaattttaaaagactataggagttgggggaattttaatattagccaaaagggtttgaagcagagaactaggataagaaaggaagtgaggggtgagcaaaggtctcaagccaaatggggcagaagaaagagcccagctagttgtgacaaatagagggagagcagctgctgaccagcctcatgaccttatttattacatggggaggagagttggccagtgatggaaaaggaggaaaaccatatcctcccttggggacaaggtataaagatcaagggatctgtgaagtctagcatgtcccacaatgatgatgatggtgataatgaccacagctgtccctagagtgtgacaccaaagcaaaggggaggacaaacatactcgcacggaaacaaggagcactgtgcagcagacggaaagccttcatttgatttcaagctcttttgacaggagacctgtgtctattccagactggaattgtctcttttctcatcacatcctttggagagaacaaaagttagggaatatccatggggtttttgtgaagattctttgtactggggatgggaggtactgatgcattggcagctcttcacttcccccatgaaaatatactgtatccctctcaataaaaaaaaaaaaagcagggagaagaaagttgtggtagatgttattatcataatgccaaaattattctgaggaaaagaaaaacccacttcagaagtatgctctttcttaactgtacaaggtatcagaggaagcagatgttttgtctgttactcaatctcctactctccctctctttctatccttgccatcttccccatcacttctccatcataaattaatgacagcattgactaattttatcatnttttgaatcaattttcatagatccatctattcatttaaataaatgtctctgatatacatcatcttacaaacaccccaaaatgtaaaaccttaagcacaagaagaaaggcacatggagaatttgtgttccaggactaatgctattatcgtggattttttccagaagaggctgagctgtgcacatcacaagatagactcggggatagggctttatttatttttattttttggttattgaaaggaaattaattgggaaactgggtaaaattttgtctcttattttacaaacaataatacccataaggcatgctaagtgtaagtaacaggaagccagccatgcaccgatgtgtaatatgaaatgaggaccccacaatttatgcttcctatgtaaaagcatacatgatggctgcaaaggctttaagatccgagatacaactaagatgaagagtttaaggaaggtggtcacagccagtgttatactgggccgagcagttgccactgagtctctacttgtgaaaggtgtgaaagcaaaactaagactttagttccctcagccacagtctccctgaagggcagcagttggcgtcaagagtcacttttgcaaatgaagtcactcacactaagtagaaacagtcagccagggcaggaagggctgtgactcctcatcagtatctcagggaccttggtctccttccttcttctcctagacttttgtaaaagtctagatgtttttctcagtgtgataaattaaactcatgaaaataaccatttatatttctcctatcatcattccacttactcttacagactgttaaattggatgatacattgctgaagcaacaaagagtccctaaatagaaaatgcctttraaataaggcataagttaatagataccagtttaattcagtactagtcaaattttgctgtcttccctgcaagatcattggattagagaagtcagaaaacatgggttttactttaggatcccttattagacaagtgaccttgaacaatcactttaacccaagtctctgtttctcatttatgatataaaattagtcccactggccctgattacctatcagggctgttgtcagtattgtatcaaataatgtgtggaaaaatcactcattattaataaaatactatttaaatccaaggccctattcttgaaacaagttctcaactcaaacctcacttttcttgcaaatccttcgtggacctctcttttgcccagggtggtagaggttcacctctcctttagttgcactatcctgagctgggcacgtcaacactccactgaagatgacaccgctcagcctctccagtatggctgtgtaacgaagttcttgccagtggtacgtgatcacaggtgctgtacaccactttcaggtcatttgaagggtggctgtactcctccccttccccacctcccctcttgctcaccgaattatagtcattgtagagggagctgaacagccatctcagaccacaaaaatagaagcaacagatgaggctggcaaagcagtaggactcaaagagcctgagtcacccacactgtggagcagttattaacagcctcagagtgtcttgttcagtgagagaataaactcctatttgtttaagctactgtattttggcctttattataaaaatatcctaacggatatgttccaattaatttagtctatctgcattgtagtactcatcactgtatattatcttactattatcttcttagcttacttgttaagtcctttagctgaactctgagagcagggaccatccattctggtgtgcccagcactgagaacaacrtgtaactcagwatagactctataacatttaaatgaattaaaaatcattttttaaaaattaagaatgaacaaataaggcttttgaaggaaatctacagctttgcattctagttaaaatagtaattaaaaattttcaggacttcaatgctgtttattttctgtcatttaattttcataataatgctacagtttgatgcttcttgaagcccagtcaactgtttcatattatatttccctatttcactaattttaatttttgacaaaatttagtagttacctaagaataatatttctaggagagtgataggaactcagttctcagtggggtagggaaacaagtttctatagggtagtacatatataatatattgtgaaaatgctgcagtaaaattaggtataaattagttaggatttatcagttaggatactactataagaaaggccaaaataatagcatcttaaacaaaaagaacttgtaactacagtgatatgatattggtaaaaacccaactattatcagtgtttagggaataggatttaaatgctcattttctacttgtaactagagatattcatacaagaataacctgtaatagtgaaagaaataagggagactgggaaagagagagaaagaaacaaagagagagagaaggaaggaaggaagattcatttaataacagaggaatggtagtgtatttatccaatggaatattatyctgtcatttaaatctagccatagaggagctgttctgcctcctgaagccagttccttcacttgtggtttagatttggccctttatcctctctcagaagccatacattaccaattataccctttctccttaaattgccacttcctgtaaaatggattctttctttggcatttaaatacttcaagtcttattatcctaaaaatagcctctctgcccaagagcctcctctagctatgccctaccccactaacctttcttagccaaccttactgagggtgctccacactcatggtcaccattttcccatcacttttatgcttccaagtgacctaggaaatgaagccttcagaaatcataagctctacccctgctttaagagattctccccaggctcagccataaatttcttcagttgtaaaatagggcaattcagtgttaaagctgaaagggctctcaaagagtctacctctcagtattattcagtgggatgatgaggttgattagttcagtactagccacatcttctgagtttcttgtgtgttcgatccttggaaccacactttgatgtgattgcatccagtcccatggctttgaataccatctacatgatgttctatatgatcatcaaccactctccttaactctggaagtgtgtattcagtttacacctattctctgttgctccaggcttctgaaacataacatgtctaaaactgaactcttaattttcttccttaaacctgcttctcctgcagtaaatggcaactccatccttcaaattgatctaccctaaaatatcggcatcactcttgatcatttctcatgatttcactactattgaccttgtctaagccaatatcatctatcttgtctaaactattgcaataatcttttaactggtgttcctgtttctgttcttactttcatccctttcagtatcttcgtagcrgcaatattttttttaaaaaaaaaagtcatgtcacagcactcctctgcacaaagtctttcaatggtttttttatttcacatggaataaactctaaagttatttcctaaatggccctccatcacattggacggtctttgattttatctctcacctactctgctttagtcacttggatatggctattctttaaaaacagcctcacactcccctgactcagagcctttgtatctgttatttccacttcctagaatctctccccagatattggcatggcttacagctttactttcttcaagactttgctgaatgctgtgtaaaatatcatacctatatcctgtttactctgtaggcaccatctttattttttccatagcacatgtcaccacctgacatattctatttattgatttatttatgtgatttttgcttgccttcttccactggaatgtaaactccctgacagcaaggactttctttgctttttagtttttaaataactgagcacataaatattcttgaatcaataaatgcatttctcttcatctagggttctactagaactgatatgtatatcacctcatctgacagtctgttttacacttattttagtatataaatatgttcatcgtatttcaaactgtagcaaagtaaaaaaataataataccttgaaatagttggtgttagaattcctttgaagaaaataactgtcttttgtttggaaaaatacctgataactggttgggttgaaaagtgaaatcatgacagcaaggtttggcagaaggcaagcaaaaaagggattaagtcgctacgcaattgcaatttggagtgatgaaaagacaaacaaatagagtgggagagaaacagaagagtataaataaggaacagttgggtgaattgggaggcatggcaaagggtttatgacatctaattgttaagtttatgtggcttgagtttttctggtataaaccattatctccccaaaaccttctataaagtctgctgcttccaaaagggtctttcattagtggctagtgtgtgtgtgtgtctgtgtgtatgtgtgtaaataaggaaacagattgcattgtgtttgggccatgccagggtgagagtagaggaaggacagggtatggtgggagaacagaaagtagtgcgggcaggacacaaatgccatagatgaccctgagttattgagccctgctggagtcaacaagtattttggtgagaacattggggtctgagccaatcttccatcatacttatggggcagaaatgcctgaggatacctctgtgttccttgaccaaactttccttgtatttgaagactctccttttatttatgctaatctttacagaaatgtagtgactcgaagacagaaattgttactcttgaatcctttccagactacataaataaataaataaggaccaatttcaccattatcatctagaaagttattttttttctttctttttatttttcctctgtacttgcttcaataccttcaggctccttttatttcccttaaaatagagaagaaagttagagtgaatatgccaaagcaggtctaaaactgagcacatgaggacgatttcttattgcctacatataccccttcctcataaaagataacaatggacttttgacgtgttccaaatggtcttgccttgccaattcagatgtaacttttggtcctactctaattattagaacttctaattagatcaagagaactatttttctaaaaattagatgcataaataatattacttttgctaccccatccataacaatgttccccactagaattttcatatgaactgtgtagtaaacttgtgagtaatttgaatctcattgcagcaaactctctggagcctttctagggaaatataatgggaaacattatttgaaacaagcacrccattgtctggagctcaaaaatctactttgaaataatagatgttgctgcaagacaatttgatgccctaatatgtttaaagtcatagttaaatacacttaacccatcacacatctcagaattagatagtgtctatatgccacgtttatactattgtttaaaaatacattgtgtgacttgaaggtctacagaggtggcctgaaagagagcctcttgcytcttccccctgtgtgaattgtgctgttgattagctgttccacgagcctagaaaagctgccagttaatgccagggaccccaaagctgaaggaagatttgcagctgtgactggcctagattctggcagtgccaggcttgtgatctgttggagctgttgctgcctgtgctgcctcttctagcattyttgaattggaaaaaagatggaacagggaaagctggagatcagaaaaaggaggcttggctcacataatagctattcccttaatctatgcagatttgatatcttccctttctttaaacgattcatttctgtgaccgtcactcccccattgccagcattgaccctaacaattcttttttgtcctcatttacatggccctcgaactttagaaataaaacatttagaacaaagccatatttccccacttccataaaactttcctgtttgtgcaatgctacctattagaacactctaatccaaagaaaagtgactgaaaaaatttagattactcaaaatggcatcttgatttttatcagttggctttattctgaaattagattcttaccttgatctatgttggactgaaacctcctgcccaccaaataaggtcatatttaatcaccaaattatgccctatggtcgtgaaaatcacgacacttgttttcataggcaggctctcaaatgtccaaatcttaatttggctaaattatatctgtttgatatgtttgttggtttgtattaaactgaactgaatgaggaatgagagatctggtcctttacttattgtcaccatatgtaaactattccatctataaccaaaagaaagacaacacacacatacacacacacacacacacacatacacaaacacacacacgttagtcattactccactcattatttgagcggcaataaatttattagtttattattaactttattattcccagttgaaaaccttaaatcatattatacaaatacattcaatctctcaaattaaatttagtaggaacaaaataaaactttatagttcatagactgaaaatcttctacattcaaataataatttttgtaaaaatgtaagcaatattgtttttgctgcccagctttaattcttttagggacatgaaaggaggaggtcacaccaaaaaaaagtcaatttacttttgaaatgttttcaaatgatgagaggaaggggactatattataaaaacaggatattgagctcaaatgaagatgagtatagctgtggcacccaagggatgttggttcttggaagtagagtgggggcaggttttatttgaaaatatgtaatgaagtttgccataatacaacaacctggggactctaattaagaggtagcataataataatattgattttttaaactataatgatttctctcttggcaagccctgcaggacaaattaccaaaactccagacagctcttattttccctttcttctgagtagattcgatcatgaagatcactcayccattaccaactctccatctcttagaagcttcaggaacatgcagtgtggctttcctggccaccacctcttcagcagtgttttctttatgctgtgacatagccatttgttccctgttgctaatccatctctccaggaatggtcctagagatgcttcctctccattgggcactattctttggtggggataaggttctttcttcaaccagaggtgaaattctctggaccagaggaaaacatggagcacacttaagggtcctaatctccagcagaagccccagcattaaagttctttatttgagtcattctttccatttttttacagcaacccatctctctaaagaaatatatacagtcttctgcaagggttatatgaaagtaacattggtttgttcattatttcttcattatacaatgttgatttagaacctactatgtgccaacctccttctcacatcattgatcaagacaataagctcccctaaatcttattttctaatgaagggaagctggtaggaaaaaaataaatgcattaaaatgatccaaatagtgacatattcaatgtaggaaattaagtatggaaggagaattttcaagggagtagacatgcagtgtcttcaaataggtggacaggaaaaacatctctgaggcccaccggtgctgaggcctgggaaaaagcaggtggcagcatgcttgctgctttcctttgagaagcagaaggtaggttagtgtggctggagaacagtgagacagagaagggtgcaaaaggaggtcaaagcagtccagaccagggcctaggaagctatagcaggaaatttgattcttggttagcagtagtgtgaaagaagaataaccatatcagctaaatcaatatgattatatgactaagtcatttgaaaagagaatttgccaataggtttacatatcagtgcatggactgagctaatgccacacctgagcaattgtccaccttagcaattaccacaccttagcatttcttagaaaatgtatacagaaagagtttcaggcacaggccagctgatgttcctattcaaagaaaaagagcaagaaaaaaatagaaataaaattatatcctttttcaataaatatggcaaaaagataatataatttcatttttcaagagcaaggttacatgcatcggtctatgaattggtataagaaagtatagtttctacaaaatgtgttacatacagtaaaaattttcattcatttaagcaatgcatgtcaatatcactgaaaaacgtgccaatgtgcaatgccatgatgtacgctaaccaagaaagccctaggttcagctgtcttcacaaaggaataagtcatagttttgaccactctaacaaaaagaacgtttttaaatagagcatgtcattgggcaaattttgttccattaactactacttctgcctatgaatgaatgcttatacaaaaactgttgttctaacagtttgaggtgattggagaaagggatctaaattttgttttctttatttttatttttattttttttttgagacagagtctctctgtcgccaggctggagtgcagtggcgtgattccggctcactgcaacctctgactccccggttcaagtgattctcctgcctcagcctaccgagtagctaggaatacaggcatacgccaccacgtccagttaatttttgtatttttagtggagccggggtttcaccatgttggccaagatagtcttgatctcctgaccttgtgatccgcccaccttggcctccaaaagttctaggattacgggtgtgagccacagtgcctggcctgaatttttattttctccatcacttcattcctatttggaaagccaataagtaacaacaaatattctgaagcactctaagagcttgcctgcaatgttaaaccaatgagtatttaggaagagaaatataatccacatgttcttgattaacttataattaaatcatttgtaagagccatttgacgtccaaaacgacttgtaagatttttttataagctttgtttccttaaagcaaaaagatctattattgccaagagtaaacaaagcttaaaggcacatctactttaacaacaacaacaacaacaaagcctaaaaagcaaataaccaaacaaaaaaaaaaagcaacaaaaacaaaagccattcaatagcatgatgaaaatgcactgtacctcaaaagtagacaatactccgactccagagccatgtacattgacaatcctcttaagttttgacccagatataaattgctggccaatctcacctcatttacccttttatgattggatgggtaggacttggaacagaaacttaactttaaatgcaaacagctgctacaactgacctaaccccaaacaactccagaacgcctactctcagamcttgctttgatcttggaccattaacaataagactgagaaatttgtgacagggagacaaatcgaaattttcccacatatgtaataaaaacagagttctttttttttaactatactttttactatactttttaaatttactttgttccatgtaggaacaaagtaggaagtatttatgtcactcggtatgggacttcagagtagatggtcctaaccaacyctaaaatttaataatcttcttgtgaccagcttgccaatagaaaaagcatcttatagtttgccctgtaagtgaacttgggcaaagaaacaaatatagggacaaagattcagcaagaaagttgaatctttttcaaaaataaagaatatgattgacaaatatttaatgactccacatttagaatcgaatcattgaatatgtttttggtaaaggatatatgtgaaacttaactctaaatgtcctatatttttaaaataatgtatacaaaaacacatttttaaaaccaaattgtttactattcatgctcaaagtatttgcaattcactagaaacctaaaaatactattttcaaaaattattacataacaaattcctattcgttgtagaaaactaggagatacaaataaatttaaagaaataaattcacaccatggaatactatgcaaccataaaaaaggatgagttcatgtcctttgtacagacatggatgaaggtggaaaccaccattctcagcaaaactatcgcaaggacaaaaaaccaaacactgcatgttctcactcataggtgggaattgaacaatgagaacacttggacacaggaagaggaacatcacacaccagggcctgttgtagggtgggggaaggggggaggggtagcattaggagatatacctaatgtaaatgacgagttaatgggtgcagcacaccaacatggcacctgtatacatacgtaacaaacctgcacgttgtgcacacataccctagaacttaaagtacaataaaaaaaaagaaataaattcagatcacctgtatttccaccatcctgtagtaactattattaacatgtgtatatgtatgtatgtgtgtgtatatctatatgtgtgtatatatacatatatatgtatatgtgtatatacatatataagcatatatatgtatatgtgtatatacatatataagcatatatatgtatatgtgtatatacatatataagcatatatatgtatatatacatatataatacacacacacacagatacttttttccacccatatttataaatgtagtttttcttaacaaaaataagatgccactataaatgtttttgtaatttaattttttttccttcattccatagcctttcaacaaatattaaactttcccttctttacaagatggtgtctgagtacaggggtagcttacgtattcagatagctctacaatccatagagaccatctttctggtctcttgtaccagtttgaaatcatgcatccccacttgccaagtctgcagatgataaacccttgatctattttctggcatgggcctttcccaagggtaggtcttgtggcttgatgatgcaccaccctcggcacactgatgcttacctctgagtccagctttgggctgcctgtttgcctggtatcacctctatgctttgaagacagaaagtctttaaaattaagactttaagggaggagccaagatggccgaataggaacagctccggtctacagctcccagcgtgagcgacgtggaagacaggtgatttctgcatttccatctgaggtaccgggttcatctcactagggagtgccagacagtgggcgcaggtcagtgggtgcgcgcaccgtgcgcgagccgaagcagggcgaggcattgcctcacttgggaagcgcaaggggtcagggagttccgtttccgagtcaaagaaaggggtgacggacgcacctggaaaatcgggtcactcccaccggaatactgcgcttttccgaccggcttaaaaaaggggcgcgccacaagattatatcccgcacctggcttgtacggtcctacgcccacggagtctcgctgattactagcacagcagtctgagatcaaactgcaaggcggcagcgaggctgggggaggggcgcccgccattgcccaggcttgcttaggtaaacaaagcagccaggaagctcgaactgggtggagcccaccacagctcaaggaggcctgcctgcctctgtaggctccacctctgggggcagggcacagacaaacaaaaagacagcagtaacctctgcagacttaaatgtccctgtctgacagctttgaagagagcagtggttctcccagcacgcagctggagatctgagaatgggcagactgcctcctcaagtgggtccctgacccctgacccccgagcagcctaactgggaggcaccccacagcaggggcacactggcatctcacrcggcagggtattccaacagaccagcagctgagggtcccgtctgttagaaggaaaactaacaaacagaaaggacatccacaccaaaaacccatctgtacatcaccatcatcaaagaccaaaagtagataaaaccacaaagatggggaaaaaacagaacagaaaaactggaaactctaaaaagcagagcgcctctcctcctccaaaggaacgcagttcctcaccagcaacggaacaaagctggatggagaatgactttgacgagctgagagaagaaggctttagacgatcaaattactctgagctacaggaggacattcaaaccaaaggcaaakaagttgaaaactttgaaaaaaatttagaagaatgtataactagaataaccaatacagagaagtgcttaaaggagctgatggagctgaaaaccaaggctcgagaactacgtgaagaatgcagaagcctcaggagccgatgcgatcaactggaagaaagggtatcagcratggaagatgaaatgaatgaaatgaagcgagatgggaagtttagagaaaaaagaataaaaagaaatgaggaaagcctccaagaaatatgggactatgtgaaaagaccaaatctacgtctgattggtgtacctgaaagtgatggggagaatggaaccaagttggaaaacactctgcaggatattatccaggagaacttccccaatctagcaaggcaggccaacattcagattcaggaaatacagagaatgccacagagatactcctcgagaagagcaactccaagatacataattgtcagattcaccaaagttgaaatgaaggaaaaaatgttaagagcagccagagagaaaggtcgggttaccctcaaagggaagcccatcagactaacagcggatctctcggcagaaaccctacaagccagaagagagtgggggccaatattcaatattcttaaagaaaagaattttcaacccagaatttcatatccagccaaactaagcttcataagtgaaggagaaataaaatactttacagacaagcaaatgctgagagattttgtcaccaccaggcctgccctaaaagagctcctgaaggaagcgctaaacatggaaaggagcaacgggtaccagccgctgcaaaatcatgccaaaatgtaaagaccatcgagactaggaagaaactgcatcaactaacgagcaaaatmaccagctaacatcataatgacaggatcaaattcacacataacaatattaactttaaatgtaaatggactaaatgctccaattaaaagacacagactggcaaattggataaagagtcaagacccatcagtgtgctgtattcaggaaacccatctcacgtgcagagacacatataggctcaaaataaaaggatggaggaagatctaccaagcaaatggaaaacaaaaaaaggcaggggttgcaatcctagtctctgataaaacagactttaaaccaacaaagatcaaaagagacaaagaaggccattacataatggtaaagggatcaatacaacaagaagagctaactatcctaaatatatatgcacccaatacaggagcacccagattcataaagcaagtcctgagtgacctacaaagagacttagactccaacacattaatagtgggagagtttaacaccccactgtcaacattagacagatcaacgagacagaaagtcaacaaggatacccaggaattgaactcagctctgcaccaagcggacctaatagacatctacagaactctccaccccaaatcaatagaatatacatttttttcagcaccacaccacacctattccaaaattgaccacatacttggaagtaaagctctcctcagcaaatgtaaaagaacagagattataacaaactgtctctcaggccacagtgcaatcaaactagaactcaggattaagaatctcactcaaaaccgctcaactacatggaaactgaacaacctgctcctgaatgactactgggtacataacgaaatgaaggcagaaataaagatgttctttgaaaccaacgagagcaaagacacaacataccagaatctctgggacacattcaaaacattgtgtagagggaaatttatagcactaaatgcccacaagagaaagcaggaaagatccaaaattgacaccctaacatcacaattaaaagaactagaaaaccaagagcaaacacattcaaaagctagcagaaggcaagaaataactaaaatcagagcagaactgaaggaaatagagacacaaaaaactcttcaaaaaattaatgaatccaggagctggttttttgaaaggatcaacaaaattgataaaccgctagcaagactaataaagaaaaaaagagtgaagaatcaaatagacacaataaaaaatgataaaggggatatcaccaccgatcccacagaaatacaaactaccatcagagaatactacaaacacctctacgcaaataaactagaaaatctagaagaaatggataaattcctcgacacatacactgtcccaagactaaaccaggaagaaattgaatctctgaatagaccaataacaggagctgaaattgtggcaataatcaatagcttaccaaccaaaaagagtccaggaccagatggattcacagctgaattctaccagaggtacaaggaggaactggtaccattccttctgaaactattccaatcaatagaaaaagagggaatcctccctaactcattttatgaggccagcatcattctgataccaaagctgggcagagacacaaccaaaaaagagaattttagaccaatatccttgatgaacattgatgcaaaaatcctcaataaaatactggcaaaccgaatccagcagcacatcaaaaagcttatccaccatgatcaagtgggcttcatccctgggatgcaaggctggttcaatatacgcaaatcaataaatgtaatccagcatataaacagagccaaagacaaaaaccacatgattatctcaatagatgcagaaaaagcctttgacaaaattcaacaacccttcatgctaaaaactctcaataaattaggtattgatgggacgtatttcaaaataataagagctatctatgacaaacccacagccaatatcatactgaatgggcaagaactggaagcattccctttgaaaactagcacaagacagggatgccctctctcaccactcctattcaacatagtgttggaagttctggccagggcaattaggcaggagaaggaaataaagggtattcaattaggaaaagaggaaatcaaattgtccctgtttgcagatgacatgattgtatatctagaaaaccccactgtctcaacccaaaatctgcttaagctgataagcaacttcagcaaagtctcaggatacaaaatcaatgtacaaaaatcacaagcattcttatacaccaacaacagacaaacagagagccaaatcatgagtgaactcccatttacaattgcttcaaagagaataaaatacctaggaatccaacttacaagggacgtgaaggacctcttcaaggagaactacaaaccactgctcaaggaaataaaagaggatacaaacaaatggaataacattccatgcttatgggtaggaagaatcaatatcgtgaaaatggccatactgcccaaggtaatttacagattcaatgccatccccatcaagctaccaatgcctttcttcacagaattggaaaaaactactttaaagttcatatggaaccaaaaaagagcccgcatcgccaagtcaatcctaagccaaaagaacaaagctggaggcatcacactacctgacttcaaactatactacaaggctacagtcaccaaaacagcatggtactggtaccaaaacagagatatagatcaatggaacataacagagccctcagaaataatgccgcatatctacaactatctgatctttgacaaacctgagaaaaacaagcagtggggaaaggattccctatttaataaatggtgctgggaaaacaggctagccatatgtagaaagctgaaactggatcccttccttgcaacttatacaaaaatcaattcaagatggattaaagacttaaacgttagacctaaaaccataaaaaccttagaagaaaacctaggcattaccattcaggacataggcatgggcaaggacttcatgtctaaaacaccaaaagcaatggcaacaaaagacaaaattgacaaatgggatctaattaaactaaagagtttctgcacagcaaaagaaactaccatcagagtgaacaggcaacctacaaaatgggagaaaattttcgcaacatactcatatgacaaagggctaatatccagaatctacaatgaactcaaacaaatttagaagaaaaaaacaagcaaccccatcaaaaagtgggcaaagacatgaacagacacttctcaaaagaagacatttatgcagccaaaaaacacatgaaaaatgctcatcatcactggccatcagagaaatgcaaatcaaaaccacaatgagataccatctcacaccagttagaatggcaatcattaaaaagtcaggaaacaacaggtgctggagaggatgtggagaaataggaacacttttacactgttggtgggactgtaaactagttcaaccattgtggaagtcagtgtggcgattcctcagggatctagaactagaaataccatttgacccagccatcccattactgggtatatacccaaaggactataaatcatgctgctataaagacacatgcacacgtatgtttattgcggcattattcacaatagcaaagacttggaaccaacccaaatgtccatcaatgatagactggattaagaaaatgtggcacatatacaccatggaatactatgcagccataaaaaatgatgagttcatgtcctttgtagggacatggatgaaattggaaatcatcattctcagtaaactatcacaagaacaaaaaaccaaacaccgcatattctcactcataggtgggaattgaacaatgagatcacatggacacaggaaggggaatatcacactctggggactgttgtggggttgggggagggtggagggatagcactgggagatatacctaatgctagatgatgagttagtgggtgcagcgcaccagcatggcacttgtatacgtatgtaactaacctgcacaatgtgcacatgtaccctaaaacttaaagtataataaaaaaaaaaaaaagaaaggaaaaaaaagacttcaattctcagttgtgcccagtgttcttccctgggcctatgacaatctctgactctttgtcaaccacatacagcctatggagccctgacccctctctgctttaagctggccatgttgccatttctactctcctgttggtgcaggccattctacagttctccttaaggggtagcaaatgagaatcaaagcacatgctcttggcttcccattcaaaaacgtgctctttctgtggtgttcaacccataagggtggaaaaaaggacattcacatttgactccttgctgcccctccctttgtctctgggtcctcctctctggccccaggaaagtcttgcataattttccagatttttttctgctttatcatctactctgtggtcagtcctttaagctctgactcattgaaacatgcaatttttcccatttctcattaaagcctggcttttgaaagtcaaaagtatttgcttttaagctattaactctctatggatttaataacctctgttttgaaacttaaagtcaagcaatgattcccttgttcttggcagccccccacccacttccacatggcaatgaattcctctgaaccattgggtagggcagctgccaaacaactctaaaaggggattaccacaagacacattggtttgatatctcaaaaatggcatcctttatatcactggaagtgaaattgttgagtcaaagaaaatgtatattttaaagactttaagtacatgttagttatcctccagtagactattaagagtggccttttaaacctaaaaaagttaatataaaaaatgagtattagcatattttcatatttgtcaaataaaaataataaatagtatcttattactttaattgctaaaagcatgaacaaatttgatagacaacttggtagttatattaactcaatcatttgataaatatatataggttccatatgtgtgttacgtaatgggaaaaaatctgcaagacatattctatgactcatattcaagaggctcacaggccaatgggaacacagcttgtaaataagtaattgcctctgaacgtcaaaatgaagagtgataggaataaacttttacacattcaatgttttaaaaaattccatgagtcactgggcttggtggctcatgcctgtaataccagcactttgggaggctgaagcaggctgatcgcttgagcccaagagttcaagaccaccctgggcaacatggcaaaactccatctctactaaaaatacaaaaaattagctgggcttggtggcatgtgcctgtagtcccacatattcaggaagctgaggcgggaggagcacctgagtctgggaagtcaagcctgcagtgaatatagagcatgccactgtactccagcctgggcgacagagtgaaatcctgtctaaagaaagaaagaaaaatacattccatgagtccacactgatacttataaagggtttttcttttcctttgcttttagggagggagaaatggaaaagttttctttattcttttaaaaagccaactaataaatgtagagggaattaaagaaacaggaagtaattcatttactggcatctagcatcataacaataattgactcagttaggaatcatcattagatgctagaattatgggatgaaaacttgttgagagcagcatatggaaaaattgagttgagggacactctattattaaattaccaaatttaacatcaacagtaatggraaaaaactgacattatgtacctttgatgtgatgtgataaagagtatacaatatcatcatctatgtatattcttgccaaaaatgtttaacctaaattaatcataaagaaacattcaagtcagacaaattcaaatggaagcacattctgtaaacaactgcccagaattctttaaaaatgtcaacaccacaaaacctactctgtgtcagtccatttgaattactataaagaaatacctgagactgggtggtttacaaagaaaagagatatcttttggctcatggttctgcaggccatacaagaatggcaccaacatctgctcagtttctggtgagacctcaggaagcttacaatcatggcagaaggccaagaggagcaggcatatcacaaggcaagaaagggaataagaaagagaggggaaactcctagactcttaaacaaccaaatctcgtgtggactaagtgagaactcactcattactatggggaggccaccaagctattcatgagggatctacctccatggcccaaacacttcccaccaggtcccacctccaacatttggaatcacctttcaagatgagatttggaggggacaaatatccaaaccatatcacattcccattatgccccctcccaaaaggctatgaaacttttctagatcaaataagacaaaagatatataccaacgaaatactacaagtaactactgattggatcctgaatccaaaaacactttaaaagaaatkattgggcaatggaggaatatttaaataggaacaagtatattagataatagtttcatttcaatattaaatattctgaatatggctgtgaaggaaaatgtccttgttattaagagatgcactctgaagtatctagtggtgaaatagagtgatatttacaagtaactttcaaatggtggagagagaaaaagaggagatggagggaaagagaaagaaaacattgcaaactaggtgaatctagatgaagggtatatccattatactatttggtcacatcccatacttctgaattattttgaaataaatacttggggaaaaacattaagtgattgtaaaaaataataattcccgtacaccacgaaaatggcatgagaaaggcagtaattacgaacagagatggcataaacctttctcctcttttcttctccgtgtacctctacttcttggtgacagtacactatcctgtgcctgaaacaccatctgatgccaatgactgactaagtgatatctctagttctgtcttgtcttctgaattttttactgctgaatccccattgcctggcacctagtaggtcaaatgcttgagaatgaatgaatacattctgcttggaggagagaagggcaatgtcattgggtaagagattctttatctagatctttaaaagtgagtagatgttagtagtaaggtgaatgggaagatggcctgtacatccgtagttgactctttctccaatgccttggtctagacaataaatgatcaacacaagctgaggcagagaggtggggcagggggagaagtggagcgtgcccatcctgtatgatagtaatgacagatcctcagctagttgtttttctgtggtaargtagaccaagaatttccaactctgattttaagaagaaactgaaaatctacagatttctggaaattttctcaattattaaaagtcttctttttaaatttattttaagttctaggatatatgtgcaggatgtgcaggtttgttacataggtaaacgtgtgccatggtggtttgctgcacctatcaatccatcacctaggtattaagcccctcaggctcaaacaaaataagtattctggatgaatgacacagtttgcagtcccagatctgaaacatgattagtagcaaaagataagtagggccagcagaaagaacaaatcttggagactcttgtgaaagatatgctataagagatagagccaggttttaggggaagattaagtatgtttgatgagagagacagaaaaaatgatcaccagtcaaatcggaagaagggagacaagtcctaaataagacatttaaaaaaaacctgttagtcattggggcacaaaaaaacataacctcaaaagagggtcacacacacatacacaacaagatagcttcacctttaaaagtgagcccagtatagtgttagcttcccagagcccctctgctctggagggacctgggagtacagtggagcctggcagaagaggtgtttgtagtaagaattggagagtggggcctgtccaagtggaactgaagcaaaaatttcatgttgaatctccctgggttcacacagatcattccaggagtcctgcttccactggagagggcaagaactgaaaagcagtgggcacgggcactggagcttgatagcacattcccaactctgtaatcttccctcaatcaccccctcaccaattttgccttttgttttccctaagaaacatagaaatgtttgtccaactggaggaaacattgatagcatctgtaatttgcattattttgcttttttggtctccatatttacaaccattcaatgtctgtttttgagcatctgcttggtgccaggcactgtatcaggtactagagacacagcaaagagcaagacagatcattaaataaagatattacttgtatataaaaataaatcctataaaagtcaaggcatgatttttttcaggaaaaaaaaaatagaagtatgtttagacaaaatctacaggacaaggagattrcagtgagttagtctcagagaacaccaatttaaattttcattcaatcattcactatttttacaataatttattgattattgactattgctcagctatagaagatactagagagaaaaaaaacaaatttttactgtttgagagttcacattctaaggaggaagctcaacatttatataaataaataattatgatatgtataataagaatagaggtttgagcaaagtgtttaggatctcagtgaaggaagaaattaattctacttaagggtctgagaagtcttctctggaaagtagagaagaaatctggatttgtttggtgatgtactaagaaatggtcataaattgtaaatactgaatagaaaatatattagagagacctgtagaaattaagaactgaaggggagtggtcttgggaagaagttttatgaaagtggacctgtgctgtacagtactaggaaagagacaaagttgactgcgggaactgtacataaatgggatgtctggctttacccttccaccacatgtgaggcttttggaacaaaacgttaatagaaggtgtggggatattgatacaaattatatcctgataacttgtgaaacaatttgcatctcatcattttaaaatccccataatcttctcaaatcaggccgagaaccttcaggatctgttacacttgtgtaagaaggtggtgggatgcaattccctatgatggattcaggcagtcttttcccacactcagtggagtaccaagggtgaaaggcaaaacagcatttaacacaggcaggaagaggctgcaangtagagaattttttaaaaaataataaaactggccaaaaattagttcactttttattttcaccatgagtgcacaattcttacccatgtcagtgataaaacgcttcttcccaaaatatgttctctaagttccaagcaattattgtgattgctgtttgagttctaatgtgaaagctgtaagtgatcacattttttgttactcctcatttaataggcattatttttgacatggaagttaacacagagttcccagttttacagctatactacaacacacacacagactcagctatacatgttcatttagaaagtagttcataacaggttaaaattatttgagcctgtgtaacttatgtctgcaacccctaagagactacgaagtctttcatttaaatagtagatacgaactaaacagggatagctgtgtggatttttttcttctctgattttttttgttgttgttgcaaatgaggttaatcacacacacacaaaatttgcaaatagctagtgttattcttgaacgatgagcagtgaaaaccagctttaaaatcctttcttgattggctcacaaaaattgtgaaatattccatttaccatttcataaaaaaagagaatcaaattttgagaataaaattctcttcattgtctgtgtttattttctggccatgagttattgtttatttcttaattattctgaaaataattatgttgtaatgaggaagggatgttcataaatgatcccctctgagtgtcaagaatgctgggcacattagtacctattcacaaacttctctagcagtgagctgaagcagctagaggaagtttaaggcaaagaagcaaaagtcagctcttccccaaatgtggctgtcttcagaaacttggtttcctagaactcatggactcaacggtgaatgtggttgggggactcatggttttagtggaaactgagtattacaattttcaaaacacttgaaactccatttgtaaaattctcacaggtagacattccataaacaaaagatgttagtatattaccataaataactcaagttattatgattactcaagttatattgtatgctgatttaaggtaccttttatcatagaagagaaataaaagatcttttgcatcaatgagagtgcttgaataaatcactcctgtgaattaacatgtcacagaagagaagcggaccccgatataacagattcaatggataagaaggagggacaaaattctgcatcaccagtttgagatgtacttccaaaatccaccttctaatggacagaaaaagcaaggccatgtggaaattgtctataacactatttaagggatattttctgtcattggttacattcagcattgatttgtcattttgatttcattagtggtccttatgacttggatgctcacattctgcttgaggagctataattacattttgtcaaccaagctaatctgatttttgcatgcacaataacttccagatctaacctacttcaagagtcctatgctgttgctgctgcttctactgctactaccacaaatagtgatgtgtcacagaactttaaagagtttttaaaagtatttagataaataatctctccccaagtttcttaaaattagaactgcgtgtgatataataataatcaaatctggagatatacatgttaagtgctcatgctggcacttctcttcccacaccaatgcagacattactaaccactctttagcactaagcctagatacccctctgagtctttcacaattatcagtggatgtccaggcagccactaacctatcatcttgtattggcattacaagagaaaatatagtttctattcctgatatagtgtaatttatcattttacagataaagaaatgctcaaaaaggactgcacagtaaattagttgcagagttaggacaagaacatatcttatctcctgactctcagcccagtaccctttctactgtctcatgtgtagttttccgtaacataacacccaaatgactaatcagattctggtttcaaaatttaaaaactcacaatgacttttaaatttcattattcagaaagctgttctaataaagagactttggtccaatatatttactacctcatctggtcaccatcctttacacagcaagtataatcagttatctctagggggcagagggtgatttcagcagttgctgaaatacatgcatttataaagactgctagcatttttacatcctacaaaaatgcacagaaccaatcccaaaacatcaccaaccctcaaatagaaggattctagctacatgtgagggggggtagctgatcaaagtcagctgagactaataaacatgaaaaagaagagctgaagagaaagacagatgccgatgagtacttctcaccatttaagacaacttataattctaaccattctgctaaaaacagacaacggactgattgctattgttttactgattaactattctctctgctttgtcccaaaaggcaccctggcaaactttgcttagtaaatattgacacctgtacaccaagctggctaatgccattggctcttcagcaatcttcccatctgttgcctgagaattttaagcaacgtattttgggaatcttgctctctttccattgtaaactgtaaaaaatgctacccagaagctaatccgaaagccacatggccctagaggggtctgtggtaagtaaagggaaatgtagtctaatatgtaaaatgcatatcccactggcctccgcggccaccctgtctttagttaacagcatgccagggtaatctgcttagttaccaagtggggcttttttccctcttccccatgagatcacccagaccacgatcaaagcccaaacacactctctgccagctctattgttccccagagtgggattaatgactaattatgtcaggtcactcatccagatggcctctcagatgttcctttgtcattgtctgaccttccatatgcccctttgaccttgaggtttatttccatggaaacatgaagcctcagtttccttgctgagattgccaagaattggccaaaaggagggatacaggataatctacccatagtttgtattctgcttccatctcatgccttgttaaatccaatgaatagataaaaaatgctatctggtcccagctgagtgatgaccatggtcatgattctatgttacatgctatgttttttaaattagcagacagctttgtacatggaaacgtgcattcaatttgaagaacatcaatcgccataatgtgatctttttatctcattaatgttaagcaagggtaatagaatggaattacaaaatatcactgtgaaaggaatacaattcagagaattatagatatcctccattaaagccctagagatgtttggataagtcaacttgttcagtttcataaattaaagattctttactcactaccttttctggggtttaaattctagcctcagatgttgatcttaatctgaagaaggattttaaggttgttagtaaaatagaaaaaatttcctcaaaactaccaaataagtaaataaaaatagaataggagactgactcatgaactcaattaaataaaaaaggctggatatgtatttgcatgggataaaatgtatttcccttcatagtttaaagaggactaaggaataatttaaatgcctaaaacagggaggctaattcacctcttccaagttcatccaagaataaaatgtctgtctctrtacatgaattcatacaagcccagaggtcccacggagaatgcaagcagagtgggaagtactcacatgtgcccaagtttccctggcagggtggcaatttattaatcttccctcaccaatggtcaagaagctgcagattccagctgagagttttcggtgtatttaagaagaaaattagagagctaggtgaaagaaaggattttgttccttgcattgttcttgaagggccatttttgctttcagaatccagaaaggaagactgggtgaaaagaaaaactcaccctggttaatggcaaccagtcccctccactccccttcccagggctctaaggccctttggaagcagtgacggtgccttgctcattactaactacagtcatctttaatacttcagtgcccagcacagtgcttggcataatctagatttctaagagcttgctgaaggagtgaatgtgagataaatgttagtgccagactaggtggaccagaaagcttgatctttctcttttttttcattccaataacacagtcagaaattgtctgattaaaaaacattttgtatatgcaagtttagcctaaaggaacacaaattcaacatgtcacagagaaatcctttctttccactaaaagaagacaactgtgcttaaagaatagtaactatacagtagatttccacaaggtataaaaggacaccatgttcctaatcatttgagaatgtggccaggaaactcctgccatgtttcagaccccttgctctatgtctttgtaatgtccccattccacatgagatactcattatatcttctggctrtgtcatcactactcccagacaaagattctctcccttctcagaatagcactgctagctacatggctaaccaagagcctacactatggatgtrgagtggtggcaggtgacctgtagacagtggtactataaatctgctaccttccagattattcaataatgtaattaagtggtgcttattatttccaatatgtagaagagagattcccccaccccccactgggaccatatctactgaagtaatttttaaaattcccagggagaaatgctttgtctttcatatgactcatagacaaagaataatcttaataagaagtatgtcccaaatgttgacatttctacttcagcaaaatcattacctaaacataatttcaaatgtcccattatctgaggcatcagatctgacacttttctaggtctcagtttcctcatctgtaagtcatacaaacgcaccctgctagtccttgcaataactacaagttgaaataattctctcaacaggtcttagaatccttatgtactggaactaaaatactcatggttgcctaaaagattcatgtgagtcagctagtctattagaatattacatcaagggggaaattactgtatcaaggaataaggaactggagatcagtatcatccaagtattgcttgtttgatatttatggtccttgtaaattgccttgtaagtagttttatatcaatgaaaaaaatacttgtgaagtatctataatgtgtcaggcactggcttagtttctggagatacaataatgacaatctcaagttgctcttagcctagtaaggaaactgagacgtaaacccaaatgccttgggaaaacatgagacgacttcctggaggaagtgatatctaagctgagttgagccctaaataagggcagacatagaaaacaggggaagaaagagtgagaaaaagcatccagaaagagggagcagtttatgccaaattcttcagaaaaacatagcaggccaaatttagagatttgcaagtagttccatatgactgaggtatgcagtgatgaaggtgacgatggggaggtgtacaggagtcccatcatcagaagcctcatcttagagaatctacagcaacaagagatcgacacaggcagtaccagggtatccacaaaaggagtgaactgtcatcagctggagtgcctcaggcccctggttggaaatcaagggaagaatttcagtccagagaaagaaagggataactgggccaagccagggacccagtcctagaaggcctagattactaggctttccaggcagaaacttgggcactctgaacaagaaggcaaaaattatcatgtggggactgggttttagggacaaggatggagctcaaatctcacctacttctcccagacaagcactggaggtaacttggagctgggtttcagagtgctgagctagtttccttgtttttttttgttttgttttgtttttgtttgtttgtttgtttggtttttcttttgagacggaatctcactctgtcacccaggctggagtgcagtggcacgactattattaaaaagacaaaaaatgacagatgtcggtgaggtgcagaaaaaagggcattcttatacactgctagggggatgtaaattagttcagtcactgtggaaagcactttgagatttcccaaagaacttaaaacagaactaccattcaacccagcaatttcattaccgggtatattcccaaaggaatataaataattttgccaaaaagacacatgcacctgtatgttcattgcagcatgattcacaatagcaaagacatggaatcaatctagatactcatcaatggtggactgaataaagaaaatgtggtacatatacaccatagaatgctatgcatctataaaaaagaatgaaattatggcctttgtagcaacatgcatggagctagaggccattatcctaaacgaatgaatgcaggaacagaaaaccaaatactgcctgttctcacttataagtgggagctaaacactgagtacacatagacacaaagaaggaaacaataaacactagggcctacttgaggggggagagtaggaggagggtaagggtcaaaaaaactacctattgggtactgttctcaccacctgggtgatgaacccatttgttcaccaaatcccagcaacatgcaatttacccatgtaccaaatgtgcacatgtactggcaaaactaaaaagttggaaaagaaaaaaaaaaaaaaactcctttccagagtggggggattgagtgaggttggacagagcataatgaactcttgagagtcaagtgaagggggccatggctgtaaaaagaagagaaaggcagaggcagggacttactaggtttgtctcttgcaagaatgtgaggcaatggagcacagatagtggagatacagattgaaatcctggatctggagctgcttagccatgtgattttgagaaaattaccttcttcacctttctatgcctccattttctcatgtataaaatgagaataataatactttctttgctgggttattatgtattaataaatcagaagtaacagaagcaaagtgccaggcatctggaaggcagtccatggtggtagtaaataagcagtagttttattatgagagtgtgttaatgattattctcggctgggcgcagtggctcacgcctgtaatcccagcactttgggaggccgaggtaggtggatcacctgaggtcaggagttctagaccagcctggctaacatggtgaaaccctctctctaccataaatatgaaaattagccaggtgtggtggtgtgcacctgtggtcccagctactcaggaggctgaggcaggagaatcacttgaaccggggaggtgaaggttgcagtgagctgagatcgcaccattgcactccagcctgggtgacagagcaagaccttgtctcaaaaaaaaaaaaaaaaaaaaaaagttattctttgggagatactgattggccacagtggaatataactaacaattatctttacacgttatctggatctctttcatagcattttcatcccacttttcactagtaattatgcacatattgtgataattcagttactattatgttttatattatgctttagccattttactatctcctagagtagatattacagcttttcatgggatgggtgtctagttaacccctttgggcctaaaatatggaggaatcatagggccatttgaaaaagttgcctaagttattggtagttaagtatttatttctccactccttcaatactcattgggatttatcaagtagcaatttcatgccaagccatcccatccatcactaattcctactttttctttttaccaaagaagttaggatttgtttttgttttgttttctttcactaatattacggttctaaggaatgatcagtttatgaattttggaatgtgcatttgttagatacatcacaaatgcatctctgatttggctgtttaaaggaaaacaaagaatgaaaattgtctgcccaggtactatcataagaacccaatggcatgggaaaccagtggtggggataacctataataactcatagtcaatgaagccctacccagtgcacagttcactgactctgcagcaaggcattattattgttttagatgccttaaatttgctctgttagcttagaacatagcccagaataacagtttaatgaactggctttacaagagcagcaggccctataagacacaataccagatgtgtttttcattccatttttaagtgatgtctttttggggtggaagagatgttttcaaggtttaatacaattttattaaagttttctcaatagtaacttttaaattatataggcaaatactaatttcatgataaacttactaagttaaaaaaactgatacgaagtatccaggatgattttatgtttgatgcagtaagtacaacactaaaagtagtgtaattacattctgcagaaatgtcacttatattagtctgttatcccaccttccatagcagggtaacttcaactctcctgagctgctcagactcttctttggtactttatttgatttgctgtctaatataaataaacttatttacttgtatttgagaggagatgaagaaacagcagagagaatgtttcaaaagtcacctttaaatacatgaacagaatagttcctttatcaaaactctttctttcacaggtttgctaaarcccacgtgcagatacctaaaagttcartataatgagtttctagctgctatgtatgtaatcaacttactaacttgttatatctttaacaaaattgcaggtatccaataaatccacaatagactggatttctgcataacaaagtctgcctctttgacatggaagcaattggattctcagtagttattcacttttaaagttcttattttgttaagatatcaggtttgattagtgaaaaagaaagaccatattttaatggtaacatttttgtgtgaaataaaaacattccctagaaaagaaaaaattatgaataaatggtactccaagcctcaagcagaaaagaatctggtgaatttaacattgtatatcctagagatgagttacacatgactagyatgtttaagacaaacagcttgttaaatttcactacactcagtgctacaggaaaaagtttagaatgttttttaaacagtgaacttctcaaaggaaaagaattataaaatggaaataattggtgatttggcaaataatctccaatttatttaatatcacactctttgtttaaatataaaacacaaacaaaattttcattcatattttttccttcaggaataaagatatcagtgctaattcactactgattaccaggaaattttaatattttaccggacaacttaaaacaagtgctgcaattaaaaatgtgcttatgaaatggtggctcttccctccacctctttgtgcctacttctgcagtcacatctgctttccttgctaaagaaataagcctgtggaaagaagagcttacacagctgaggaagaaaagtgcattcctttttgtctggtgcatcatcaaacaacctgtcagctacattccaaatgcagaatctttattttgcatgatgattctaggaggcagaaagcacagcttggctgactgatcccaggtggagtttgaagtgctgacagcaagagaactaatgtttagatttataaactgagtgaagttgatgtggaaatcattgcaaatgaataaatatagagtcttgcattatcatttttatcaactcactttgctcactataaccctttctatgtaattacttgcaatgaatgtgagttgtacctacaacagacatatgtacctacaactgccacatatgtatgaaatatgtagcctcttcaagggaaagaaacacaccaatttattcagcatacagattgcaaatacaaaaggcaggccagcatcttatataacagggaaggaagagttcgtggcttgtataattcatatccttaaatgagtcaaggagtattcatacccaggagtgaagataaaactggcattttattgatggcattatatatatgttaaaatttatatattttatatactaaaaaaggaagataaataaaagctaaatcaaagaaaaataagttgttggtatagtactttacctttaatattgactggagtatatattaagcagaactattgaaattacattgacataataattaaaagtggattcatttgagtgaaaacctatatttactaatattaatagttttatccatcaatggctatcaaccttattatctgttatttatatctgttgtttccatgagttatatgcattattttttacaagatttccttatgaatagttttgtattttttatgcctggataaaaccactggtggccagatttcactaatagtcctttgacgtgaggagagaatccagccataaaggacaaagctactcacagatgccactgaatctctgctatccacactgtgcccgattttcgctgctctcctttggcacctgctggtttggaatgtcaaggccagagtgcatgatgacaagtagaatgaagttaggagcagatgctacccactcctagctttgctgaaaacattactttcaggttatttgaaggtgtacccaaaggcactatccccaccaaatacacacataaatgcatgtgtaaaagaatcgtaccttccttctgatgcatagatgtattaagcagtaatattaataacattttaaatataaaattctataactcagctaggatgacatgaggtttgatagatgacaccgtatatattgagtacatatgctttttcttggcacattatcaaagagtctcaatactttatgaaaggtataaaagaagtgtatagctcttcctactacttctaattaatcctagggcatcatttttaaaaatctttacaatgggcattatgattctttatttctaatataacaagtctcaaaaaagtttgtacttactaagaaactatgataaccaacaaagtattaatataaataacattataaattacttattttaaagtaatacaataactatgattccctttctgggaatatgagaatatttttataatttctgttctccagctgttagatgtctttcctggtttcaaaccataaaatcctactggatttcacgctgttgtattttaaaaaatgttatgtcttaaagcttttctacaatttaaaaaaaaagttgaatgttttcaacatttattttatcaattaaatctgtgcctagactaaaataatsttatgttttaaggcttctctgcaattaaaaaaamagttgaattgtttcaacatttatgttatcaattaaatctgggcctagactaaaatgtggaatgctttcaaaatctagtatcatctctaaattctgtctgattctatagagatatgtccaagacaaattaaggatacagtagtgaaatgtattgggaaaataatcactactagcctaacagggaaggcatcatgattctttccaagtttatttaagaatgtgactttggacagacacaaactttcagtgtcttggttgcccttgcataaagcaaatacctgataaaactacagctttcttcttcacaaggttaagcagaatttaaattaaaatacaacataattatgaagcatcgatatctttaaacaactcaatatttctcaatcaagaatctctaataaacaaatagtgatcaataacatcattaaatgcatgctggctgtgcataaattaaatattaatacaaatacacattataaagttgtgggtataccttttcttctatatggacaaagaaaagaatctaaatagatttgaatttgaaaactttagagttacactgcaaatagtcctaaaattatagacaaaattaccaagtgttatttaattgaacatttattaatatcactacttcaaattgcctcttgccttttatctttgcagaaaacaagtatatatgtgtacatatgtgtgtattatttcattttaatttaaagaaaactacaaagtgaatcacatttctaaaatatttccttaaaaatgtggctcctatgcattttttgaaatgcaagatgtttaactttctccagaaacttgggcaaaagcccaagtccaacagatacgaatatttgctatattttgatcctgagcaaaaaaaatcaacaccaagtggtttagatgtttggtgcttggttgtgtagatattttgaagcttgattttttattttacaaataacaattttaaaatggatgtaattttggtggatattgttaattttataatcaacacctgtctctttgtaagtggtcatgaagattatgagaatgacgagtcccgtacctctggagcacttcagtaagagcccaggtgttctagagctgttgcagagtggagagtggtgggaagaagtagaaaagattacaactgcgaaacaactgtagagcataatttctgcctcaaagggcttacaatttggtggggtaaataagacaggttagtaaggatgaccttgtcagccaaagtagggagcaaatgccaggaaagctcaggagaaggagaaaggacttgttagaggagggatcaggagccactttgctgaggggatggtgttggatgcagaccgtgacggagagaaggatttagactgaaacagttgaagatctcaaaataggttgagaagagcaagcataggaaaggcacatgggaaaaaaagatgaagcaaattgttcaaaggcagacattgaggtctggtattattcccactgtgaaacatatcggctgtttactctctgtcccgttccagggatgccagctctctttctgattggtcttgcctacactgtctcttttcctgattggtcttgcctacactgtttcttttccagtagtacaggagtataaacctgaaatgttacttttgctttctttgtgtttaattttagggcaataatttaatgtttaagccaaaaacctggaggtttccctaattctttcctcatcttcatcwtcctcccacaagattgatcaccaagacctgctgcttccagcctctaaaactctctcaaaatgtccaactttctttttcccctcatcccctgttctagtccaagtcctcctctctcactgtatagaatttttcctaggtctcctcactccaaataatttcacccctttaatatattcgccacatagctaccagaataatagactgaaaatattatgttttcaggccatttcacttctctcacaaaaattctaaaatatataatggtccttgaactcttagatgatctaacccctgcctacctcttcaagccaccttctcaaaaattctctcctcccttagtccaccagccctttagggctttgggcaattccctcaactggaaatacttctcccacctaccatactctgcccctcccaacctggatgactgtcccacatcttgcaggtcccatttgggtgtccattctcttggggaaacttcctttgcccctgcttcctgtacctgcagccttggttggtccctgtgacactgtcctacagaacactgcatttctttttctcataaagctaatcacatttatgtatttcgtgtcttctaggtcatgcttgttgtgttgaatgttttgcacccacagttagcacagcacctagcccagagtgggtacttaataaatataaawtgattaaataaatggaaaacctaattgaaataccaatgctttaaatgcttggctggaatatttgcggattgcattaaatatacttgcatgtttctaaattatgtctttctccaagtgttaattatcttcaatataactactgaagtagtgctcaaagtccggtattaattaccaaataaactcaaaatattcagttttgacaagctttgaaatagctgggggttaagagtagagggtagaaattatctttagttggacttgaaaagaaattggaaatgtacaatctggggaagcagaggtctttatgacagaagtattcaaagactagcatggaaaaggcattgctttggagtaaaaggagacaccacagtttacaaaaccaaattaaagaaaaattcaaaactagaaaaacttaacagtgatgcatatgtggcaaagattggaatttccacttgttttaatctttaaaagaaaaaaataggcaatttacattaacacagcctataatccagcattttctccttaaactgcgtctcttttaaatttttattttacttaacgttctgggatacatgtgcagaacgtacaggtttgttacataggtatgcatgtgccatgatggtttgctgcacctatcaacccgtcatctaggttttaagccctgcatgaattaggtatttgtcctcatgctctccattcttttgccccctaacccccaacaggctctggtgtgtgatgttcctctccctgtgtccatgtattctcattgttcaactcccacttatgagtgagaacatgtggtgtttgattttccgttccagtgttagtttgctgagaatgatggctttcagcttcatccatgtccctgcaaagracaagaactcattcttttttatggctgcatagtattccacggtgtatatgtgccacattttctttatccagtctatcattgacgggcatctgggttggttccaagtctttgctattgtaaatagtgctgcaatatgcatacgtgtacatgtgtctttatagtagaataattcataatmctttgagtatatacccagtaatgggattgctgggtcaaatggtatttctggttctagatccttaaggaatcaccacactgtcttccacaatggttgaactaatttacactcccagcaacagtgtaaaagtgttcctatttctcctcacctcctagcatctgttgattcctgattttttaataattgccattctaactggtgtgagatggtatctcattgtggttttaatttgcatttctctaatgaccagtgatgatgagctttttttcatatgattgttggcagcataaatgcccaaccccatcaaaaagtgggcaaaggatattaacaggcacttctcaaactgcatcttaaaaaaacttttgcacaatgcagcaggtggcatgcacgagaatgttcacagcccaatgttaagagtagtgaaagaaaaaatacttgaaacaacccaamtatacatcaacaggagaacagataaatatgttgtggtgtgtccatgcaatggaatactccacatcagagaaaagttaataaaactatggctaccatgtgaagaagggtgactttaagaaacatgatgcatggaaaaatcaagttgcaggccatataagcaatatagtaccattttaaatattcaaaaacaaaagaaaaacaatacatttcttagtgtttctgttagtcagaatttttcaaagaaacagaaccaataggatatagggtcatgtgctatataatgacattttttcaatgacatactacatatagattgttggtcccataagattataatggagctgaaaaattcatatcacctactgacattgtagccatcataacaccatagtgcaaggagttattcatcattcacatgtttgtagtgatgttggtataaacaaacctgctgcactgccaattgcctaacagtctagcacatacaattatgtatagtacatgacagttgataatgatcataaatgactatgttactaatttatgtatttaccatattatactttgtattgttattttagagtatacgccttctaattattaaaaataaaaggtttactgtaaaacagcctcaaacagattcttcaggaggttttccagaagaaggcattgttatcataggagatgacagctccctgaatattatttcccctgaaaaccttctggtaggacaagatgtggaggtggaagacagtgatatttgaagatcctgatcctgtgtaggcctaggctaatgtatgtgtttgtgtcttagtttctaacaaaaaagtatgaaaagtaaaaaawaaaataaaatttaaaaatagaaaagtttatagaaaaaggatataaagaaagaaaacatttttgtacagctgtacaatgtatttgttttcagctaagtgttacaaacagtcagaaagttaaaaaatttaaaagtttcaccatggaatactatacagccataaaaaaggatgagttcatgtcccttgcagggacatggatgaaactggaaaccatcattctcagcaaagtaatacaagaagagaaaaccaaacaccacatgttctctctcataagtgggagctgaccaatgagaacacatggacacagggaggggaacatcacacactggggcctgtagggggttgagaggctgggagagggatggcattaggagaaatacctaatgtaaatgacgagttgatgggtgcagcaaactaacatggcaaaatatacctatgtaacaaacctgcatgttctgcacatgtaccccagaacttaaagtaataataataaataaaaagtcagaaaaaaagttgcagtaagctaaaattaatttattattgagaacagaaaaattttaatgaatttagtacaggctaagttttcagtgtttataaagtctacagtagtgtacagtaatatcttaggccttcacattcactcaccactccctcaacctcccggaataatttctagtcttgtaagctccattcacggtgactgccctatatagttgtgccattttttattttttatgctgtatttttgatgtaccttttctatgtttagatatgattgaatgcagaaatatttatgactgtattacagttgcctacagtattcagtacagtaacatgctatataggcttatattctaggagcaataagctataccatacagcctaggtatgtaataggctataccttctaggtttgtgtcagtacactctatgatgtttgcataatgcctaaaatcacctaatgatgcatttctcagaatgtatccctgtccttaagtgatgcatgactgtatatagatatatatgaggatacttatatcaatttttatgtgttcatagtatgacatattttatatattttatttgtagcatgttcatattattatatgaatttgctcacacagttatgaaatccaagagatcacacaatctgccatctgcaaactggagaacgaggaaagccagtggcgtaattcagtctaagttcagaggcctgggaagtggggtgtcaatggtgcaaggagcaccaatgtcagagggtggaagatggatgtcacctcaagcagggaaggcaaatttgcccttcttctgcctctttgtttcagtctttcaaaggattggtcatttccacccacattggtgaggtagtttactttactcagtctgccaatagaaatgctaatctctttcagaaacaccctcacagacacatccagaaataatatttcaccagctatatggatacctcttatcccagtcaagttgaaacttaaaattaaccatcagagggatatatacatatatagtagaatagaaagagaatgattttaaaaattaggttagtgtgatctcttgggtggatatatgggatgcagaagaagtaagaaggatgcttcaacaatattgataccgttctattccttaagttgcatggtcagttcacagatgttcatctyattattatgttttataatttacatatatgttgcatatatccttttgaaggtaccaaaaactttagacttttaaaatgaggataaaaatcaattaacttcagcatataggttagatccaaagtctctgccataaaatatatggaaaaaaaagcaaatctcaaaatgtaagagtgtaaaacggtcagtttaggatagtaggtaaaacttctatataaacttcaggtgctatttatgatgatcactgaataatattcatagactaatgaaactcttgctcctcttcaaggccaaggcaaaaattataagtgggattcaaaaatattagaaaactcaaaacaaattgatcagtgacatgtttttaaaagattctggtttgttggtattacagccctaacccctgtgacagacattaaccatcattatggcaatttgtgtagacagtaactggaaagggctggaatgaccatagctccctactgagtgtggaactttgtcttgagtcaaatgaggcccataatggatcccggcacataatcactcagtaaatatttattgtatgaaggggagcaagtgaaagttgcaactctttttgctatttcctcccacctgtcacccagtgcagtaaaggaacttctggtaggctacctgtgtgaattgtagcctattgatgcagtctacctatgtgaattgtaaactttactctggaaagccagctaaagcagcccaaatagttcaactccttgttcagcatttccctcaaactttgctcccaggcagccaagggccgcaggggaatgaaaaatattcctctccagcctgagcccccagaagaaggagaaaaaatgcaacatacactttggcaggtaactgctttctccttctcctcaaaaagaaaggaggtgacacatgaagataatagattatccctgtgtgctatcccctaactagaatttttcttttaactgtagcaatatatacgtaacataaaatttgctttatattatttacactgaatgcaacatgtggcgaagtatacgtaacataaaatttgctttatattatttacactgaatgtgacattcagtgacttaagtacatttatgttgttcaactatcactagagtttttttcatttcccaaactgaaactctgtataactccccatttctccctccccccagcccctggcaccaccattctactttctatctctaagaatttgactactctagatatctcatataagtagaatcatacaatatttgccctttggtgactggcttattatacctggmgtaaggtcctcaaggttcatccatgttgtagcatgtgtcagaatttccttcctttttaaggctgaattccttcgtgtgagtatatgacattttgtttatttactcaaccagcaatagacagattgggttgcttccacttttggctattgtgaataatactgctaggaacatctgatcaagcccctgctttcaatttttttgggtatatacccagaagtgaaattgctggatcgtgtgctaattctactttwaaaatcttgaggatcttccacactgttttccacagtagctgcaccattttacactcccaccagcagtgtagaaggttcccaatttctttaaatcctctccaacgcttgttacttttttttaagtgacaaccatcctaatgggtatttaataaagtttttttattagaatcatttttctttcttcttgtaagccacatcactcatgcatgcttcagctaaccacgcaaccctgctttttcatcttcattaaacatcagcctttcacaggataacacttgagctgtctattgcaaccaagttataatcctgcctactggagctttcaagaatgataccacttatgtttgggaatgatcctctgtggatgaaagtaggcaaaacaacatacccttcattttcacactgaagaaggtcaacaacaggctgtataaggtatggataaagccaaaggacactgtaatattctacaaaacaattatctgcaaactgatgagaagtatcacattaaatcttcagtatcaactgtcattaaatttaacatggaaataggtaaaatgagacagtttagaaataaaattgactttttttwaaaaaaagaaactatggactggaaagtgtatatactttagatgatgttcagagtgtaatagattctaatgatctatgtttgtcaagtcacttaacgattttgtttttgtcccaagtgaaatagtcacaaatccccaaatgaattactgaatgtgaacaaatttcttttttgcctgttatcattcgcttcctcttctcagttcttcctgcacaccagcatgttactaaatcaggcacagtgataagcaagaagcttgccctccattggtttctatcttaaataattacaatcattatcatctagagccatacagctggttcttgtggagaaatgtttatgatgctatcttcaaattaataacactacagaaggagaagggtagaataatgtcagaggcattaatcagtaacactccaataagtggtttatagcattatagtcacctgacttgcatttatgagatgcgggatattcttttaactgctctgtttgaggtttttgatgaacataagattaattagaagagattttactgctggttcaaagtatgttgttcctcatcatgaatgtaatcattgatgactgaaataactcattttgtagcaaaatcatatcattttgtagcatgatatgatacaccatatcatatggtgtaatgatttaaaaaagcattattttatcattacaccatatgccactgtagttgaggcttcgtcagattccaaagatacgtcatttatcacagaacttcaccctgaggtaaactgtgagttgagattctatcaacaataaacgtgatgacttcatcgtttcatttaaagagaagtaagctctgtgactgtatattgctagcttcctgtactttatgcttctgtaggcacagaaagtattttaaaacgtagaatggggcttttcacacaaargagtaacacaaaggaatagatctgaaaggaytgtcatctgcgatcacttcctaccatcagttttaagtcaaatggaaaaagagttctcataaaaatgtcactaggtactctcaatggcactgaattagctatttgggtacggaaacggatgtattaaagtataaaaattgaaacccaccaaacgtgtatcaagtaggggaaaatctgcctgcgcccctagtgcccaaaacacttaaccctgaagtaccaggtgtccccaaccgcgggcaaacccaatcttggttcactttggcgtctcggaactgacagggctccgtcagatcttccgtttccctcctgcgcgtccgtgatattgattgacagcctctcccctcccaccctccctggcggcccagccaggcaggctgttttgtcagctgctccgcccaggccggacgaggccgcagcctgccagccggctccggcctccacaccgcgggagcacgccccgcctcggcctcgccgccgctcgggctgacactctgcctccgggcccggggagacctttccatctgcaaataacactggagaattcagactaatcggttcagcttccctgaggcaaaggggraaaaaaaatgtttcttcaaaggaaaaggattaagagggaaagtgagcaaaggcttgcctggtctccacttagggaatctgaaagagcacaatcaattgaacaaatgcttcacctaatcatggggaaagcagggttggagaggagctctgttttgtggggttttgctcttgtaaggtcacttatggaatcagctaatggaaacaagttctaaagacttagacggtggagaacattttcttcactccacattgtattaggttggtgcaaaagtaattgctgtttttgcattactttttaaaaaatggcaaaaactgcaattacttttgcactaacctgtcttgtaattttttgtttttctcaaaagggtactttactagccacagttcttcatcctgcacgcgcacacacacacacacacacacacacacmrcatcttattgtttattctgctattgaagcagttacataacaggttacctgcaaaatgggagctggaaaaacatacatagttttaataaagatcaagcgacattagagtctatcatggaagagctcgatatatccaaactgggaaactatgaatcaaaatttcattagagaaatattagtgactattctgacttttttttgtttttccctttttgatattagccagctcttcctaaaagtctctaggctgtttcatctggagttcccaagccctctttctcattcatgatatctacttggaaattaggtgtctcagtacagctgcttgctaattgtaatttaatttgaatctcacttaagaaagcattttctttggagggggagaaatcttcaaggaaaaaaatactttcaggtcttgatttgtataactaacccttgcacttggtaggtcattagatctcactagtttgtaatgcaatcagagtcagcattctgctcttaagggctactcggtaatttgcttgttaatatattagcacacagcattgatcaaatggctaatccaatcacacgcttgtaatcgatctcttattgattacctagtctggtgatcacttttgttgggttcagtcaatagtaaatgccaagtagcctttcacacacctaattagcttatgaaataaaccaaacattttgcttggccctgaaggcaaagatcaatggaaagctttggggctgaattcagatgattttttcatcaacttttcttcctctcttctgcagccactcaagttcacattaacactctccctctggtttgaagacatctgaaaagcagctgccatggtggagacgctgaagcagctgtaagccataaatcacaagggtgagggattctgggttgcacattggcatgtggtctgtcaggccagaaaaatagagacataaaagagccaaaggtcagaggtatgtagagtttagaagcctgaacttgtgctatattttatgcaaggaaaccttggcattggtgggtctttccaaatacactttaactttaccgtgctgacatggtacttgattagatctttacttctctgaatgagctgactgtagcttcctgctactcatcttgctactgttaatttgatcgtgtatcttcttgccttcatccagaggaccagtccctccaagggtaattgggttaaataacaactttccagttgcatccaagattgttaaagtttgaaatgaaagcagtattggagatggtttggctgatgcttatcacatgactttaaggaagaacctactcttatggacccaaccccattcctcactttccctatagaatagacctcatcatagaaacatttgcctagggcctgagtaatcacagacctgcctggtgattcaaagcaggaaagtgagtaggatagctttcctggaaattactgacagctacacagttaatttcccggagcaatatatggtaatgactctyaatgatgggatgttccaagttccaaaacacaacaccaggctggtggagtgtaaccaagtctctgttggcaaagaaaagtgtagaactgaagcatgatctaaaatcaatcccagaattttcctgtctgaattgccatttttagaacaaagaattcaccaaatgactttcaatttctttttaaagaaaagcaaatttccggaaaccatagttggcttatatgattatgtcaaattttcctgaggatttaaaacaatagctttatggtcaaaaatataagcaatccatcaatcaatcaaacaagtaaatccacatacttggcagggcagacgaagcattatttgtcagggcaaatgaacacaagtaacctttccttaggacttatctagacaatttcaccaaatttcatcttgctttgaagataagatctattaatacaataaaaagcaaagtgattatttaagtttagctgtttatcaattttttaaaaaaaaaaattcctttttcaaaaccagctttatagagtagtttattttggttatttagcatttttggtggtcttcatgttaaacacacacacacacacaaactgtacataccattgtacagattacttcacatttaaaagtacttatgatcattttcatgtgtgtgtggaatcaaattatttatttgaaaattaaacttagatacagagaaaagataagcttaccagaagtggcatgacttagcagagttgaaataaaacagatttctatttctaaaagagatcgtggaattaggactatcctttttccaaccagattgtgaaaactgatctgaagcaaaatagaaattggtgatttagctggtggggctcctgcattgcttttctgggctgcttctcctcacaagtttttacctccagaccttgactgttctgtataaggaaccaggtgaatagacagaattgcttaagcactagagccaggctacctgggttgaaatccccactctgtcatttactgactgtgaccttggagttttttaacctctctttgcctcaattttgccacgtgtaaaagaggaataattgcagaatctacctcatgaggtttttataagaatcagacaagtcattagatgtaaaaaaaacttttaaacgatacctggaactctgtaarcactccggaaacactgtctattctggccattactctctgcctaaaaatkatctgaaatttcttcaactccttgtgttactcacctcaggacctcctcgaggtccagcagggttttaaatattctgatagtttatttcagaaacttcattttaagcagcaggccacagaagaaagaaatcttaatacttttgcagcaggtaacagttcaatgtgttattctttccagggttgtttacatttaaaaagaagctgctgagaggcaataatgaaatccccgtacattctcagacttaacagttatgatytgaagtattcaaactctggtctcaaacactgactattctcagggctcaaatttgacatcagtacactggggggctggtgtcagagagctactggagaacttagcacctgataattctccttcaccttaattctgcagtgccacgaaagatggccaactatgggaaacactgttgggagttaagagaaagtgagcgatgtaagaaagggatggcttttcactcctccaaaaggaatctgtgggaaggattgctgtactttggcccagactggggcgaccaggtgaagacaaccttgtgagcttgccattcagctattactcattaaaggagtcataggttattccacactgaaaccaataagtacataagcaagtcaaaatagaattattagacttgttagcaatttattttagtcaatgtaactaaagggtataaattacataatttccttctgtggggatctgtaaaaataggacagagctctactttcgggagcattgcatagctaggacacacttgaatgatcaatttctagaatttttttttctcctatgctgtaattccatgattccatcatttcaaggttttgttttaccatttttttcattcagtgcactggtgaattcaagttaggaaaaaaaaagcatgctatcttttacaactatttacatttcatcatccagcaccagcaataagtgaatttataagggttttccatcttgtaaaataatcacagcctacttaccactggaaataattgttgatcctttggtaaattacatattatttcccccacatgtaaatagcatttccataggctacaagcttctaatgtgtacaaatgaactgcgagttatgtgtaaaaatatcaacaagatttagtgaacctatcagagctagcaggattgtgaaaatctgtttttcttatctgtagaatccagtaggttatgggttctcaactgttattttaaacataaaataaatatacagaatgtttgttttttccaagttgaagtaagatttttttaaaatataactactgaaaatgtttaattaatttggttagatacaaattagagcaatcacttaagtatactcaaatctatagagacacttgaaaagggtgtacatttaaaaaacaataaatatttggaatcacaatgccaaaaatgactatattttgtataaatattccttatgaaatgacataattggcagatgttaagtgaatatattcagcctatttaaggctatattgaatgaagtatatactatattgaataaagtaatgattagacaaatgtatgaaataaacagataccagttgtccaatgttaattccaatcattttgaaaaatcaaaaatatgaatatttttctcttccataaatataaatgaaaataaattatgagatttatgtgtatattaacaattataaagtacttcaatatctagttttattttgggttttttgaggagccgatttgtttttgttccattttttaatgagttagttttggaggttaaaggatgaaagcccattttaaactattaattaaagtgcagaaataaacagtaaaatatttttaaaattaagtgtaaagcatatgtattcattttagtgaaaccatagttgtgagcaatctgccattgtgtatccagttgaagtgaatgcttttaaagcaataaaaactggcttttaaatggacagaacaaaaccttgatgtttagatgaaccacctctttgcagacttcttctactcaatgaaattcaaatatactttctaaatgaactcattgcaaaggatggttcatgaattataactttgttttgtgcattatttaaatataatatgctaacaaggagctaaccggtaaattccaggttcctgctgtgatactatatttcaaatatactttcaattcctaagaaagaaatgaagacattttctgaaatcaggctgcaaacatgcttttattcatctatagtttttgcttttagagagtatacattttaaccaaaaagagagtgacacataacatcaggtttgccaaaactaaagttcataaaagtgacacacgatctggtggcactctctggaaaagcgatttggcaatgaggtcagagtgcttattgtaggagccttggaagttgacctttgttcttcgaccttccactgtgaagaggatggccaaagagagagacctaataactaacaaataaggcttttcctattttcccctgtcctgccaatttaggagaagaaagagagggaaggaggaaaggagggaaaaacaggcagacagtctaattaggtacaaacctccatcatcagtcacttcatggtagaaagccattaaagcaaccatgtaggttattaaggaatttttcaaatctcagatgggaatttgaaattcatattcttgagtcagtaaactagcctgtcttatgtttacagatgcattcatcaaacctaactgaagttatgtttactattcatgaaataactattacatttgctaaatcacacaaaacattttatgcacccccatccagagctactcagctacggcagtttttcctgtgctacatttaaactctctttacaaaaggaagagggaattggcaaggaaataatttgattgtgtggtatttacccaaaggaaagcaatttttaaagtatgtattgagatccgtaaacactgaaagttaaggtaggagtactaatgaaagctaatacttattcagcactcgtggggtgccaggcattgtgctacgatgtttgcatgaattcactcactcacctctcccaacatttctttgaggtagttaacgtttttttatttttttattttttttattttttatggatgatgaaattgagacttagaaaagataaagagcttgccccagatcaagtagtacctaaagaagctagaatttgagactaaataagaaaggactcaaaggcaggcaggcagtagtgagcccatgggccaccaatttgcacagcccttttcaggaactacatttagataatgaatccagaccacctcagccatcaacaattgcattccattccatatactatgtttgcaaattactttttgaaaaagattgttccaagactgaaccaaaaggaattttgcattagatctgaattaaccagactattgacttcatcagaaagcccacttcctcatacattcctcttcaacaagactttgctgcttcataactcaatagagcagtcacaaatcacaatagattcacaaaagaactcaacagaacaattacaaattgggaaaaatactcctatgtaattggaatactttaaaagttgttagtgtaaagtttcagcagataaagtataattgccttagctaaaatttaactgccacatagcctgcccttacataaaacagggcaaaatgcttggtaaatacagcactgataaatatgggtgcaagaaaatatcaccggcatcccccacaccatgctgggacatcagttctatgacagttttagagcaaaggggtcattggggctgcccctaccttctgtcatgtagaagtcattacttatgaaatcaggtgcagttgaaaccaggacataaacagtttgccctttctgagacgaaaggtcaaagatagctacacatttggaagataggagcaatagaaggatcacacaattacaattttttgcatttttaatcttttatatttaatatttaaaaacaatttttacatctttcaccgcaggaatttccagtttgtaaattggaaagcgctggaaagctgagccccactcagtaacaagacaactccaatcaaagcaagtgtttgcaggcatcaaagtcaagcttggctgggacagccaagggcagcccagaggtccttctcatagtactaccttctcatagtactaccctgtcttgagcaaagccccttctgggaccatcagcaggatttggctgactaacagagggcaaatttcatgctggtttgagcctaatgcctctttgtttttactgcatttttacttacaaagggacttgtgcaaaacaaaacatagaataagatttcaaagttttagggggcaatgtgggtttggctacaaattttcagaggaacataaaaccaaaaacacaagctgtggccttattctgagtaatttcagaagaaaataagcccttttggaaatgtatgcacatacatttctgatgtaggttggaatgtgctggttgcaatgctggagatgtggatttacaatatgcattggaattaggcaaacctgagttcatgtcacacttctgctatttattatttatgtagcctgagagaagtcccttaatttcttgattctttaatttcccgcaccttacaatgagcataatgagagtgcttaccccatagaagagggattattaaatgagacaaattacagaaggcactttcagcaatgcctaccatgtattaagtgttcagtaaatgccaagttgttgttgtaagtcttataagatctaccacttggttgaacttcactaagattccgaagagttctctctctctttctttcctgcctcccaccgcctgcattggagctgccttctttgccaccatgtttggaatttggtaacaccaattccaaaatgttttacaaaaggatgcacaagtgattctgggaagctaaaatgacaatcccatcagaattggcatgttccctgagaaaatgcaaacactaaaagataagagatttgaggaaatcatacaatggaatttgaattcttagtggatctagccattccaaatattttcataggatatgttcaaagtgacttggaaaaagagtaaaaacaaagttaagaaagctaaaggaattgataatatgtgccattcagagaaaatcttttttgctttggaacattttaaatgatcacatgaaaagatttttggatcttacattaaattattgcttactaatttgcaagataaaagagaattgggatggaaatataattttctattgagtgaaaatgaatacaaattaaagtgttacattcttaggttagaaaatgtgcttgacttcaaaaagagttttgggattcactcatattcccatatatatttaatgaaatgtaacatgctactgaaacattgctttctgccaatactttatgccagagtctaagaaacgctgaggattaatagcagagaaaaatgctcctctgtttggctgaataaacattacacaaacactaaactctgtgtgggatcattagttttttcatcacactatttctagaattgaaaaatcacaaatccttctccagcttagttcttttttgcaacaaaagcattacycagaccagctaaaatgtattctttaggattctgacatctccggaatgtcaaacaggttcagtggacaccaagtacagattctctctttcatgtggaaaggttaagtaagaaaagacttcatgtgaggaaactgccccatcattcacagttattttaatttaatctgagtgtgcttcaatttacatataaactggaatgttgtctcagaaaaaaaaatctatttcaaggaaatcaacctttggagtaaataaaactgacaatttaaaaaagtgatgaacattttaagactatatatgcatttgagagaagccagcataaccataatgtaagattagccttattttaatatgaactatccataaaaacattatgcatatattctttgactcaaacaattggttttatagccttctgaaattttgaaagacttatggtctttaatatgctatagctgttaaccagataagcatatttttctggaagatattcctttcatagaatataaattaaccacagacatgacaaaatggccaaagctggcaggaagaggagagagctggatgatattaagaaattaaatgaataaaatatggtaaacttttgtcaacaaatatttaaccatggaattgtttttattgtaaccttaaaagaagagaatatgattgacaagtaatatttgcatatttgctccttgttaattataattatttattcttaatctgattgacttataagaataaacataatactatggttttcctgcacctcctcaataaatgattgtagtaactttgcttaaaagtttaacttgactctaattctttcagtccccttaggaagttatataacaagtatatttaatttaaactttagtgcactaaagtttttaaagtaaattttaaacttatgctgattaaccttaatgcg

SEQ ID NO: 93598 - DNA, 166879 bp, Homo sapiens
gggcagtatggccattttcacgatattgattcttcctacccatgagcatggaatgttcttccatttgtttgtatcatcttttatttcactgagcagttgtttgtagttctccttgaagaggtccttcacatcccttgtaagttggattcctaggtattttattctctttgaagcaattgtgaatgggagttcactcatgatttggctctctgtttgtctgttattggtgtataagaatgcttgtgatttttgtacattgattttgtatcctgagactttgctgaagttgcttattagcttaaggagattttgggctgagacaatggggttttctaaagaaactaccatcacagtgaacaggcaacctacaaaatgggagaaaatttttgcaacctactcatctgacaaagggctaatatccagaatctacaatgaactcaaataaatttacaagaaaaaaacaaacaaccccatcaaaaagtgggcgaaggacatgaacagacacttctcaaaagaagacatttatgcagccaaaaaacacatgaaaaatgcgcaccatcaccggccatcagagaaatgcaaatcaaaaccacaatgagataccatctcacaccagttagaatggcgatcattaaaaagtcaggaaacaacaggcgctggagaggatgtggagaaataggaatgcttttacactgttggtgggactgtaaactagttcaaccattgtggaagtcagtgtggccattcctcagggatctagaactagaaataccatttgacccagccatcccattactgggtatacacccaaaggactataaatcatgctgctataaagacacatgcacacatatgtttactgcggctttattcacaacagcaaagacttggaaccaacccaaatgtccaacaatgatacactggattaagaaaatgtggcacatatacaccatggaatactatgcagccataaaaaatgatgagttcatgtcctttgtagggacatggatgaaattggaaatcatcattctcagtaaactatcgcaagaacaaaaaaccaaacgccgcatattctcactcataggtgggaattgaacaatgagaacacaaggacacaggaaggggaacatcacactctggggactgttgtggggtgggaggaggggggagggatagcattaggagatatacctaacgctaaatgacgagtaaatgggtgcagcacaccagcatggcacatgtatagatatgtaactaacctgcacattgtgcacatgtaccctaacacttaaagtataattaaaaaaaaaaaaaagcaacagcaagtcccccacgagaggggcgggtgcagcctcccatgtggacggcagagagaggagaggggcctctcacccttgagcgcctgcttcccactgccccaaatagcagctatatggtgccttggtgtgccagggaccctgtgcaccctccatctcatctccaccgcacctcaactgtctcagcaggtgaggaggtatttgtttttttttttctttttttgtttttttgagatggagttttgctcctgttaccgaggctagagtgcaatggtgcaatcttggctcaccacaacctccgcctcctgggttcaggcaattatcctgcctcagcctcccgagtagctgggattacaggcatgcacctccaaggccggctaattttgtatttttagtagagatggagtttctccatgttggtcaggcaggtctcgaactcccaacctcaggtgatctgcccgccttggcctcctaaagtgctgggattacaggcgtgagccaccacgcctggccgaggtatttgttttcaaaacagctaagaaaaagcagtaggtttgggacttgaacctagctctgtctggatccctccacaccaccagaccacattctgccttctgtccaccaggaactggctggaatcctgccttcctgggactactcccccaggcctctgccccccaaccccgggactcccacccctgggggatcagttattatgattttgtgctattctgacttggattctctgcttatcttttcaatgtgtgtcctgtttgtgtttttctccccaatgctgttctgcatcgcttgaaggcaaagtccaaacctgatgctatcttttaatctatttaagcctagaaagggacaatcaatatcaaattgcaacaattccatttctttttttttttttttttttttttgtgagacgaagtttcattcttgttgcccaggctggagtgcgatcttggctcactgcaacctccgcctcccgggttcaagcaattctgcctcagcctcccaagtagctgggattacaggtgcccccccaccatgcccagccatttatttgtacttttagtagagatagggtttcaccttattggccaggctggtctcgaactcctgacctcaagtgatccactcaccttagcctcccaaagtgctaggattacaggcgtgagccgccgcatccagccaacaattccaattccatttctttctctttcttttcttttcttttttttttttttagacagtatctcactgttgcccagactggagtgcagtggtttgatcatagctcactgcagcctcaacctcctgagctccagtgatcctattgccttggtctcccaggcagctgggactacaggtgcatgccaccacgcccagttcattttttaacattttgttgtagagatgagggtctcactgttgcccaggctggtctcaaactcctgggctctagagatccttccacctcggcctcctaaagtgccgggattacaggcatgagccatcatgcccagtcctttgattgttttttaatgtggtatctgagactggagagggtgaggtttgtggaaagagcaggaagccttaggtgtgcaccggagtgaagccccttcgtggctgggtggcttgtcctcctttgtgccttatttcttcatctgtgaaatgaggacaatttttccttccaggattgtaggaagtgctatccatgggaggcatggcagagcggcctggtatccctaaggcactcacttgttgaaggtgatccccagctaagtgagtgcaggcaggagccacgcttccctccttgctattcccccatcagtgtctgagctcagggttctttgagtcagactgaagggagaagaaatcgaaaggaaagaaaaaacaggtatcagtgaataccagaattgatcaaaatgatacaggtgagaacaatgagacagaaaaagggactgcagagccggtatattttgagggtggaacatggtgagacaggaagactagggtctttggagagtgaggacatgggttccaggcccagacttgccatgtccgggttatttacttctgagtccttgcgactgagttcccttgctttcctctgtaaaatggaaacctgtcagggaatggctcaagctcctgtgcccacttctgtgtaaaccactcaccaatggacccctggggggctgcatggtgtctccactgccccaaggcaggccctaagacctctaggtggctggacaccttgtcccgtttgaagagtggcctggagccacctcaggctggggcccacccttttcagtggcctgaaggcctctaggactcagagcacctgacacagctcatcactcattcagttttacaaacctacttcttcttgcagagcactgtttctgtgactaagacaccatctttgccccgaaggagctcacagacccttggtgagacggacacccagagcattcagatacagggtgtggcctgccctgtgccactgatacacttcttgccattcctgtgcaaactgacttcttgaatacttccatttatggcttccagggtgtgctattttaactccttgaatatatggggatctctttatgtttggccaaggggattagcacagtctcaatgcccttgggattctcaagagccatttgatgcataagtaaaaacatgaactaattcgggggcagtggaggcggggaagatggggcaggatgtgttatgtgttctctcacagagcccagaagtgatatgggagccgaggagtgggctaggagggcttcctggagtaggtgacatttgaactgggttctggaggatgagttagaatttgccaggcatgtcttctcagcacagggaccagcatttgaaaaaaaaaaaaaaaaagcctgaatgatgtgaactgcctactggccaagtgggtgtaggatgatgatggtgaagtgagccatgtaaagtagaagagacagattcaagagcggtatcacggcccaagattttgagcagtacaggtaaacagagaaaagcagaacgatcactcaatcttgacactcaaggacagtcaccatatgtacatacacctatgtttttaagagaattcatacgtgttcttttttaaagaaagactatgtagtgttttctttttctatgtcagggattttgttttgttttgttttgtttttgagacggagtttcactcttgtcgcccaggatggagtgcaatggcgagatcccggcttactggcctccccagttcaagtgattctcgcatctcagcctcccgagtagctgggattacaggcgcacgccgccacgcccagctaatttttgtatttttggtagagatggggtttcaccatgttggccaggctggtcttgaactcctgacctcaggtgatctgccaccgcgcctggccagggagttgttttaaacagattttctccctctcttttcgggatgttaactctggtgctgcgtggggagcaacgtggagagcaaagaacacttaagtgagtagctgccaccatagccaccgggacagtgcgggaggagcagtctcccaggtaaagaccgtgggtagaggggcgcgtggcgggtgagagggaggagtccgcgctgactcacgggtttctggcttaggaaacagtggagctgctgatacctttatgaggaagccgggcaagtttggaggggcagataactaactgggatgggaacacctcgggtattcgtagaagtgtcccgcgggctgtggtctcgcgtgggggactccccaggcccgcacccctgtctggggcacctgcgaggcgccaggcaagttgcctggggcggggagtgcggcctgagcgtccaggcttaagccccgatgcgcgggcccttctccgcccaggccggccctcgccaccccgctctcacaggtgagggtgtctgccctgccgccttgggatgcgaacaggcgtgaggccccctcactccctagtgtcacgaggtagggcgggacccgaatcccggccctgccacttcctgcctcgaccactttggagcagttgctcgccccccgcctcagtttccccatccgcccacctcgtcggcaggacccaagggcggtctgtaacctgcagaggccattccacttccctggccggcggcgaaggctagtggcgcggcctgggctggggtcgccccgaccgttcccgaccgacgccacctaggagggtctggggaaggggacgcgaggagctgggaacacgcagcgccgccccagcgggacgggcgggcccgggctggcgtcgaatccgcgcccgagagcccagcccgcggccaggccgccgctcccggagcccgctggggcccggagccccggccctctacgcctggtcgccatcagaacaaaagctgtggctcagcccggagcccaggcgccccgcaggcctggcccgcgccgggccgccagcttccctacgcttggcggccgcgccttcagcccttcggcccgagcacgctcggctctttccgccacggccggcgcaggtggagggggcggggcgggggccgtgcgtggtgacgccgcgggggggtgacgcaccggcgtgccccgcccccaccccctccccgttcaggctctggaaagagaagaaaaaaaactttcttttttttttaattgaggaatcaacagccgccatcttgtcgcggacccgaccggggcttcgagcgcgatctactcggccccgccggtcccgggccccacaaccgcccgcgcaccccgctccgcccggccggcccgctccgcccggccctcggcgcccgccccggcggccccgctcgcctctcggctcggcctcccggagcccggcggcggcggcggcggcagcggcggcggcggcggcggaacggggggtgggggggccgcggcggcggcggcgaccccgctcggcgcattgtttttcctcacggcggcggcggcggcgggccgcgggccgggagcggagcccggagccccctcgtcgtcgggccgcgagcgaattcattaagtggggcgcggggggggagcgaggcggcggcggcggcggcaccatgttctcggggactgcctgagccgcccggccgggcgccgtcgctgccagccgggcccgggggggcggccgggccgccggggcgcccccaccgcggagtgtcgcgctcgggaggcgggcaggggatgagggggccgcggccggcggcggcggcggcggccgggggcgggcggtgagcgctgcggggcgctgttgctgtggctgagatttggccgccgcctcccccacccggcctgcgccctccctctccctcggcgcccgcccgcccgctcgcggcccgcgctcgctcctctccctcgcagccggcagggcccccgacccccgtccgggccctcgccggcccggccgcccgtgcccggggctgttttcgcgagcaggtgaaaatggctgagaacttgctggacggaccgcccaaccccaaaagagccaaactcagctcgcccggtttctcggcgaatgacagcacaggtgaggagggggtccggggcggcgggggcccggggcgcgctgtcacccccacctgaaagagagcgtccgggggtcgtggtcgcggataccgatcgagccgggagctcggagcaggccccgcagcccgttcccctcgccccgcgcgggagggtggaagttcgtcgcaggactgtcactgggcccgagttggtcagcacacgcccggtgcactcggcctccccgcacccgatcagccctcctcgcggggaccctagtggcactccaggagggaagaagtaaagtgcagcgtgtgggtttgtttggtaatgtcctacgcatccatccgcggccgtgtccacacgcgtggccgtccagaggaatgacagcggagggtacctttgatgcttagagaaagcaagatcgcggccaaaggtagggcagtgtgttttctggattggcgacacattgaccaggctgcattcagaggacactcacagcagccgccagcttgcgagttagaaccgaagtttcttggaatgagtgagttccttggaaagatgcttagtgcttattttcaaaactccttgttttgtgtgtgtgtgtgtgtgcgcgcgtgtgtgtttttagtcaactagtcattccatttttcaaaacccaaacttcgttagcaagatgtcatgaaagttgctgtggtgtgtttcatttccatgtataacttcaaaagaaagttaaacagcagrtttaagttcatttgggctgcaatctccatttgagtttgtgttgctttcacagtgtagatgtacaaagaattatgttaaggaatgtaggaattccaatttttcaaaaaaatggagcaggatactgaataaatcwtctttttgtttgtttcctttcattaaacggcttccctggaaactttcttaagttatcatagctgcttaagagaagtatttagttttctattaattcagtaattctgggtcccactgcgctggttcatggtaacatgaactagttgtatttcctcttttagagctctctcctttgccgcaaaaacttgtgtgccgctgcgaacaattccatctccagcgcagcttgcatttctccagtagtcttgcagtggtagcatctgaaaatcagtttctaatgaatgagtccaaattgaattacatcgctgccttcagatttgcactagacacagctgttcaacttgtggaaatagttctgtgaccgaccactagcatattaaaaaaaactgctattgctgttgaaacaaaacctgaattttgtggcttaagtttgaatacaattcctggaatcaagttatgataagcgacgtttaatattaatgtagaagtgaaaagcgatttttaaagatcaatcataaggagattcttatctagttaaaatttgttaaacagtggggaggagtaaatgatgctcatggtatataaaaatcactaatgcttttctttttagctgataaaagttgagtttgacgttaatcttataaaatgaacttattgaagtgagaaatttggaaacagtagtttaaatgccgttgtactgcaaaacagatctccgttgcttcattaatcttgctgtgtttgagtagtcttcagttctgtgagacrtaggtcatacgtggcgagttcagctttgaagcttgtcttctgaaactggtaacctggatggctttgtagctttgctgttgttgaatgaatttgttgtagattttgtcttaaaaagggggacaattagtaacacaagacttaacaaaaaggcatgtccttatatgtacatccagctgtttccaagatggagcccaaaggttagctttttccatagtagtgtccattattggatgatcagatgcttaataagttgatcagaaaggattttccacacttaaccaccttttcccccttcctttacaattttgatccttgtaaggcacaggggctctttcgtgggaccaaaagtcagctttaaatggctccgatttaatccaaagtagaaagtcaacatcatacttaagttgggtcatgtgttacacattcatcaccatcacactattgtgaaagggtctgttagtatgggggaccaaggaagggctcattatcaagcacattaaacaaggggctgctgggcgccatggctcatgcctgtaatcccagcactttgggaggcggaggctggtggatcaacttcaggtcaggagttcaagaccagcctggccaacatggggaaaccccatctgtactcaaaatacaaaaacatagccaggcatggtgacatgcacctgtaattccagctacttgagaggctgaggcatgacaattgcttgaactcgggaggcagaggttgcagtgagccaagatcgcgccactgcactccagcctgggtaatggagtgagacgctgtctccaaaagaaacgagggacactttgtctgttgtaactgctccactaagaaattgagtaatgagatggacagagatcttagggatgtattttaaacaaataaatggcttgagtttttacattaaatacattcaaaaactgaaggcatttggttaggtgggacagacctgagaataacattcttgaggaactcaatcttattttagtgacgggatgtgtctctgaggctcccaggggaaaattgggcctagtggagcagggtgtgtgcccggtgcatgtgatcaaatttgagggaggggacctctgtctaggagctgaggggttgaaaggaggaggagcccttggcagcctgagaaacaggakctacttggactgcagtgcatgtctgtagagactggcctgtggggccaccagtgtcacttagatgtgtctgtgaagggtggcagtgagctgagagaaaaatgcacccgacattggggagctgctcagccagggtgctgctcatctgggggcatggatgttgcaaacagcactcccgaaggtcatgcagcacctcagagtgatgaatgtcactgccactgatgacaaacaagttgccgaagcctgggaagcttatgcagagatgatgcagaaatacggaatgtgctgcgaatgagggtagcaagagagaaacggtacctttcaccccactgaagcagcagccctggagaggcacagaatttgatggcctcagatgttaaagtagcattttcttgtattatgtagaagcctttacactttctcatacatgaggtcttcctttacttggcacccttacaataagtggggactttatattaccggtatatagttagttgggtgttttggaaacttctttatttaatatgtccaagttaaaatagcatattgtgtctttcaacatcagagattcatgatttaacagtataagacaaatatccaggcaagcagtagacttttgttttttgttttctgggttgtttttttttttttttttttttttttttggtcagctttattgcaaaatttgcacacaacagactgtttataaagttttttgaaattgcaggccagggtggtggctcatgcctataatcccagtgcttagggagactgagacaggaggattgcttgaggccagcagttggagaccagcctggacaacatagtgagaccccatctaaacaaaaaatttttttaattagttgggtgtaatagtacaatcctgtaatcccagctattcaggaggctgtggcaggaggatcgcttgagcccaggaggtcgaggctgcagtgagctgtgatcatgccactgcactctggcctgggtgacagagtgagaccctgtctctgggggaaaaaggaaaagaaaaactacattctgaagattgaacatagctgtgtttcatcctgtgctgtataagtggctctaagcagttgtgattacattttatgacgtgaatccttttaaatgcaatagggaagcttatttaaagaaagctggtggcgaatatggttgtcaaccaaatggtctgttatgtatgtctggtactttatgtatcagagtgcttttctccacgtcacctcagtttgatccttacagcgtcctgtgaggaagggaagatgctgttactgctattttctaggtgaggaactggacttgagaggtgatacagggtcaaaaccagatccaaactagattgttaaagtccgtagctctatatatttattttctaagtctctatctgtaaacaatgcatttacttgaatcgacccaggaacctgccaagcttagtgagtttcagtagsggccttcccgcacatgaatgagatcactaagggggaggtttgtaaccacctgtggtgggggcagccaggagtgtattcttcctcctgggttagggcgtcccccttttccctctggttctggtgttatcctcagcgtgacgtgtgtgggctcgtgttcctgtttacctcagggagaatgagaaacggttatgttaccccatcagtgagttctggctaagtaggaataaaagttgtcatagagacttttaggactaggacatttcatgaccgtgcttcgtttttgaataactgagaggggtgagagcggtggccccattcaaaggtcgtcagggatgaaggtaggcaaggacaagtcatgtgcagggcgccttagagggccttcagaagatggaaagtcgctcctggctgaacattcagatytgattctgtaaacagaattgaacataacttacaaagagactgagtcctgcagttggaagttgatgcttagattagtcgcctgtgttttcacagcttctaagtagtgtgttgtaattgtgtggcaaagtatgtgattacctggggggtccataattgctgacttgtgtttttacttgatgtatttgaaaacagttaggaaaatgattttgccaaagtgtgtcttaccttagttaagatgaaatrtaccttattgtgagtttctgaagattgcaaaagcttgtcagtttagtttttggggtcccattagtgagggcacccctctttaccttactcaaaccagctcttcacatgtattccaagaaactagagggcatgctaagaggtatttctcaacaaatggtttgtgctcagatgctgttgcttgtagctgaggaatttgactgcagactttcccagagccttggtgtcctgattgggcactgtgagagaggggctacagttggaccactctcaatcctgtttgacgctagaactctttttagcctattatgggtccgcagacttcctctgcaaagggccagagagcacgcatttggctttctgagccatatggtctcttgttgcaactactcaaggctgccatttcagcaagaaagtagccataggcgagtgggcctggctgtgttccagtaaaactctagttgtaaagactggcatctgaggacttcgcccatgggctgcaatttggtgactgatataacgtgggacttcattctctgagcacccgttggggagcactggcctaccacggctgcacagacagctttaaggaaaacagcagcagggcaagttttctgagctgcatgatgtggagcccgggagagcccaggtgagcagcaggctagcttgggtctcctgtcttggagcacttcagagcttagcagggccctctctctctgtcttttttgttcctctgtaacagttatatggatgacttgatttaaaatcagacgaatttatcagaaagcctggtgaccggttgcatttttctttgttcttttgctttttgttgaccccagtggcccacatggcatttctcgtccgtctttgtcatctcaggctctaggcttgctccccttcctgtgacaccagaaggtgagcgtcagtaagaactccagagcctttccacggccctcttcccagcacttccctccccaggggcagtgcctgacacatagtaggccctcaggaaatatttgagggaattagtgaaagaattatatagtatttgtcccttaaagttcttatcattttcttgttaaggttttactttcaagcagattgccacctatcttctaattgggtctgttatttgcttccgagttccgtacccatgggctcccacccggccaccaaaccagctggccttaggagtgctgaggccagagcatgtttggggcaagttacatcagctctctgagctcagagtttcctcatctgtaacatggagataataacaattcccatctcagggtggttatgagggtagcctgagatgatgtgtgtctggcatatccgcccaatgggaactgacactagcgttaaccagggacgttgtcgtaccttgtaagtcctaggacttactgggagtgctagtctgattggagcaagacctgtttctcagcagttctggaaaggacagaagccatgtgtgctcgtatccacagaaaccagtgtgcaggcacgcgtgtgatagtgtagcacctcagcagatacatagccgggaattctgtcatctataccattgactctgtctccattttttattgtatttttaaaaataggaacgtgatggccatgaaagcttaaaattacgaaaacttaaatggtgtgtgttctgaattattttttcttttaaatcaaatcaggatgtacactgaaaattattgataattttgaagcatatttcatggactgtttaagcagcagacaagtatgtgawtctgtttgtttactgtgtataatttatcttgaggtacctgttaagcattagcagtgtacacaggattctgatagatgcctgtgagtacttagaaccatcttgagaagatgaaacctcgaggcaaaacttaaggaaagggtacagaaatgcagtcaagtgcaaaaactctggaaccagaaagggtgmtctgaataaggcttcatttactccctcccctgtttcctgagtgtccccgtgtgcagaagtccagggccgcatgccccagtgggaggcaggccctgggatggttgaggagccttgggctcctgtgacagctcttctgctgagccagcacagagccaggagttggggaagcctgcctgttttccatgcattcctggttgttgggaaaagcaccctgaccatgacagtttgtttcctggggtatcgttgtaggcccatggcttgctcacatctgagtcctcttctggttgtcccgtctctcctaggctctgaagctcctggccgtgccgtctgctttttagcacatgcgctcagcgttccctttagtcctctctgaggtcttttccttgcagtgcatccctccggatacactccttgctttaactggaaaaggatgctgctcttctcagtcaggctcaaacttggctttcggcaaaattctcctattgcatgagtctttgatgcagaagtgtaagccttgggagcagtgcctgtgggggcttttgcctgttctcctttccctggggccgtgctctgctgacaggggtgctacaataggccacgagcagagtccccggggcgtcctggagtggtcaggtctttgccatttgagctgtgacttgaagagatttgagcaagggcacacaaatcaaattgggcaaggctgtgtgaaaggcatggaagtaaacaaaagtggcccctctctttttaaagttttttttattaagttcctagacaatataggcggtgactgtggctgtatttaaaatactgcctttagggtgttttctggttctaaatttaggaagcaaggctatttttgagctctgtctctaaaagttgaattccttttaaaacttacccttaagaaagatttggatattatcccgtgtgacattttccccggtgtttcatttccattaatcaaaagactgtttagttgaaccattgctaagaatagtaaaatctaatggggaaaataattctacatgattaaatctgactttactttcccatttctagttgtactgtctgctattgtttgaaaatgtcttaatttgcctttctaatatgcctgtactatattgtatacagtaggtatattttccagttgcacctaattcaacctttcgaatttgcataatctgtggtaaggagaaaaagtagttgtgtagtggagttgtacaattctgttgtaaagcaaatctttttataattcacaagctgcttctcctccccctagtttggatttttcttattaaaactgcaccacctaaacatgttttaactttatggttaaaataaccagtgaaatagaaaaataagtcactgttctgtatgataacatgtagagaaggcttgtacaacatttaaataaggagatttgggtatttgattacaaactgaatgaggacattcaggagctatagaaatttatcaggtaattagggtttgcttagacaattatagactctacgagtttgacccagttgctttggattaaaatattttgagtatttgtcacctgattaaaagtagaaccttctaactgtgagtcacagttgaaggaaatgtcagctttttatacggggaggcggtcagtgtggtgctgaggagggagccctggctcctgctcagagtagactgtgagtcccagctcccagctcggcagcgctgtgacttgggctggtgacatcacatttgagttttgcagggtggggtgtgtgtgtgtgtgtgtgtgtgtgtgtgwgtgagwgagagagagagagagagagatctctaaaaggggctttttaccctgcagtattccatttgtttcttttctttctcttctctcttctttctttcttttttctttctttctttctcttttccttccttccttccttctttttttctctttctttcttttccttccttccccttccccttcccctccccttctttacattacttttcttctttccaatggggtcttgcttgcccaagctggtcttgaactcccatccttcagcaatcctgcctcggcctcctgagtagctggaattacaggtgtgagatggagccactgtgcctggctctacttctgcttactttgattatcttggtacatggggctactagggtgcctggcatatagcaggttgaggcagctgtttttattgtttaattgtatgggaaaatattagccatcacctacttcttgggccastgaggactaagatgatgtagcctgacccggaatcaggaggcttctcactgaatacatgggaagcttctgcccctgcctgtttggctttcagtgccagctctagtgcagtttgggaaccagtttgtaagaaaacgaactaagattcgagaatcttacaaaatgggtaatcgtttgactcattttactccgtctgtgtttgcagttcaactgttttttattggaaaattgaactcttaattaaatggaactctgtttctagttattgcttcagaacaagggcttgatttagattaggacttagagaaaagggaaaagtaaatgcagagaaattataaatatagtattttattgaaaacagagttgggaagaaaatggccttgggatcactgtccagtttagtcaggttggttgaaaggaataccagtgaaactcaattgcctctcgggctcagctacacagatcttgaaaggaacagattcagctctgtgctgtactgtgtgacttttctcctcctgcagattctatagtaggaaattcttttaatggagattactgtttttctgttctcctagatttggtgtgattttttttttttataagtaaaagttaccccgtggtggacaaaatttttccccgatttgtggatatctttacttaaatctgatttacatattcagaacgtcacctttattgaaaataacaaaaagacataacatattgataggttttctgtgtcattgtggttgttcctctactactgtgggaatcggtttttgtttgaagagcacacctgcccgtagttgaacttctgttgagaagtctctgagggaatcatttgaatgatggcaagagaatcaagtgttttgctttcactgatggctttctcagtcactgaaactttaggggagaacggattctttcccaggaggaagagggtgaattgagatgtttccttgtttggggatgcctgtgttctcgggatgccctccaagccagcgctgtccagtggtcgttattgggagggcggctctacgctgtgtctatatgacacagtactggaaccacgagccacgtgtggctgttgagtacttgaattgtgattagtgtgacttaggaactaaattttaaatgttacctggtttgagtaaatgaagatagccacatgtagttagtcactacggtattggacagcacaactgtaagtacatttacttatcctctttgtctagagttttctttaagatacgtatcacctagatatttatgacaaagttcctttaaaacgatcatcttttaaagatgcaagactccaaattaaaaatgatgaaagactccttcaaaaatattcacggcttaggtcacactgttcaggattattcactaatttagaaaatatttgttatgctgtgatgtaggccctggcgatccagtggggatgtgacaggccccatctctgccctcatgggtggtgatggatactggacaggtaactgcagtcaggtgtgaccttggaggggacatactgtgcattgactgaggcaccagatggggactgagcctgttttgaagggtattggaagtccccgggggctgtgacgttagcactgacacctgagggtgaataggagatggcagatagtactgttccaggcagagggaacagcactcatagcagggtggaggtctggctcttgtgacagtttttgggttatgttcactgggctaccagaatttaggaggcctcatggttttgcttctgagatggtggagactaaaggtgtggttctgccctgcgggggttggtcggcccgggatccagtcttgactcctaccacttcattcttttattcagcaaatatttaagcacattttacgtgtggggcaccctgctgggctgtggtgatgacagtagtggcagaagctgcttctgtcctcatggaactctgagttgtgtggtgtggtgggtgagcagtcccgtggtgcccaccgtggcctatagcatttcacactcagctcgatgtctgactggaaggaagtggatgcctcaggctgggtggtcagggaggcttgttggaggaaggacaccagagctcattgagggtgagtagagcatcagcttgggcatctgaaggcgagataacatcaccaagggccttgaatgtcagacctaggagtccaggttattatttttttttagggcttataaaacaaaattaagctttaaaaaacccgtgtccagagtgattgggggagctcctgtgatttattttccagaagtctagattagctttttcaaggtgtgttttttcatccaagttcaggtctgtagggagagtagacaatgctttcccctcctgagccccgtttttggcaggaaaagggccccatgaaaagcagcttaagaactggaactagtgttcttatttaagatgttagtaaatttttgtacaaacaattttcttttaaaagtttttttaagttcttgtgagtagataatatattcatatggttcagaattccaaaaaagcagagtaattggtgaaaactcttcctcctgtctgtttctggggtcactggtcattcccctccccataggcaaccagtgttagctgtttcttacgtattctagagatggactgtgcgtagccaggcaaatatggtctcttcttactctttttgccctaagtagcccattttatgtaactctactatcagtgcctttcagactgatacatatctcagagctgttggaaatgttagtattagaaatgcaggctttgttctatttttttaaatttatttttatttattttgagacagggtctcactctgtccgccaggctggtgtgcatttatktgatcacagctcactgcaatgtccaccttctgggctcaagcaatcccacctcagcctcccaagtagctaggatgacaggtgcatgccactatgcctggctaattttttttttttttttttttttagtagagatacggggtcttcctatgttgcctaggctggtcttgagctcctgggctcaagcagtccttcaacctcagcctcccaaagtttagggattacagatgtgagccactatgctcggcccaggctttcttttaattaattaagtcttcttttttaacggtaaaatgttttggtgctgcatttagataaataacacaaaacaattttaatgttttctctatgttayataaataggaataattgaagttttcttgttttttgtttgagacggagtcttgctctgtcacttaagctgaagtgcagtggtgagattatagctcactctagcctcaaactcctgggctcaagccatcctcccacttcagcctccgcagtagcttggactacaggcacgcaccaccatgcccagataattttttattatttttgtagagacagggtcttgctatgttgcctaggcttaaagtttttttaaaattaattccatgtcatctcaaagaatattagaggttttgctactgtcatcaaaatgcatgtcatgcagccagctcacacagaagttgtgtttattgtttctcaattcctggaatagattcttaaaacttctggtttttattacccaccttaatagttgaaatagaaatatctgtaggttagcaacctacttcaacaccaagcagataaagtttcttgatgggtaggacttctaagaacattttcattaactccagaccttttcgttaatttagttaattaatgtagagattgtaaaacactgagtatgactcagaaatcctttagaaaagaaagggtaaaatcagtgaagttccttcagaagagtagctgagttccctggcattgcagatccagttgagggagagtgatgggtacttaggaggggagaaaagactgagaatcaataaacaaaggatggagagcaaaaatgataattagatctcttttaggggtagaaagatatgctaatggtgtatgtaggaaatttctagaagggaatctctagaaattgtttttcggggttgagctagagatgttttgggggctgtttttcattttatattctgagggttttttttcaaacaaagcaaaaaaccataaatgtatttactttcatagtgaaaaaagaaaaactagttaaaaaaattcaaaacaaaacattttgggggtatatatgtttttgtattgttttatttttatatttgtgattaagagaatctgttaaatggtgagaagcaaagttttagttaattcctgttgcaaaacctttagacctctaatgagaattatttgaacaaagtacaaattacccctaagaggcgccatccagagataggaaaatggattgtgttttagtgtggcgtctgatcatcacttgctttgtcacaagctccatttttaacatcatctttatattagaggtttcttcattgatttgctagaagccacaagacatgacagccaactaatttttgagtattttgaaataatgtcagatttccctgtgtgagcgttgggtacaaaatgttacatgtcgattgtcacatccctttagaaaaaaatactttcgaaaagttcttctttaaagtgcccttttcttttctagccttttaagcttatttgtacactaaatatattttgaactaatagtgaacccatttcacattttatcctcaaatcataaggaccctaactggaaactggagcactgggaaccattccaggtgttaccacctggtgctgaagttaatcacctgggccagtatatccccagtgggggtgccttaaaaaaaaatcagtttcttggccgggcgcggtgggctcacgcctgtaatccctgcactttggaaggctgagttgatggatcatgaggtcaggatatcgagaccgtcctggccaacatggtgaaaccccgtctctactaaaatacaaaaattagccgggtgtgatggcgtgcacctgtagtcccagccactcaggaggctgaggcaggagaattgcttgaacccagaaggtggaggttgcagtgagctgaggtcgcgccactacattccagcctgggcgacagatcaagactccatctcaaaaaaaaaaaaaattagttcctttaattacttaaactagtagttcattcacatggctcagaaaactcagaggacaaaacctgtagagagagcctccctccacctagctcctcccaggtaaccactggaagtagtgctgtcttccagggtttatctgtattcaggcagacgctgttgactcttagttctctcttcccccttcctgcctttttcttcttaactgaggtagcatagtgtacacacagctgcatacgtttattgtcttcttacagttgtctaccattccattatgtgacctgtgccataattgctttaatcctctccccactggtggacatttaggttatttccagtcttgtcttctcacaaacagtgctttaatgaatagccttgtaaagttatgcggacaggcaaatctatggaacagattcatagaaatagaattagtggttaaaaggcatatgcatttatagttttgatcatagcaaattttccttcaagagcctgtgtgttggtagagtcttaaaatgtgaaaggcagcacatatattctccaggtatacattgctagatgtgttgcagatattctttttttttttgagacagagtcttgctttgtcgcccaggctggagtgcattggcacgatcttggctcactgcagcctccacctctcagattcaagtgattctggtgcctcagcctcctgggattacaggcatgcactaccatgccccgctaatttttgtatttttagtaaaggaggggttttgccatgttggccaggctggcctcgaacgcctgacctcaggtgacctgcctgccttggcctcccacagtgctgggattacaggtgtgaaccaccatgcccagccacggatattctttatcagcatagtctatgatgagtaacactaaggttgttcttcagcttgtgattctccatcatgttgtgcttctcagttgtttctgaattctctcattttatggtgtacctttttattattattttgagtcagggtctcactctgtcacccaggatggagtgcagtgacgtgatcttgactcactgtagcctccatctcctgggctcragcagtcctcccacctcagcctcctgagcagctaggactatgggcatgtgccaccatgcctggctaatttttgtacttttttttgtagagaccgggtttcgctatgttgcccaggctggtcttgaactactggacccaagcagtccccctgcctcggcttcccaaagtgccaggattataggtgtgagccaacatacctggtactggcatactttttggacttaaggcattcattttctgtttgtggctctcaaatagcccacacgcctccacgcgttgtacatggactggcacttccaagtctgctttcacgtctggaatatgctctttccccctttcttgacttcttgttgccgcctgccagctacatctcacagcatttggggcaaaggacctggtctctggatgtctgtttgcttgttcttacaatatggctggggaatctgaggtggctgggaatctggggtctggggctgcttctgcaaaggctagctcctagctcagcccccacattcttcttcctccaggactgttcttggctggagaatcctctccctgtaagcagggtggayaggcagctgactgtagcacctctccggggtctggtgcccctctcagctgtggtggtggtaaacaacccgtttttgctcccctgtcccagatgattgggctaacgtgcaggggctgctgggtcattactgtgttctggtggcagctggctgctatgacaggcaccttccattccacccttgtccccacccttcagggctgagggaagcagcacgcaaaccatgttgaggaaactaacgttgtcttggctgtctgggaatggcacttccctgtgactgctaagtgcaccaaataaaaatagacttggctgcatttccaggacagtttagggtcccaggtgacaaagaactttgaataaggactgtctagggttttttgtttttgtttttgttttgagacagaatcttgctctgtcacccaggctggagtgcagtggcgcgatctcggctcacggtagcctctgcctcccgagttcagcaattctccggtgtcaccctcctaggtagctaggattacaggcacccaccaccacgctcagctaatttttgtatttttagtagagatgaggtttcaccatgttggccagacgggtcttgatctcctgacctcaggtgatcttcctgcctgggcttcctaaaatactggaattacaggcatgagctactgtgcctggccctgtcttgcttgggttttttaaatggaaggtaaatagtaatcattcagcgaagcaggatgttttttgatacctgatacagagtacagccatcaagtgcatttgagaatgaataaaaaagctaaaattttataatcaattatgcaaaagtagattttaccttttccaggtagcactcttgaatattgtattaagtgcattttgataaatcagtatttcccttctgattcacattacagtttctaaggttctgtaatttttattgcagttagtttaacctgataccrtagcttgatttatttccccttaattcaaactttgaagttcatcatgtttccatgttaaatgaacttactaagcacatttccgtgtaaaagagtccccctggatggacccttctgtgacatgaagaatatttgtcctgtaatttagctttcaaataagaggcaaactctgagcagaacttcagagggaaaggacactgagaaaagacagttccaaagaggcagggacggaagacagcaaggcaggcaggcaaagctggctgctctgccgtggggagcttcaagggaaaaacttcaagatggcaggagcccctcggtaggtacgaattcgatacagtgggaagggcgtcactttggtaggtatgtggatctgatacagtaggaagaaccccactagaatgtcgtatatgaagaatggacttcttggggaaggtcgttgttaatgtccacttaaatatcgttcatcatacaaaacacagcatatgacaggaaaacaagaaaacccaaattctaagctctagtataaatgtaagtgctgtgttgagggttttaagacaattcggtttattaaacccaaatttaataacccgagattgtgtcactgcactccagcctgggcgacagagcaagcctgcctaccgtagtgaggcccttcccaccgtatggaacttgtacctaccctggggctcctgccatcttggagcttttcccttgaagttccccacagcagagcagccatctctgcctgcctgtcttgctgtcttctgtccctgcctctttggagttgtcagtgtccttttcctctaaacttctgctcagagcctcttatttgaagcctttcctacttttgttcactgccttattccacttggctgtaaaatatgacatacgtgttaatttaagtttgtggcttggtgtccattggctgtcttcctcaattagagtacagtcctctggggaggccgacttctattctatctcaaacccagccggtcctgcaccgagtgagggcccctgagcagtgactcgcttccttctcctggggaggagagggtgggggctgccggccgagctctctggctcttcagcagatcagtgattctgaggaggggcaagacttactcaagataagatcactgttcagaatgaagtacaacctcattgttctgttctaattagggattggtgtgtctgcataaaagaagcctgaattacggaagattttagaaggaggttgctttaattatttcctaatagtcattgtaaaaaaaaaaaaaaaagttagatgtcttttgggaacttgtttaaatgcctagataaaaattacttacgatggcataaatattaataaaacagcttttctctttcttttttttttttttttttggtatagagagttgttccattatatttatttgcataatccccaagaactttcaaagcaaagtaacctttaattctactagaattgccacagatcagcagggatgagtttattagcaagtcactaccattgataagtggcggctgttgagcgcctgctctgtaccaaccctggagtgccaggttcttaaaggctttggctggttcagccctcataggtgccttgggagatgggattgggacagtgatagtaatgactaatattttttgagtccttactgcatgccaagctcagtgctaaatgctgtatggtttaattctttcatcaacgatcctgcgaagcaggtgctactgtcctttattttattttatttatttatttttttgggacagagttttgcccttgttgcccaggctggagtgcaatggcgcgatctcggctcactgcaacctcccagtgattctcctgcctcagcttcccgagtagctggggttataggcacctgccaccacgcccagctaattttttgtaattttcagtatttttagtagagacagggtttcaccatgttggctaggctggtttcgaactcctgaccataggtgacccacctgtctgcctcccaaagtgctgggattacaggcatgagccactgcacccagctgtccttccattttagagctaaggaggggtacacagggaggcagtagctgtggtgacagctgtgatctgaaccagggcttggttgagtactcttctcactacaccagactgcacttcctgtgtccgtagtgtctaattagtaatagatcagtaaacacaccgagagcgtagtgtggcctccaggtcatttaacaataataataacaacactgtgaatccttccaccactctctagattcctcatctctaggagtgaacttttccaggatgctttgcccttgctggatcaagttttttgtatgtagtttttttccttcaaattttgttttaattaacaaataaaaattgtatgtatttatcatatacaacatgatgttttgaaatatctatacattgtggattggctaaattgagccaattaacatgtgcattacctcttcctgtgtccgttaacttagaaattaaaaattctttttggagccacagtggcacatgccagcagtcttggctacttgggaggctgaggcaggaggattgcttgagtccaggagtttaggagtttgaggctacagtgagccatgatcacacttgtgaatggccactgcactccagcctgggcaacacagaccccatctcttaaaaaaaattccttttggaagtttttcgagggtaggtaaataggtgaataaaaatgtttagcttttgaaagatttaatagaagcatttgagtagtcagggctatagtacaagtctgaggatgtagggaaaaatcaggtttctcctatactcctttattcctatactcagtgtcaacagtcgacacagaacacctctgggaccagatttgtggagatgcccccagccacacacacacaccgagtaggcactcggtgctgcagcagacgccagctgacaggcagatggtgtcagatcccacggttgagggctcagtcctcaagactgcccccgccccccaccatttgcaagccccaagttgttttacctgtgcttctgactggctataaatggggttcccacaagcccctccttgggttcaattaatttactagagcggttgacagagctcaaggaaacatgtttactggttttttattgtaaaggatattatgaaggataccactgaatatcaggtgatagggcaaggcgtgtgagagggccatgtagcctttttgccccgtccaggtgtgccactcttcaggaacctccatgtgttcagctatctggaagctctctgaaccctgtacttgtgagtttttatggaggcttcattacataggcatgattgattaaaccattggccgttggtgatcaacttaagctttagtatctctcccttccctggaaattaaggatgggctgaaagtcccagtcctctaatcagtcatgccttggtcttcctggtgaccagctcctgtccgaagctacctaggagctgccagccatcagtcaattcgtgagcatacgaaaagacattactggttgggtgtggtggctcacacctataatcccagcaatttgtgaggccgaggcggatggatcacctgaggttgggagttctagaccattctggccaacatggtgaaaccccgtctctgctgaaaatacaaaaaattagccgggtgtggtggtatgcgcctgtaatcccagctacttgggaggctgaggcagaagaattgtttgaatccgggaagtagaggctgcagtgagccaagatcgtgccactgcactctagcctaggcgacagagccaaaaaaaaataaaaataaaaaaataaaaaataaaaattctattttggagattccaaggattttaggagttgtatgccaggagacagggtggaagaccaaatacatagtcacagtattacaaaagtaatgcaaaagacaatctaaagaaaccatgaaaaaaaaatctaaagaaaggagacctttttcacaggaaatagggatgtgagagagaaattaggagtgggtgaggaagagaaaatatgtgtgggagggaaagcagagaagtatgaacacatcacaaaacagcatctgaactcttacatgcttatttcttacactactgttgctcatcctacattatgccatttaatctgtgtatcaattctagggttggggttcaytgatgctgagtttgtagccaaagagtgaaatatacttgggtggtcccctaaaaggtaaagagggcaataggaaaaagtcttaaagagaaagatgacccagtgtaatatttctagagaattcgttattgtttctgttttcagaaagtagtagtaaacattaagattactgctttatatctttgactagacaagcagcttgttgatactgtgtatcctctataatgtgagcactcattcagcacgtgggtttattgagtgcctagtacatacgaagcattttatgctaggcactgagtagataagcaagacaggatccctgctttcagggagcttacagccccacgcacgttataacgtgaaattgttagcataattttaacgcattgtgtctgtaggagcataaaagagttcttatttccaggagaaggtgtgatagaccagtcctgtcagtacaaataatctggggctccaagtggaattcaaagaagaaaataaggtattatggaagaggaggctgtagaaaacctgaagaaaggtgtgttttgtggatactttggctgatggctttgaaatttttttcagatgaggctgttttcaaatgttattggctgcacagattgatttagccacccacctggtgtttgattctagtagttcattccttgcttaaggtgaaatgctgatttctgatcatcattattaagaatggatcctggaacagatgtaggtaccatttgtctttcagtgtttaggagtgatccccacctaacagtctgcatgcagaccaccggcttgggtttcctagtatagaagtgaatgtcctctgtaccttgcttggtaaacagttgcctttcctgaggctggctgagtttggctgtaactttctccttcctaagtccctactattttcctcattcctcactgggtcttcccagcctcgtatgagtgtgatagaaatggggaaatgtgtagcctctcttttctctcatttcagcttaatgaaaggggtagcctcctggttggcagccaggaagctgcaaaagggaaaattcctttccctagctatggaagtatgacaggcagtgttcgctatttgatatcggctggtgaagtttccttgaggtgcaaatgctctgggtgcagggtgcccacagtctccttttctttgcattctcccgggccccctggtaacggtcagagagaagagggcttacctgggactggatcgctgtcaatcgtgaaccttaggaacttccgatgatacagattgctcttgcttaacccatgtgttgggacactttggtgtgtagaaagcaaagctgtgttgtgttgcaatatcctggcctgcctccttcactcccctttgtcagttttgctgaactagggaatatggaaatgtggtgacagtggtaaacagaagggtgatggtacgactacgtgtgcgccctatcttgccttttaaaaagccacacctgtatatttggttttacacatattcatatggtgaattacagaagaagaatttgtctaactctgccttcacccaaacagctggtatatgtatttggactgaaataggatgaaaaagtggtcacggtggtcagagtgtagcagaccagtgaaaaacaaaaacactagcccaggacataagccctgcttacaactttgaaacttgcctgtgaatttgataagaactagaataaaccataaatgaaaactgatagctctgagagtggcaggatgatgggtgaagtttttaactctggggcgttggtacccttgttttacaggtgagggtatgaagatgcagagatgaagcagtttgcctaaggatgcaggatttcaactcctgtgctcagcttccagctgttctgttcccattgttctacactgaggccagccctgccctgggtttcactaagtactctctgagtttatctgctcttctgtggcctggcctccctctcctaggaagagtgcttagggatgttcaaaatagccagttaggtcgccttttgcagatttttccaaacttaaatataaaatatttggcccttgtttgcttctgggttacagtgcttgacacggtctcttcatcctcgccctggacagaaaggaaggagagctgatctctaatggtaatggctccagttcctggtttagatgaagtttcattttcatgctcatcagttaaggaacactgcatttttaaaagtagttattttgggctgcagtggctcatgcctgtaatcccagtgctttgggagactgaagtaggagtatttcttgaggccaggagtttgagaccagcctgggcaacatagcaagaccccatctctacaaaaaaaaatttttttaattagctggcaagcctgggaaacatggcgaaaccctgtctctccaaaacagtacaaaaatcaggtgggtgttttggtgcagggcggaagctgcattgagcctgcaacttcactgcactccagcctgggtgccggagcaagaccctgtcaaaataattatttaattaattcattaattaaaaataaaataaaaaatgagctgtttgtggtggggcacacctgtggtcccagctatagggggctgaagcgggagaattggttgagtccaggagtttgaggatacagtgagctgtgattgtgccattgcacagaggtgacagagcaagaccctatctctaaaacataaaataaaaaataaaatgttgttatttgggggggtacatattttcttttttccttttatttgtagttgacatgtgattgtatatattaaggggttacagaatattttgtaacatgcatgcaatgcataatgagcaaatcatagtaattaggatatctaccacctcaaacgtttatcatttgggttggacaaaaatatttattaaggagtaccgagtaaatttgtgtgtgcaggtggacaaagcctggagggcaacaaacaaaacagtagttatgatagagaggactttttaatacatatttaataaatattgtacagtttgtgtctggacacctcagtgaatctccaaatttaggatagcaaaatagcgtaaaaactatggattggaaccctcagaagcatgttgagacctatttcaccaggtacaggccctgtgccctcatggaactgtctgctgtatccgggatcagattcctttctcttcaaaatgacatgccctgtaaccatgaggaggtaccccaaattgaaggaccttctacaataacaactggcctctattcttcaaaaatgtcagttatggccgggtgcartggctcacgcctgtaatcctagcactttgggaggcttaggcgggcggatcacctgaggtcagaagttcgaaaccagcctggccaacgtggcgaaaccccgtctctactaaaaatacaaacgttagccgggtgcggtggtgcacgcctgtaatcccagctattctggctgaggttggagaattgcttgaacccgggaggcaaaggttgcagtgagcctggatcgtgccactgcactccatctagcgtgggcaacagagcaagactctgtctaataaacaaataagaataaaatgtcacttacgaaagacaaaggccagggaacctttgatcctttttcgattaaacaaggtgacaaagacatgacaattaaatgcaccatgatcctgaattagatcttggatcttgtaatctcatggctataggacatgtcattttgaagagacagatgtgtgataaagatcattattgggacaaccagcaaaatttgagtaagggcagtatattcagtattgtatcagtgttacatttcctgagttgcacatgcatactgtgattatgtaagaggatgttgttaggagatacgtactgaagtacttaggagaacagtgttatttcgtctgcaacttactctcagtctcggtttttcttcaaaaactgttacatgcatgtacacactcctaaatcacatctcattccttacagacaggtgggaagataacaagtgtgtgttagacgtggttttctagactgacaagagggactggtctgttctgcaggggcagcccaaagaaagtcttcatagttgctgtgtttaatctgagtgggaactgaggtgagttttagaatgagagattcaagaagaaagattcccaatgcctgtgccagctctcagtgttgtggctggaaagtagggggcatctggtgttgtcctgtaaaggaaggccaagaagatagcctcacgtgccatgagaaggtgtttgaacttcttccatagacatgatgggtctsttagggttagggtgaggttaaactccagctaaaatggcttaagtgatagtaagtgtattttctcacataacatgaagtttgaaggtggggaagtactagggttgcatcactcagcagttcagagatgatctccccaccccaggtgtttatgtttttggctacagccatccttagcatgcaagtggtgtctgctctcctggctacagggtgattgtcacctgcccatgacgagatctggtgaagaagaggagggagatttctttctgagcatccattgctgtgaggaaggaacaccttttccacaatggtcctggttcagtgtaccttcagattcccttagctgagattgtgtcacttgcaaaggggaacgtgatcgtggtggtgggcttatctggttactctccctcctgtggccagggaacgttcctcagaggaacctcccaggcagccacttcagatcatgtgggtgttgccagcagcatggggccaggggtattgggtgagcagacattagggtctgccaccatgcagaaaaaaggttttaattttcttttctttttcgtgtgtgtgtgtgtgtgtgtgtttgtttgtttgtttgtttgtttttgagacggagtttcgctcttgttgcccaggctggagtgcaatggcgatatctcagttcactgcaacttccacctcccaggttcaagcgactctcctgcctcagcctctcgagtagctgcaattacaggcgcctgccaccacgcccagctcatttttgtgtttttagtagagatagggcttcgccatattagccaggctggtcttgaactcctgacctcagatcgtctgcctgccttggcctcccaaagtgctgggattacaggcatgagctaccgtgcctggccgatgtatggtgttttttgtttgtttgtttttttgagatggagtctcactctgtttcccaggctgtcatccaggctggagtgcagtggcgcaatcttggctcactgcaagctctgcctcctgggttcacgccattctcctgcctcagcctccagagtagctgggactacaggtgcctgccaccacacctggctgattttttatatttttagtagagacagggtttcaccgtgttagccaggatggtctcaatctcctgacctcgtgatccgcctaccttggcctcccaaagtgctgggattacaggcgtgagccaccgcacccggcctgatgttttaaagtattatacagccgcttattaaacctcctgttatggatagcagtaataataatagacagtacttagcatttaccacccataggcactgtttgttctcagtcgtgttttacacttacttattcatttggtcctcacaacagcgttatgaggtgtaggggccattgttacccctagtttccagatgaggaaactgaggcaaagaaaggctgagtaacctaccaaggtcacatcactaatgaatagggagctggaggcagagctggtgtccagtgtgggcagccccagtatagagtctgtaaccactaggaaaaactgcctctgggtattttttgtgctttttttttttttttggatgctacagataatactaagatgaacatatttctacatacttcttccttgcacatacatgaatagcctggccgttgtgggttagagtgcgtgggaaatgagagggtagagatgacatgtgtagaccacgcttcagagaaaagttactttgaaagggaccagaaaaagggttgttttagttcccatttgtttccttatcaggaaagacggattattttgtttagtgttttatttccctttggggtgaagacctgcttatgtcttttgtccatttatagtcgggagtcactgtgcttctcatcttcctgtatgattgacatttacccctttcatatactacaaatacttttaggctcttatttttaactctttgtagtttctgtgtatgtctttattatcatttgctgcagcttcaacacttttaagaaatcactgatttcattttgcgttaaagctagtttacttcttgtattttaacttttaaataatgtaatcggccgggcacggtggctcacacctgtaatcccagcactttgggaggctgaggcctcccatggatcatgaggtcaggagatcgagaccatcctggctaatacggtgaaaccccgtctctactaaaaatacaaaaaattagccgggcatggtggtgggcgcctataatcccagctacttgggaggctgaggcaggacagtggcgtgaacccgggaggcggaccttgcagtgagccgagatcacgccactgcactccatccagcctgggccgcagagcgagactctgtctcaaaaaaaaaaaaaaaaaaaaaaaaacaaatttaagattggctttactgtcctcaaattgctgttcatctaagtcaatgcccagttactttgttacacacatacattcttttttttttttttttttttttttttttttttttttttttgagatggagtctcgctgttgcccaggttggagtgcagtggcacgatctcagctcactgcaagctccgcctcccaggttcacgccattctcctgcctaagcctcctgagtagctgggattacaggcgcccgccaccatgcccggctaatgttttgtctttttttttttttttttttgagacggagtctcgctctgtcgcccaggtcggactgcggactgcagtggcgcaatctcggctcactgcaagctccgcttcccgggttcacgccattctcctgcctcagcctcccgagtagctgggactacaggcgcccgccaccgcgcccggctaattttttgtctttttactagagacggggtttcaccgtgttagccaggatggtctcgctctcctgacctcgtgatccgcctgcctcagcctcccaaagtgctgggattacaggcktgagccaccatgcccggccacacatacattcttaaaagcattttaaaattataattcagtgaatttggagtcttcccattgttttcttttaatttgtatatctgagtttgccctcaacaccacactatttaattattgttttagaatatgataaatatagtagggctgtccttctcatctctgtttaacttttctgtcttcagaatttgaagggtattttttctttattttcccaaacaaacttgtaaatcattttgacattactctttttttttttttttttttaattttttttttttttttgagacggtgtttcggtcttgttgcccaggctggagtgcaatggcgtgatcttggctcaccgcatcctccacctcccgggttcaagctattctcctgccttagcctcccgagtagctgggattacaggcatgcgctaccacacccagctaatgacatgactcttaagacatgctagtgttcgtgctgaatgccccattaggttaagatcatagaaacgtggcagttggagagctgtaaaggttgcttagtttctcatttccatttctgtttaatttctarattttggatcattgtttgacttggaaaatgatcttcctgatgagctgatacccaatggaggagaattaggccttttaaacagtgggaaccttgttccagatgctgcttccaaacataaacaactgtcggagcttctacgaggaggcagcggctctagtatcaacccaggaataggaaatgtgagcgccagcagccccgtgcagcagggcctgggtggccaggctcaagggcagccgaacagtgctaacatggccagcctcagtgccatgggcaagagccctctgagccagggagattcttcagcccccagcctgcctaaayaggcagccagcacctctgggcccacccccgctgcctcccaagcactgaatccrcaagcacaaaagcaagtggggctggcgactagcagccctgccacgtcacagactggacctggtatctgcatgaatgctaactttaaccagacccacccaggcctcctcaatagtaactctggccatagcttaattaatcaggcttcacaagggcaggcgcaagtcatgaatggatctcttggggctgctggcagaggaaggggagctggaatgccgtaccctactccagccatgcagggcgcctcgagcagcgtgctggctgagaccctaacgcaggtttccccgcaaatgactggtcacgcgggactgaacaccgcacaggcaggaggcatggccaaggtaagtgaactgaagcactttcaatacttcctacctaaccgcgggctttccctccgagtaatgcgtaaaatggraccaygtggcccactcctgtttttcctcttgggctctccacgtgccactcatgcttggaagagacagatttctttctaggataaagatctctgccccatttctgtctttaaaatgagaattcttaaagaagtaggacagcttgcaggtcaggcagttggaaagtacagggcctaatgtgtccgtgaacctggtagaggttgctttctgcctgtgtactgcccactgaggaggtgatcactggtctgtatgctcctctgtggccatccagtgaagtatctgttggcacagtatccatttcactgaatgagaaagctgtgttccagggttgtcagctcactccctgctatgttaacaaggaagaggtggcagagccggggagaagcacaggcattcgggtcccagaggaaacaccagtgcagtggttcttcaagtggggtcccctggaccagcagcagcagcagcatcccctagaagcttgttagaaatgcagacttctttattgactcagaagctcggcgtggggcctgggctttaagaagcctccagatgggtgctggacacagtgactcacgcctgtgatcccagcactttgggaggccaaggtgggtggatrgctcaactctaggagtttgagaccagcctgggcaatgtggcgaaaccctgtctcttggaaaaaaaaaaaaaaaaaaaaaaaagcagcagcctccaggtggctccaaggtcacgcacatcacacacacacacacacacacacacacacacacacacacacacaccacacacacacacacacacacacacacacacacacacacacacacacacacacacacacacacacggccaagagctctgctagggaaaggcctggactgggatttgcagccaccagccttgcagctgccttctagagtaggaactggacttggagaagggggaaggcagatgcctggatagatgtgagacagctggaaaagcccaggactgacagggaggagcacagagaaggaagggcagcctattcccactgaagtgacaaacactgtggatgctctgcggccagaggcttctcaacagcagccaccaggcacgtcttcaggcagtggaattcagcacatcccagaacagaaaatcagtttgggctgttctttggatttgtttagtcccaagtaggggtgagggagaataagagtagaacacagtttccccagaaggttgatgagagcgttgggtgacggatscaaaaccctgtgaatgtcggaaacgagaggatttttttttaacttaagaaatgaagatgaagtaatgctcaatgtttaaattgcatttgtcttttttgaaatgttagtagagaggaacgtgaacttaagttttacttgtacctggcattttaagaagagtctgtatgagtgtgtcaattgagaaggaatttctcatgggtttatggttcctggagagattgatccttgttccttttcccagttcattcatcactctactccttacttttaaaactctgtctattctggagagtttaaatcatatgaagtcgacataatagtataaagcaatgattcccaaacttttttttaatctcaagactcctgaataatcttaacaattactgaggaccccaaagagatttctttaacatgtgcagtatacctctcaatatttactatattaaatagtaaaacagaatattgaaacacatttcatcatccgtccagtgcagtggaatcacacatcacaaagtaactagaaaactagatctactgtgttcttgggagagaatcagagggaaaaggcaaatcatatcttaggattttatggaaatagttttgacatcatggtccccctgaaaggtctgggaccctggactgcacttcaagagcttttgataacatgtatgtagaagttagactttgtacacctaaacacaaagccattatcacatgttaacagatttaacagtaacttcatgtcagccagtatccacagaatagtcacgtttccagtggtctcatatgttgtaattttttttttttttttctgagatggagtttcactgttgcccagtgtctggagtgcagtggcaccatctgggctcactgcaacctccgcctcctgggttcaagtgattgtcctgcctcagcctcctgagtagctgggattacaggcgcgtgccactgctcccggctaactttttatatttttattagagacggagtttcaccatgttggccaagctggtctcgaactcctgacctcaagcgagccacctgcctctgcctcccaaaatgctgggattacaggcgtgagccaccacgcccggcctataagtagtttttatagatttttactcaaaatctacatttcagttagttgatatgcctcttaagaatctgttctctgttggtctgtgggatccttacaatttactgaagaaacatgttttggttgttgtctgctatttatcctggagagtgtcttccagaagttggactttgctgattacacctgtaacacttcatgcttctctgtccacccaggcttttcattccatcctggggttcctttatacagagtggtctttctttccaacagcaactcgtggatgtcactggaaagtgagcctcgttagcgtgctggggacagttgtctcttgtttcctataggtatctcaaagcagcccactagaggtggatagagtgcatttttttaaagatgtgtcgttgcctttgggtggaatgaaagaccaagtagtggtgggcagaaagtaagagggagagacaagtccattttaaaccattccctctctagaaccttacgatagcagagccaactagattttaagatgcacagggaaaaggcgctttttttaagataattttgttttaagaacgattacacaggaagtatatcctatgaaataattaaaatagtaggaaaagagcaacatcctccttacagataaagatttaaaatacataatgaaaccagactacataagcaccttactgttttacttggcagtgtaccttagatggcctctgtgacactgcacagagatttttttttcttactgatagcaaagtattccattatatgatacatcataatttattgatctcatcctctgaggatgaacatttggattgtttctgactttttgctagtgcagcaatgcctgtacacatgtgtcatggattagattctgaaaaggagaattaatgggtcacagacttgtttaaagtttgtttttagaaagtaaacatgcacatggtttaacgacaaacaaccataaaaatactcttaagagtaagaaccagagagttaattcttaattcttgaattttggttctcccaaattctcaccaaaggcaactattatttcttatctgtcctgccagtgatgatgtatgcgtatagaggcgtagagagaggggtgtgggtatgtgtgtgctatctccccagacataaagagtagcattacacagcgttttcttgtgagtgtagatgttcccctccccacccaccacttaacaatacaagttggaaattcttccatgctccgcgtagctgtcagtcattcttcataggtacaataggaattcctgatttgggtatatcgtaatttaaggacttgtgccatgtaggctgagcatttaggttattcccagtattttgctgttttcacagttttgctttgaacacattgtacatatatctttgtacagctgagtgaccatatctgctagataatttattggacatgcaatttctgaattaaaagatactgagattttaaatcagcatagataatctcagatactcttcagaaatattgtgcaaattataccttcatcaagagtgattgagcctctgtccaaatcttgaccaacactgaatattaccatccttttacttacttgacattctgttaagcaagttgtcttctttgttaagtgtgtcttttcataaggtcatgggcagttgtattttactgattgttcataatctttgtccatttgtctcttgaattgtttgtcattttttctcattaatttatattcttaagtctcttaaaacatgtttttcccctttgttatttgccatagtctgtttcaccaggaatatggtcacataggtttacaatatgtttttaccaagtatatgttttcagtttgtatagaaacacatttatccatttatttcctttatggcttttaggttttatgtcacattttagaagtgcttttcctattaaaaaattaagaaatattttcctgtatttttctccttattacgtgacttttttttttttttttttttgagatagggtctcagtttgttgcccaggctagagtgcagtagcatgatctcagctcactgcaacctctgcctcctggtctcaggtgatccgcctgcctcagcctccccagtagctgggactacaggcgcgcatcaccacaactgactaatttttgtatttttttgtggagacggggttttgccatgttgcccaggctggtcctgaactcctgagctcaagcgatccacccacctcagcctcccaaactgctgggattgcaggcgtgagccaccgtgtctggcctccttgaatctttaactcaatttattttggcataaggagtgagacacagagatccagcagtatatattttttcttgttataatcatcttagtaccatttatttagtattggtaatccatcttttctcccactgatacgatatgctgtttttggtatacactttattctcttttcaaacatataggatttgggtctaatttctgaactctttttctttagttccattgacctttgcttgttcctgtgccagaaacctattaacctagctgtgtgatgacttttagtatatgacctcactagttatttctcacacaggtggttctcaactctgtctacactttatcagatttatctggagaatttttaaaaatatgatgcctgaaccccactacagagcaattgagttagaatctgggggatatggtagaaacattcgtatagtgtgtagttcctcagatgactttcatggcagccagggttgagaaccccactgtgttagataaatttaggactttttttcaaattttaaaaacaaaaaatctttgggattttggatttataagattcactacaactttataagtcattttaggagggatgtgacattttaacagttttgtgacttcctgagtcttcttatacatataaattatcttttctgggggtcttatgttgcttggaagcatagtatggttttctttatctgtgtaataaatctttcttactaagtttatttctggaggtattatgtggtttttgttgctgttggtgatgagttatatttcattatctaactggctattttaatataggaaagatgttatgtatacgctactctggtaatctggctgctttatggggttatcttaattattctaatacgttttcaggagattctcttgagttttccaaggagatagtcatcttttgcattattgatacttttattttctccttgccaatattttttgccagtgtttatgctcttaggcatccctgtctcgtatcctacttaaatggaagtgtatttagtgttctgttattaagaataatgtgagctttggtttgtagtcagtagtatatttcttttaaaattggggcataatctgttcgtcataaaataaatgataatatctaaatgttaggttttatcaaatttctttttgatacctacctatgttgattaacctgtgatttttcactttccatttatttatgtgacagattatctgtgtaggttttataatatcaaattgaaccatctctgtaattgtaaaatcaaaagttaatgctgagttttaattgctagtgcttcatttagaattttgtttctcatttatcagtgatgaaattgatccatagctctttttgtgctttgtcaatttttatatcagtgttacgttaacttggtcaaaaagagtttgaaagtcttttttttttttttttttttttttttgagacggagtctcgctctgtcgcccaggctggagtgcagtggcgggatctcggctcactgcaagctccgcctcccgggttcacgccattctcctgcctcagcctcccaagtagctgggactacaggcgcccgccactacgcccggctaattttttgtatttttagtagagacggggtttcaccgttttagccgggatggtctcgatctcctgacctcgtgatccgcccgcctcggcctcccaaagtgctgggattacaggcgtgagccaccgcacccggccgaaagtctttcatatttattctgtgaaacagtttaaatcgatttggaattatctattacatgaagaattgagagacttcacccttacagtgatgtgggcctgaagcctttttttccctaggaagtgactgaagatctttgacaatagtgccgggcgtggtggctcacacctgtaattccaacactttaggaggctgaggtgggaggattgcttgagcccaggagttcaagaccagcctgtgaacatagggagaccctatctttaaaaaaaatttaagaattagctggtcatggtggcacatgtctgtggtctcagctactcaggaggctgaagcaggtggattgcttgagcccaggagtgcaaagttgcagtgagccatgatcacaccactacaatcaagcataccaacagagtgagattctgactcaaaaaaaaaaaaaaaaatctttgacaactttattgctattttctataaatattggctcttttaggcttttagtagtctcttaggtcagtatcgtttttatttagtaaagtctaaatttgctttgattttgagaaaaactaaaagatacttaacttttaatctttgtttaaaaaaaggataggaggtaggcaagtcacatgttacagattaagaagtggaggctgccagtgagtggcagaaccaggcttgcatccacacggtctggccagaggcctgttaacactaatgcaatgcagcctgttctttcgtaagttttacagtttctgttttagtagaaaattattttcatctaatctttaaaatttgttaacttaaagctgtgcaaaaatgtgtgcagttctttgtcatttttgatgtttgtgattatttctcttctcattcctaatttttttttttttttttttttttttgagatgggagtttcgctctttttgcctaggctggaatgcagtggcatgatctcagctcactgcaacccctgcctcccaggttcaagcgattctcctgcctcagcctcctgagtatctgggattacaggcgcccgccaccacgcccggctaattttttgtatttttagtagagacggggtttcaccatgttggccaggctggttttgaactcctgacctcaggtgatctgcccacctcagcctcccaaagtgctgaggttacaggcatgagccaccgtgcactgccatctcatttctaattttatgtgactctgaaaatatttacagtaggaaaaacatgacccttgttgacaacatggcaatattaacaatacatgatattactatttttttcttttgtttacttttgtgatagaaggcatgataagagttttttaaagaaaaaacaatttctttatttcaacagtagcaaaacttaacatttcgtcttatgaggggagcatgttcttgttttctactgaaaataactcatacacttgtcctctagaaagaaagcaaaaaagaccaatttaggtaggatttagaagccgtacagacactctctttcctggctacgggtgttgagagatgttgcttgacacagagatgacagaaggaagccagaagctggtagaaagaggaaggtgtaatttcgggtcaaggggtccggaggcattctgattttaaggttgataagaatttgtttttgtgaccttagaaatcttttaagtactttcttttaactaacaaatctgaaacgtgaccaaaatagtttgtatggtaatccatcttcatagggggtcagattagggcttattttttgaataaagtttttggaatattcgtcttttttagaaagtggtcagaaaaccccggggttgatttttgactggaggtgttcctggagtaaaagttttaaattagatcagctcccagtactcagtcagccatcattttggtcagatactataaagcagtgattcccaaacttgaatattcagcagagtcactgcaggcttgtcaagacagatttctgcctccaacttaccaagtttctgattcagcagattttggttgggacctgagaatttacatttctaaccagctcaccggtgaccgtaattgtggtggtcagggaccacactctgagaatctgtgctctaaaggaatggattagcagaatatagtcagtaaagaattaatagaaccaagttggctaagaaatgactaatctaccttctctattttgggtagattattggaaatctctaatattatttatttattttgagacaaggcctcactctgtcacccaggctagagtacagtggcgttatcatggctccctgcagcctcgaactcctgggctcaagcagtgctccagtctcagcctcctaagtagctggtactataggtgtgcaccatcatgcctggctaatttttttgattttttttaaaaaattgattctcttatatacacctttatttgtactaaaaattgtaaaaagagcacaaagtttcctcttattgcaacccaaatttttcttattattacgctgtagccaaactacccaatgctttctttacccacaagtgactttgcttcaaattctcggtgttgggtttcatctcactggctttgggcttctaaaacacatggggatgcttatgtcctcttggcttcgagtcaaattaagcagtagagctgaagtatactgaagttattcagatacgttcaaactacacagaccccttatacatcactagtatcatggtagaaaggaaaagatacaagaaaaatacatcctagaactcattatcaaaatttttgatatatagtctattgtagcataaggtagctttctcaacctgctacataaaattaccagcaagaaaaaaaagtacaagaataaggtttatggctgaagtggctcagtgttgtaattccctattctagcactctcaaaagtaccccatctgttacacatgcagaaactgcagcagcatctgaaatgtccacttcttgattcattctgaactcccttaagcccagtgtttgttagttctcgttcaagtctaggaactctgccgagtaacaggtatctcaattttgccatcctttctttctgcatagacaggagtgttcttaaatcttctcctgtaaagcaagtcatctctgatttccctgaggatcattgctcccgtatactgttgttggggtgagccttctggtagaggggaagagaatttggtactagggttgatagtcaagttactaaggttctttatcaacatctcagagcagaagttttgagaggcccctgaatcgtcctgggaattttcttcagtgagcatttttgaagactgggaccagggttggattaaacttttgtgatgggtccattgtgtctcaacacaacactgagcttctcctggatctttgaaacccagcagaaactgttgctggactctcaaattgccacaaggtagaccagaaagagcctgaaaacccgaactccaaccatctttttctttcctttttaatgcagacatggtgttgctatgttgcctgggctggtcttgaactgaactcaagccgactgccgtcttggctgcccaaagtgctgggattacaagtgtgaaactatcatgcctggctggaatttctaatatttaatagcaagagaaataatactgtacatttgtctgttgcttttcactttttcacgtgaagtcatctgattcttaacacaaagaaataagggaattttatattaagcatatcttaatttggcctcttaaaagatcacaacaaaaatagtttgtagaatgaaactatgtagtgccatgaattaatacagggtaatgtgggatgtatataattcctgtgggcacagctgtttagtagacatgttaagtagcctaggactggctcagggatcttattatgactctaatgagagatgatcataggtgtcctatagaatgtatgattcaggatgtacctaccttcccatgataattaatcatgaatttcttttttcttttcttttcttttctctttctttctctcactcttcctctctctctttccttctctttctttctttcctttctttcttttccattcctttccttttccttccttccttcccttccttccctttcctcccttcctttccttccctcccttccctccccctccccctcccctccccttcccttccttcctttttctttctttctttccccatagtttcactcttgttgtctaggtgggagtgcaatggcgtgatctcggctcactgcaacctctgcctcctgggttccagcaattttcctgcctcagcctcctgagtagctgggattacaggcatgcgccagcatgcccagctaattttttgtattttcagtagagacagggtttcaccatgttggccaggctagtgttgaactcctgacctcaggtgatccgcctgcctcagcctcccaaagtgctgggattacagacatgagccacctcacccagccttatgaatttcttttttaaactttttaatttaatgagattgcatatgtatattaaatggattgacacgcacatagtagttagtgtacttactgcagcagcagtagtaatagcggcagctcagactgccttctgcagatgtagtggctaattgctttcaagcctggcgtgggctctggaataagctgactcagttcacatccagggttcactaattattagctatgggaaacttatttaatctctctgggttttagtttttttggcttttaaatgaggataatagtagctgccattgagaattgttctatcaattaaaaatggataataatctctatcttacagaatcgcatgccaattaaatgagatggtgtatgtaacattcttagtatatgcataggtttactgaaaaccttccagagaatattgagtagtgaactagcgaggtgctgtgccacataaaatatttgagatagccacacaacatttgaagtgataatgagactgcttttctaatgttttccgaaaacattttttggtagtgaaagtagctgttgagcttggtggctcattcttgtgatcccagctacttgggaggcggaggtgggaggattgctttaggccaggaatttgacaccagcccgggcaacagatcaaaatcctatatcaacttttaaaaagttgatgtttgttatacaaaattascacagaaatgtctagaaaagaaaatcttgcctgtaagcctatcatccagtcatacttagcgctaaagaaaacatactcctgatgttttctctaccagtcttttatctataattatgtatcttttttaaagtcaaagttggagtagtatttccagttaactttttggctgattattttctgtaacacaaacggaatgaatgtttagcataataacaacaatgaagattttcatttgacatgtctcccaggggaccatcttgaagagtaacttaggcatgtgtcacttgatgggggtgaaatgcatcattaagtgattatgttatgctaggaacatcatagagtagttatgcaaacctagatggcatagcctgttacacacctaggctatatagtgtaccctgttgctcctggacwataaatctgtacatcatgttactgtaatgcatacttgggcagttgtaacacggtgccacaatgctaagtgtttataaacctaaacatttctatacatagaaatggtatagtagaaaatactgtataaaagatttaaaatagtacacctgaccagacactcagtcccatgcctgcaatcccagcactttaggagggtgaggccggaggatcacttgagcctgtgagttggagaacagcctgggcagcatagatcctggtgtgtgtggcaggggtgggcgggtgtgtgtgtaaaacacacctgtataaggcatttactatgaatggtgtttgcaggactggaagttgctgtggatgagtgaatgagtggtgagtgaatgtgacagctgagaacgttgctgtacactgctatagactttataaacactatatacttaggccatgctaaatttatttatttttaaatttcagtaataaattagcttactgtaacttttcactttataaacttcagttttttaaaaacttttttattcttttgtattaacacttagcttaaaacactaaacacattgtacaggtgtacaaacgtatttgtacttattctataagctttttctattttaaaattttttattatttatttatttattattattattattttttttgagacagtcttgctgtgtatcccaggctggagtgcagtggtgcaatctctgctcactgcaacctccgcctcccgggttcaagcaattctcctgcctcagcctcccgagtagctgggactacaggtgcatgccgccacgcccacctgattttctgtatttcagtagagacgaggttttaccatgttgcccaggctggtcgtaaactcttgagctcaggcagtctgcccgcctcggcctcccgaagtgctgggattacaggtgtgagccaccgcgcccggccagttctttaattttttaaacttttttgttaaaagctaaaacataaatgtacacacatacacacagacacacacacactagcctaagcctgtacagggtcaggatcatgaatatcactgtttttctcctccacatcttgtcccactgaaaggtcttcagaagcagtaacatgtatgggagactgtcatctcctataatgacaatgctgccttctggaataccgcctgaaggacctgccttgaggctgttttacagttaacttaagaaaaagtagaaggattatactctaataagtgtagtaaatacataaaccagtaacatagtcatttattatcattatcggctattatgtactatacataattgagccatgcttttatacagctggtagtgcattgatttgtttacaccagcagcatcacagacacctgagtaatgccttatgctatgacagtttcaacagctactacgtcactaggccattggaatttttcagttccatggtaatcttctgggaccactgtgtatgaggtctgtagtttactgaaatgttgttatgcaacacatgactgttcttgtacgaaaaaccattatcttcgttgctttatcaactaaaggtagctattaagatttggagttaaagacctacctatatttttaaaatatttttattattttactttgattatttttggagttgtaatttatatagcatgaaatgcacagatcttatatttgtcaaaaccctttacccatgtaacccacacccctatcaagattcaggacatttctcttagcccagaaagttcctttgtatgcctccctttttctgtccccactcatcccccgacaattactgctaatttcttttttttcttttttttcttttttttttttttttgagacacagtctcgctctgtcacccaggctggagtgtactggcgcaatctcggctcactgcaacctccacctcatgggttcaagcgattctcctacctcagcctcccgagtagctgggactacaggtgtgcaccaccatgcccagctggcttttttctttttggtagagatagggtttcaccatgttggccaggctggtctcaaactcctgacctagtgatccgcccacctcagcctcccaaagtgttgggattacaggtgtgagccaccgcgcccagctgctaatttctgtaaccatgaattgctttgcctgttctcagacctcacgtaatggaatcatgtagtgtgatgacttatagtatgtgcttttttataaggcttcttttgctcacaacttgttttctgagattcatccacgttgttggcatgaactagttcttttttattgctaaatggtattctgttttgtgactagagcataatttgcttgtccgttctcccattaatggacattggggttgtttccagtttgaagctattaagaataaatcttctgccgggcgcggtggctcacacctgtaatcccagcactttgggaggccaaggcgggtggatcacaaggtcaggagatcgagaccatcctggctaacgtggtgaaacccccatctctactaaaaatacaaaaaatcagccaggtgtggtgccaggcgcctgtagtcccagctactcgggaggctgaggcaggagaatggcgtgaacctgggaggcggagcttgcagtgacccgagatcccactactgcactccagcctaggcgacagagcaagactccgtctcaaaaaaaaaaaaaaaaaaaaagaagaaatcttctgtgagcatttttgtacagctttttttgtgggcatagaagttttcatttctcttagataaataactagcaacgaaattcactgtacaaggaggtgtctgtttctggactctgtagtctaagggcaaactatagcccatgaaccacatccagccccatgacctgtttttatatggcttgccacgtaaggatgggttttatattttttaaggattgtttaaaaagaaaacaatctgggatggaaaccgcaggtcatctgcaaagactaaattatttattaactggcccttcatagaaaaaaaaaatccctgtacctttgttctagtctgttctattgatctatttttctattcatttagtttgttttttaagaaaagcttttttgtttgtttgttttgttttgttttggagaaggagtctcgctcttttgcccaggccggagtgcagtggcgtggtctcggctcactgcaacctccacctcccgggttcatgccattctcctgcctcagcctcccttagtagctggaactacaggcgcctgccaccatgcccggccaattttttgtatttttactagagacggggtttcaccgtgttagccaggatggtctcgatctcgtgacctcgtgatccgcccgcctcggcctcccaaagtgctgggattacaggcgtgagccactgcgcctggcccaagaaaagcttttaaagattttgggtttttttagagtagtttgagcttcacaatgaaatgaaggtacagagattttccatctattccctgttctcctagttcatagtctcctccattttcaacatcctccccaactccgctgtctagaatggtacagtttgtcacaatcaataaacctatattgatacatcataatccgaagtctgtagtttacactagggttcactcttggtgttgtacattctgtggacttggacaaatgtataatgatgtgcatcattrtagtgtcatgcagagtattttcactgccctaaaagccgtctgtgtttcacctcttcatccctctctccttcccaaaaccctggcaaccactgattgtctccatagttttgcctttttgtaaagttacagtcacacagtgtgtagccttttctcattggcctcattcatttaataatatgtatttaaggttcctctgggtcttttcatggcaattatccctttacctactgaaagacttcatggttgcttccaagttttggcaattatgaataaagctgccatatacatccatgtgcaggtttaagtttttacctgttttgggtaaataccagtgagcacaattgctggatcatatggtaagagtatgcttagttttgtgagaaactgcaaaaatgtcttccaaagtgtctatatcattttacattcccaccagtgatgaatgagagttcctgttgcactacatcctcgccagcatttcgtgttgacagtgttctggatttggctgttctaataggcaaatagtggtatcccattgttgtcatttgcatttctgtgataagatgtgggtcatcttttcatacgcttatttgccatctgtgtgtcttctttgatgaggtgtatgttaaggtctttggcccattttttaaacaggttgttattgttgagttttgagagttctttatatatttttgtaaatagatctttatcagatgtgtttcttgcacatattttctcccagtctgtggattgtcttctcattctcttgacattatctttgaaggggcagttttaattttaatgaagtcaattttatcaatcacaaaagtttcatagatgaaactttcatagttgtactttagctttacagtaagtattaaagtcaggttgcttagtttctcgttttcatttctgtttaattcctaggttttacaccattatttgttgctagtatggagaagtataataaatgtttctgtattaatgttgtatcttgtaaccctgctaaactcacttattaattctataagatgtcttagaattttctgggacatgttgtctgagaataaaaatagcttgcttcttcctttttcatctgtatgcattttattcatttttctggctttaatgttctgcctaggacctctagtacaatgttttgtttgtttgttttgggtttcttttgagatggactctcactctgtagcccaagctgaagtgcagtggtgctatctcgcctcactgcaacctccacctctggggctcaagcgattctcgtgcctcagcctcctgagtaactgggactacaggcttgcgccaccacacccagctaattttgtatttttagtagatacggggtttcaccatgttggtcaggctggtctcgaactcctcacctcaggtggtccgcccatctcagcctcccaaagtgctgggattataggtgtgagccaccgtgcctggccagcacaatgtttaataaaaccaatgacagtgttcttcccttgtcttattcatgatctgtgggaaaaaagcattcagcctttcgttaagtataatgttagttgtaggctttaggtatcattcattaggatgaggaattctgtttctagtttgctgagtcttttgatcataagcgattactgaattttgccacatcttttttcatttattgagatgaatcatagggtgttttttttttctttgaatgtgaattacgtctttctgagtgttgaaccagccttgcattcctgtgagataaccccacttgattgtggagtgttatcttttttatatgttactggatcagatttattaaaatattgttcaggatttatgcttccacagtaatgtgctacataacgaattttggtcagcagcagactacatatacaacagtggccccttaagactataatatatttttactgtgccttttctatgtttagatacacaaatacttacaattttgttacagttgcctccagtattcagcacagtaacaagctgtacaggtttgtagcctggaagcagtgggctataccatacagcctaggtgtgtagtaggctacaccatctaggtttgtttaagtacacccaaagtgtaagttcccacagtgaccagaatcacctaatgacacttttctcagaagatgtccttgtctttgggcgaagcatgattggtatattcatgagtgatatgggtctataactttctgtttttttggagtgttcttatttgtttttgataacaataatatactggcttcatgaagttacctgggaattgttccctttgttctgaaagttcatttaagattagtattatttattcattaaatgtttgataaaattcaccagtgaagcgatccaggtctggagttttccttgtgggaaggttttaaaattatgattcagttactttaaatttgaatagctaataggtattagctattcaaattttctgcttcttgtgctaattttggtaatttgtatttttgagtaatatatccattttaagttcttgaattgatttggcatgaaggtgttcataacatttctctactcttttcttttttttctttcttttttttttaactgagtcagagtctcactccgttgcccaggctggagtacagtggcatcatctcagttcactgcagcctccacgtcctgggttcaaacagttctcccacgtcagcctcccaagtagctgtgcttacaggcgcacaccaccatgcctggctaagtttcgtatttttagtagaggaggggtttygccatgttggccaggctggtgtcgaactcctgacctcaagtgatccgcctgcctcagcctcccaaagtgctgggattataggtgtgagccaccatgcccggcctctgtactcttttcttaatttggatagaatttataataatgtctggtgtgctctcttgtttttctctcattgatctaggttggggtttgtccattttattaatattttcaaacagccagcttttgttgttgtcagccttttcttgtttgttttctatgtcatttatttctgtctttattttcttctgcttatgttggcttttctttggggtagaagtttgtatcactggttatttagacttttccaatattaacatttgggcaataaatttctccttaaaccctatgcatcttttttatttccccatttctttgaatcctttaaatccataaacataaaaaagtaccccaaatactgttgttaattgcatctcaaattttaatacattttttaaattagtttaaaatatgtttatattttacatgtgatttattctttgacccatggattatgctgaagtgtgtttagcttttaaatatttaggaattttgcagatattttattgttggtttttaactccactgtgttcagaaaacatgctttgtatggtggttgtcctttgaaattgaagacttgtcttatggcccagcaaatggtttttcttgacaaatattctatctatacttgaaaagaatgatcaggcgcagtgtctcatgcctgtaatcccagcactttgggaggccaaggcggacagatcacttgagttttagaccagcctggccaacgtggtgaaacctgtctctactaaaggtacaaaaaaaattaatagccaggcttggtggtgcgcttctgtagtygcagctgcttgagggggctgagatacaaaaatcgcttcaccccaggaggtagaggttacagtgagctgagatcgcgccactgcacttcagcctgggtacggagcaagactctgtctcataaaaatagaatgtgtatcctacagttgtgggatgtgatgtttcataattgtctattagaataagttggttgatggtgttcaaatccttatgatttttttgttctattggttactaagagaggattattaaaatctacaattacaattttaggtttgtctggtttttcatttagtcagaacaaaatgtaagtacttgtttcatgtgttttgaaactgttttattaggttaatatgtattttggattgtaatgcctctggtaaatttagccttttatcattatgaaatatttgtttttgttaatattctttgtctttatctcctttttctcatatttaatgtagactccttatgattagcattcacatttttttttcactctttttgttttgttttgttttgatacaggatgtcactctcacctaagctgcagtccagtggcgcagtctgggctccctgcaacctctgccccccaccccgggtgaggtgatcctcccacctcagcctcctgagtagctgggaccacaggcacacactaccacgtctggctatttttttgtatttttagtagagacagggtytcrccatgtttcccaggctggtctcaaactcctgagctcaagcgatctgcccacctcgacctcccaaagtgctgggattacaggcatgagtcaccacacccagcccactcttaactttgtctcttaagtatgtctcttgtaagcagcgtagcattagatcttatttaatttattctgataaccttagtcttttaattgtagtgtttagtttatttatatttaatgttgataattgttgggtttaggtttctcatcttatttgttttctgtttgctgcttctgtgttttgttcctttttttctcccttcctgctcttcttgtagaggcaaattccaacatctctgtcatctctgtatctgtttcatttacagtcttgtttgtttaaatatagaattcctggttatgggtcacatcttcctgctccttggcatgtccagtacttttagactgtgtagtggaaatggtggatgataatgttgttgaatatgggttttattgtcctttattagtttgttttgttctggcaggctcttaattactcagatcagtttgattctctcaaagcttgtttttaaacttaacttagggcaggtcttgaagccctgttccttagacatggccttggggtctcagtttaattcctgggatgttcagcaagatcttgaaactccgactgatcagaacttctatgtctctagcactgtgccacctctggaatctgttcaattcacaattccttcgtagtcctgcacacttagttacagctccagtaagccctaggaggtgttggtgatgtgattgttgtgtgtggtcgcactgggagatactctccattttaatggtgtgaacgtaacattatgatatataatggttgtcccgtagtgactgtgtatttcacactttaaacgttatctctcatcttctgaatcgtctgaggattaagttcactgtagaaacttgggaagtgccacatctaacattcttaatgtaaatgggtccaaatcataacttcaaggaccaacttttccaaaatatttttgctatattttaaaaagagttatatttatacaaattaccatagacagtaatttgctgtccatctgtcaccaagttaaaatatctaagggtttttatgttgattaccatgtaatttttttttttttgcatttttcaaaattatgtatatgactatagcataaaatttcagtgtgatccaggtatgagcaaggataacaattactatatttattcttcctgaataacagtaagaggaagagcagaaaaggacatgcctattgtactgggcactgtgctgggtgctttgcaaacatgatcttgctttttctcatttttaataatcctgtgaggtgggtgccatatgtcttttataacaaggagtaaaatattctgaaccactttcctgcctatgcagaaaattattcaagacgacacatgtttgaaagtggtagaattttacttaaaatccacctgtgattgactccaagcctgtatttttttcgactgcatcattttgtctgtaatacagctgtattcaaactatgatggtgaaatacataagaccttattttctgtgtgtgggtcaggttttcccccatgcacgaaatttatagaacaggtaacctggagagtgagtctaatttcccaggagtatttttgtcaaatgaaagaatttactgcttattcctttttagaaacatacccttgtatgctgtaagctttgcctgtggtctgattgggttatggctcttaatctgaaatactaattcagccaagcaatttttgtaagacccataaagaagtcagctttcgacgggcrtggtggctcacgcttgtaatcccagtactttgggaggccgaggcgggtggatcacctgacgtcgtgagttcgagaccagcctgaccaacatggagaaacctcatctctactcaaaatacaaaattagctgggcatggtggcacatgcctgtaatctcagctactcgggaggctgaggcaggagagtagcttgaacccaggaggcagaggttgcggtgagccgaggttgcgccactgcactctagcctgggtgacagagcgagagactctgtctcaaaaacaaaacaaaaaaaaaagaagtcagcttttctggctagaaaaatgtgccttggcctatgtgcaagaggccagcataattaattttcttaaacattattttttaaagtgatcttggccaggtgcagtggttcacacctgcaatcccaacactttgggaggttgaggcaggaggattgcttgagccaaggaggttgagaccagtgtgggcaacacagtgagactccatctctacaaaacattttaaaaattagctgggtgtggtggcacgtgcctatagtcccagctactcaggaggctgaggtaggaagatcacttgagctcaggaggccggggctgtagtcagccattgttgtatcactgtactccagcttgggctacagagagaccctgtctctaaaaaaataaaaagtaagtagccaggcatggtggcttatgcctgtaatcccagcactttgggaggctgaggtgggtggatcacgaggtcaggagatcgagactatcctagctaactaggtgaaaccccgtctccactaaaaatataaaaaattagccgggcgtggtggcgggcgcctgtagtcccagctactcgggagtctgaggcagaagaatctcgtgaacctggaagggggaggttgcagtgagccgagattgcgtcactgcactccagcctgggcaacagagtgagactctgtctcagtcaatcaatcaataaaataaaaagtaagcaagatcactttttgaaaaatatttttcttacattatggtagcaaggaaaggtttgatttttatgttctgagttttttaaattttcaacacaagaacaaaggatagtataaccaacatctgtgttttcattagaattaatgcctgttgatacttatcacatttccttcatagtttttttttttcttttcattttttaagtagacttaaattttttttagagagatagatcttgctattatgttgcccaagcagtggccgttcacaggctcaattatagtgtactacagccttgaattcctgggttyaagcgatcctcaagcctcaactttctcagtagatgaaactacaggcggtgcaactgactgagtagactctatgttgagaacagttttagatttacagaaaaattaaaagatagtacaacagggttctttatctcctccccaccatccacgcacttcctattgttagcctcttacctttcctgtgttgtgtttgtcataagtaatgaaccaatactgatacttgtgattaactgaagtccatactttaatcaaatttcctttaattttccctaatgtccttctgttgtggaataccatccatgataccccattacttttaatcgtcctgtctccttaggcgcctcttgattgtgacgttttctcagcctttccttggtttttaatgaccttgacagttttgaggagaacgagtcaggtgtattataggatgcccctctgtacagatttgtctgatgtttttctcatggtaagactgggcttatgggcttttgaaaggaagatctcagcagccaagggccatttttaccacgtcactttgagggtgcgttgtgtcatggtgactttaccactatggttgatgctgcccacagccacctggttgaggtcgtgcctctcaggtttctccactgtaatgctccgcttccctcctccatgccatcctctttggaaggactcactatgtttaaggatagggggtttatattctaccttctttaggcaaagtgtctacataatttatttagacttcttcagtgtgggagatctgtctcttcatagttttttactaaatgaaatcaattttaacaggataaatgaaagtgtcttttacatgatatgtattcatcttgctccccgcccgccgagactgggtctggctctgtcacccaggctggagtgcagtgatgttatcttggctcactgcagcctttgcctctggggcacaagcagtcctcctaccccagcctcctgaggagctgggactacaggctcatgccactgcacccggctgttttttgtagagatggagatttgccatgtggcctaggccagtctcaaactcctgagctcaagcaatccacctgcctcaggctcccaaagtgctgggattacaggcatgagccaccatgcctggcctcatcttgcttttttaagaacagtattaaaattcatacataaagatttgattcatttattctaacctgttcatatgattatgaattcttccttgtatttttttccgttacagttttctctatgcttttgaagatacacaatgacattttaatgaaaactttgtctcttataagaggttcaaatggtgtggctgaatctcagaaacaagagattttgtcttagtaatttttaaaataaaggcaaagttactcacaaattaggtttccccccagcatctttaatcatctttgattacttgataaaaaatgccttctaactgtgatgtagatctcattttcttttttttttgtcagaagaggactgaaccccttttctgagtgctctactgaggcaaagtgtccagagccctccacttagagctgggaactgaatgtcagtgacattttcttgccagcaagtataaatgcttatcaactaattgcaattccaaggccatacttccatagatatacatctgtgtaattattacatattttkggataagaatgtggcactgtggtttgtggctttcaaaaaatggcgcatggtmtgaagtagtgtgattgcagggattgcatttttatttactaagtaaaaacttaatgcccttagcagtgagtcatattattcatttcatgtttttctaccaagtaatgaagaatgaactggaaaacaagccacctgaaactcttcctagaacaaagcaagagatagataatactgagaaatgccarctttagacattgtcttgcagttattgactttaaattattgtagtaaggatgcatgcctgttttaagtactgtagaaagtctgttcattttatagaatcctgtctcatgttagagattttctgtgctctatttttgcaaagagatcttagagccacctcaagattgcacagtgctttgtagttttcagagcattttcccatgtgctatcccatttaaaccagaaaccacaagttagagcggccctgcgtgaatggcaaacaggagtgtatatatcagcgatgagtgggcacactgttgaggcacagggagtgattgaggcgtagagattggggacagtgcaaggaggggactgagtgtgttttctcccctaaaaacctggcacattttgcttagagagttacagtagaacgggaagcaccggcctgcttggcagttgtagtctccaagttgaccgggtatggttcagcctaggcgtgctgctgccgccgcgtgtgggctcggtgaggcaaaggcgtgtggggatgggagtggccagaggtgggaggccatcactcttgacttgagtccatcaggatttgaatgcagagatcagagcagcgtttgttcctgtctgtcgatgttatgagtgatgctcttctgagacagtgcttgccttctgtgactaaccatcagtatgaataaccagctctctcctgagctttccagtttccgtgttcattttaattaacactttagctctgtcagttaacccccagccaggtggctgcacatcctaccacttttttgtggacatttagattatttgattagagatagactttgaaactgcaagattcatggctatccaggcccatcccagaggtgtttttccccattcctgtttatgatgaggttgcagaggcgtagcctcggtcaactgtgtctgttaccatttagctcgcctttgcaggcccagctcttgacccccttgtttgcctcccagtcaggacccctctcccttttgaaactccatttagcagtcgatgttggtggcacctgttaaccgcacatgtctgatttccttgtggcttgtgtctcttacctttggcttgggagaacgtggccctgtgtgtgtcaccactgcacagtacctccctcctgaaagactttaacacacttcatgttcctagatgagtktgtgtgtgtgtgtgtgtgtgtgtgtgtgtgttgccacagccttttcaacttccagtgtcctaaagataagagcatcactgctgaagagagctaggggcgggtggcaacgtgatagctgcctagtggtctccttgctgggaaggtctgctgctcgataggaactgtctgactagaagtgtgccttgccatggaaacttgggaactaaatgcattcaggtccatccctcatgctccagtctcttgcttgctgctccctgaagctcaggccagatagatcaggatgaaggggcatcccttgctgcctaaactttgaaccagagttcaaacagcagggatcattgtaccttkgtggtaccaagagccaaacgtgggatgtctgaggagaaaaagcagaagctgttagagccacgcctggctttttgtgtcctgagtaggtgtcgaccttgtttgtttctattttctttcctcccgccctccctgcagagagtggtgggcctgtgctgaggctccttgaaatgtcttctagccacaggtataaggcattcgagcaaagcttgacaggttacgcggccacgttgtgaccagggcaaatttgatttcagttaccactcagcggcaatctctgtcaccaacagtttgatctacctagttttattcagtgtttaatgacagtttaatgttttaagtagagttgtgcagcctaacagggtcgtcttgccattttgggcactcagaatgtttgagtagagaacgactttaagaaacaacttttcctccttaaaataatgctttgtatagagaatatgagtcataatagaaagtattaagaaagaacatttgcttacaagccatccagagaaatcactatgaaatattttggtgttctgtcctccttgctgtgtataggtgtgtgttttatggggattatacatttgtgtcctttttttctttttaattttgtaacttagaaggaacgttttctctgtcagtaatcagagtcacctttgtggtaccagcggttccttatgttgacctcacccctctcccttttctaggcgcttcctgtgtattctctcgaaacaaggcacagagactgcagcggactgagccagctcctggctccctcagcacccttccctgttttgtctcctcgctgacatcaccagtcaggagggacgactgtatttaagagcactttactttgctaattatgtttttgttaggactctgtacacctcagcttttgttaagaggtagagccacatatttttgataacaatatatctttgagtgtgctttacacttttagatttatggcatttaataagctgggcaagatcttctttggctgctgcagtcctcctcttgccactgaggtccaggagattcgccatgaggagatgacacagaaccctcaggcagcctcacgtcacctcccagggctcatcccacgagctgttcttcctgctcccacagtagagctgacggcctgcccagttcaagaattagttctgttttcctgccccaaagtagaggaggaacacagtcctctgaaatgtcatctttctttctcctttaaattttactagaaatagtcagtggctgtctgtcttaaagccttgtgagttctgtccgatctttatttctccttttctctgaaccgttgcgttacctatacacattcacgccttcctttattgccgcctcctttactgtgcgttcttgacgtccctttttatgagtgagtggagtgtagatccgtggaaaaaggtgcttctctgccttgcatgagcgctctatgtggaaggtctggggaawacatcgggtggctttgtcaggtgacttattgaggccctctgtcccgctgggccatagttggattgcagtgtaaattaatttcgtctttacaaagattcactcttttgtgtgtgtgtgtgacagagtcttgctgtgttacccaggctggagtgcagtggtgcaatcttggctcactgcaacctcctactcccagggttcaagtgattctcctgcctaagcctctccttaagcgattctcctgcctaaacctgtagctggggctacaggtgtgtgccaccatgcctggctaatttttgtatttttagtagagacagggtttcaccatattggccaggcgggtctccaactcctgacctcaggtgatccacccgccttggcctttcaaagtgctgggattacaggcgtgagccaccacgcccagccaagattcagtctttatagaataaaatttttctcacattttttatcaccttttcttcttttttcctctttttccattgcccgtgtgaagttggcttggattggcatgaaaggggcacttaatcctgaagagagtctactcttctacctaaaaaaaaatattaggacttaaaagaattaggagaaacagtgccttcaaattttatctcccttttcttggatcattttgcctcagattagctgttctttgtgtaaaatactctgggaagtggtgtccagggtgcggggctatggaatcccagtcactgggcagtggggatggaagaccttgctccacgaactccccagtctcctggaaaggctgctggccatccactctgggccccacagggaggattgccatggtgagggcctcccagtccaggggttgacagttaagtctgcagactcagaaccctcagttgtyactcactgcgagtagcaacatctcccaggagtgtagcctttatgtgaatcaagcactgatggtttgaaataaaaaatgtcatcagatttttagaatcagaaagaactttaaagatcacctaatgataatctaaatgcttcctattttatagataaggaaaactgagggaccaagaggtttgtcccagttacatggctgatgaggggcagaaacaggattagaaatagtttctccagtgaccttgacccgtcgtttttgcttatgcattaatgcagactgcaccttggggaaccagcgtctctaactgtagggacctgccaaggtgtaccaatagtrttagggtgccggtttcactgctagaagtttctggagcagttgggtgactaacagtgaggatacaggcctgcatttccactcttcttctaagtcacattctggtcgtggctgtgtgtgtgtgtacacagtggctcaattatggatcactacatcctcaacctcttgggttcgagcagtcctcccacctcagcctccgaaatagctgggactacaagcacacgccgtcacacctggctaattattttttgtagagaagggggttttgctacrttgcccaggttggtctcaaactcctggcctcaagcaatcctcgtgcctgggaggatcttaacccaagaagacaaggaatgcttcttgaaagacattatccaaatgaaatacagtgagagttgctaaatactttgttactagtcttccagttaggacttatccttccagggcaaatgttcagacctgggggccgcacattttcctgaatgcattccaggttggcagcacataagacttcaattgagggggaaggtgggctgttcacctgcccaggtgctttagcccaactctcctgccccaggtgcaccctggacagccaagtgctgtctgtggcactgtaatcagtggcgtatttctccttactctatatttaccaagttgatatactggaaggattccaagagcaagcgagtgatagcagacaactgaatgcagtcatgtctttccatgaaaactgcttttcttggctttcttccaacaatggtaggttgccaagagaaaatgcttttggctttacaaatgatctggccgtagtctggggtggttctggttctttatgtcattgaaaatgataaatatttctggctattcaattatttagcaaacttttgctcttgatgtactgaactgtgttgtttttttacaccttatatgaatttgtggttttacatgtataccaacttgtggagaaagatgctaaaaaaactccagcttgaaaaatatgtcaggttaggctgaagccacatcaaatggaagtttgttgctgtgtcgtggctggcttatgagtggtagttgcatccatttcttttttcgtgggagtgttctttcatgttcagttcttctatgttttggtttaaattttaacccaagaatgttaggctagggtattttaatcatatgtcattattgcttatgatttaagtttgaaataaacaccctgagtttattgttcttaaagctaaaaaacaatgtagaatgaaaactggaaacgcttatgatttaccaggacaattagaaaataatggccttttcagagtatttctacaaatagcaaatgcacaagattgttgttgtcacagtgtttttctgaaaatgtcccataatccaaatgccagtaatcccagccggcctctccctatcgtcctacatgttggaaccactctccaccattacacgttctctgtaaagcattcctttatttcattactgtttaagcatggtcaggaaagaaatcatatgtagtgtagaatgattgctcccaaagctgtctctcacctcctcacccctagtactcactgtcgcagctgctcatcttrgtgcttcgcatataggaacttgtttagttctcacgcaacccttagaggaggtgctgtgatctccattttacagatgataaaaccaaggtgcagagaggtttaagtaaatccctagcaagtggtggagtcgccattcagatatccccagagcccacatagttgaccgcaatggcatgttgcctctatggatgaaattgtatttgtggctgtgttccaataagaaaaatttggttttttcagaaagaggcattgggctgcctttggcccacaggccgcactttgccaccctgttttcatagacagatcctgtctctgtcccggctactggcgtgaggccggtgaacttgaaggagacagagttgcgttaagcggggaggtgatgagcccccgtgcaagggtgaagcctctagtgggggctgtggggagcgtctgctgagttctcaggctgatttagtgtgtccctgccctttccggggggccccttcctcacctataaagtggtaggttttagctagtcttatttctccacttgtctttgcaaagcttattactgaacatcatattttggttcctttttgtgtgtttttgaccagcatcagtgacaccccccaaagcccacttcctctgagtggtctgctgtgtattgtggcttgaggcgtgtcttgaggtgtgaggaaaactgctgaagtagtcagctgctgcaaaaatggacttagtgggctcctcggaaccaccttaaggccaggtgcggtggctcacgcctgtaatcccagccctttgggaggccaaggcgggcggatcacttgaggttaggagtttgagaccagcctggccaacgtggtctttagtaaagatggggaaaccccatctctactaaaaatacaaaaattagccaggcgtggtggcacgcgcctgtagtcccagctactcaggaggctgagacgggagaatcgcttgaaccagggaggcagaggttgcagtgagctgggacggtgccactacactccagcctgggcaacaagagtgagactccatctcaaaaaaaaaaaaaaaaaaaargaaaagaaaacctaaacatcaaactcggcacttgttgcactgagagtttctgatggcctggccgactctaggtcaagttctgcgtcgcagtgccatttctggccgtcctcctccccggccccccattggtcacatggtggccccctcaggtgcatactcataagtggttatggtcaaccccttcttgtgagtgtgcacttcaaaatgacgtttggagatgaaaactgggggagtttgtttgtcggagtggttgttcttatgagtggttgatgtctctggaagtggactatttgcaaaggctcccatacatggctcagggttgtgtgagatgaggaaccagcttgcccttccctgaaaatgaggggcatggaggaagtttccttcctccaaggacaggtattcttaatctttaggagatcttagagtgaccctcagaaatgaacatcacacaaaattgtgaactggtgcccacccaaatgctccctcccctgcccccatggactgcctggcccattgcctccccccagtggagtttggcctgcaaagaacgtgtttctctgaccttttcgacagaagagccagaaaatggatgcttggcttgctactattgtagaaacctgttctggggaaatacttctattttgatgatttcttctataacctttcagtctaaaccccttttcaatatcaggagtttttctgatgatattgaaggacttgacttgacttttctctctccttaaacccttaattagtttttggatttccatttactaacttttttacgagactagatctcacttgagagaagggggagttaggtgagtagtagagagattctcctggttagtgagtggagagaatctttctggtctttctgagcctggagcttgttttcttactaatgttttgatagctgtcatatcattacaagtagaaaatgatagtatttgtcccacacactgaggtaaacagaggaggctgttggcagccagaagtgaccatggaggctgatgggtcagtaattctgtgtgcaagtggaaagctctgggtaagggcatgagtggggccttgtaccaaagtcagggttttcctggcccaaagatgtagcacagaggacccattttatagccagactggacttgtgtatctgctgtgatcacacacacccgtttcaccattctgaaaaccaactccgaaggcctgttctcgttctgcccgacttttcagcatgggaaagtagctgtccactcctgtccactccaactggtagctgagatccttgtttggaagttttgaagatagaaagggcactgttcctgctgcctcttccgatgccccctccagccattgctgaccctctttgtgccttgactttggtcacttgttcgtggttctttgaccacctccttcctggctctattcctaggggctgcgtggcatggtggtgctttggcgtgttcattcatttgggtccttccgctgcatccctggtatgttgcaggggatgcagagaatgttccaggaaggtgagaagttttatcctagttttgtgaccaaaacaggttcaggatagattattacaaacatttatgtgacagataatcctctagagccgtgtggtactttgtactttccgtggtacccatgtctgctggagtagatggacagtcacagtctgccttttccctcctctttgttgatcatggtcactcacctacttgccagacagttcagacccgcagccacaggatttaatggatgggctaggctcagcaccaggatttgctgcaggtgcctctttgtattgttcttgggttttgagctgaacttaaagaggaatttcctcatcagagctcacactgcagtcatgttaaggctaatccagtttcacccccattctttcttgggggcagtggttggagttggggaaacctcaggatctggcttcaatatttttcttatcatacacagggactatgcattacatatttttactctctgagtgaagtgatagaaaacagaagtaggttctcaaacagttaattgattgatacgcttggtcacaatgctttttaatgggaaacctgggagagctgtgaggcattgtttaatttagtttcattatggaagctcttgttctttttttgggtacttactatagttaacttttcctattttctgagattaaacttgaattaaatgcttaaaggagttctgttaggaagaacagagtaaaagaaacttctaatatgtatgggctgttgttgaatgaggcagaatataaatactttatgggttttaatttgttaatatataaattttactattaactgaacagttgcctattctctgttctgcttttttarttttatttaaaagagtgtatggaatacaaaaaaaaagaatgaataagactttgtatttgctagcacaacagggtgactattcaaaaataatttaattctacatttttaaataactgaaagactgtaattggattgtttataacacaaaggataaatgcttgaggtgacggacaccccatttaacctgggtgtgattattacacagtgcatgcctgtaaaaaaaactcatgtaacccataaatatatatacctactatgtacctcccaaaattaaaaatgaaaaaactttttaaaagattatatagaggttctctagcagcattaaaccaaatcctgatgaacctccattgaaaataaagccagctttacaaaaaaaaaaaaaaawtttttttttttttttttttgagatggagtctcccctctgtcatccaggctggagtgcagtggcaagatctcagctcactgcattttctgcctcccgggttcaagcagtttattctggctcatcgtgggattatacgcacgcaccaccatgcctagctaatttttgtatttttagtagagatggagtttcaccatgttggccaggctggtctcgaactgctgaccttaagtgatccgcctgccttagcctcccaaagtgctggaattacaggcatgagcacccagcctaccaaactattatcaagtacctgttgggacgtttaaagaaatgtagattttcattaattagcgttagacatcttgattttagtatttcattttgggcattggtcctaagaagtatatgttagcctagggtgggggaccacagtgctcagtttgrttaatggagaatagatatatactaggaattcagaaatctagaatctctagaagcaaatggtttttattcataastgcaggctaggaccagtgcatggctcttgagttctgccaggaggtggtttggcaccaggaggtagccttgcctgggcaatgagcagtgataccctgtgagagagctgacctctttagcctggttattaactttctctgataaggagaggctggggctggccctggtgccagagatttgaaccctaacctcctgcatgtagcctgggttttgtttttatcataggctaaagacgggaattttttcccctatttttgagaattgtgtagatccctatgagctggacgttccttacataccgttcatgatctttgacttgccatcttttttaccttgtgagaatcaaggtaaaaacttgttgagastgtttccttcactctcttatctgatggccaagaagaaaaggtacamacacgtttttgatgaaatctgtcagagcgcttccaaacactgggttaccctttgaaattgaccagttatggccaggcgtggtggcttatacctgtaatcccaacacctggggaggcttgaggtgtatggatcacttgaggccaggagtttgaggccagcgtggccaacatggtaaaaccctgtctctactaaaaaatacaaaaatttgctgggtgtggtggtgcatgcctgtgaactcaactacttgggaggctgagacacgagaattgcttgaatctgggaggcggaggttgcagggagctgaaatcatgccactgcattccagcctaggcaacagaacgagactctgtctcaaacacacacacacacacacacacacacacacacacacacacacacacacacacacagaacgagactctgtctcaaamacacacacacacacacacacacacacacactaaacaacattgaccagttagaaaagggccccaggccaggcaagtattacccatctgatcacacactcatactcaccctggcagggctatcttaggaaaattgtcaaaatatctgggaagttttggaaataaactttctgaagcaagtcaggtgaactttgaggtccacagagcacactggcctcttggtacttaggtcccctcttctctggagccaggktgcctgggcatttggtgtggaaggaagatggttacctgttcccttccccaccccttcagctgtcacccactttggtttgtcaatgctgggcctaattaattagaaacttccaaaagacgttgattttttgtttgtttgtttgtcaaattggttgacataaggtgtgagctccgtgacaagtgggaaatgcatctacgcagcctcagaactgggcttggctcataccaggcacttggtgaataccagttgacttcgaggatgaattgatcgagggaaaatgastgygggtgttctgtcatattttgtccgaagtcagaaatttaggaactgggggaaaaaaaactatattttttgttgttgttcgtgttgttgtattcaaattctaggcttctaagaamaatgtttcagcggtttggttatatgtaataagacaaattctgagagtmgtaagtgttccatggaattaatttagtatagtggtttctgaaaatataaattcctgcttcaattaagtttcagatgacagttgaaggaagcttcttgcaaatcagaaatgtgcttaatatttatcgagctaccatcttgcctagattaagtcatttgaactcgaaattgagtctggtttgtggacttgcagaagaattagtgtctcagttcacttaagtagagcacctagtggtgacaagaatgtgattgctttccaaaaggtgagaaatgtcacctaggaggactacatggggaaggaaatcacctgcgtatgaaatgcacagagctagaactttctggttatactcctttggtttttatttgtgtttctgtacaggcatttcagcagaaagggccagttgtgttgagtgttgatttgtttgtagcctagacttttagagctgaaagaaataatacgatccatcttgttcaagacactcatcttacaggcgaggagtttgaagtccatagaaggaatgttaagttacccagagtggacatgctggcgtggcagtcaccaggtgaggctgatggagagaactgagctatgatttcttaactggaaactcacccctgggaggttttccctatgcggggaccttcccagtccatcaaactgaccactactccagaaatacagaacacacaatagacagaaggtggaataytagagctttgcaaaaaagcaaagacaggcagcccaagcatccagtttcttaattagtcgttgtttctccacagggagaaagataagcactgggatattgccatggcaattcctgaattgacctgtggaggctggagctgggggtcatcagggaacttggcccacatctgttgatggaaggarttccagttggttgcaggccctcayggaagcatagctgagggttcctctttcccattcctgcctttatctagtatatatttgatttcagtgcactttaattttataaaaaactttattatggaaaattttaggccgggcgcagtggctcacacctgtaatcccagtacattgggaggccaaggtgggcggatcacctgaggtcaggagttcaagaccagcttggccaacatgatgaaactttgtctctactaaaaatacaaaaattagctgggtgtgatggcacgagcccataatcccagctactcaggaggctgaggcaggagaattgcttgaacctgggagagggaggtttcagtgagccgagatcacgccactgcactccagcctgggtgacagagtgacacactctcaaaaaatataaataaatacataaattttacacctgtacagtggtagagaggatactataacctctctgtacccatcgcctactgcttggttagtgattatcagtaccttaccaggctctctccatctatgcccttttcctgccacctcctcctgcccagtggattagaggtgacccttaagcaactcaggggttaagggtgctgaccctgccagtcgaaaatctgcttgtaaccttttgactccataaaagtttaactactactaatcccctgctgttgatcagaagccttaccaatagcatacacatttgcttaacacaaatttcatgttttatgtgttatatactgtatctttacagtgaagtaagctagagaaaagaaaacgttattaggaaaaccgtaaggggccgggcacggtggctcatgcctgtaatccgagcactttgggaggccaaggtggatggatcacctgaggtcaggagtttgagaacagcctggccagcatgatgaaaccgtgtctctactaaaaatacaaaaaaattagccggacctggtggcacgtgcctgtagtaccagctactcaggaggctgaggcaagagaatcgcttgaacccaggcggtagaggttggcagtgagccgagacagctccactgcactccagcctaggcgacagagcaagatgctgtctctattaaaataaataaataaaaccataaggaaaagaaaatatatgtaccattcattaagtgaaagtgggtcatcatcaaggtcttcatcctcattgtcttcacgttgaggaggatgaggaggtgctggtcttgatctcttggttggcagaggctgaggagtttgaagaggagcaggagagattgaaaaatatttccatatatgtagacccatgcagttcaaacccatgttggtcatgggtcaggtgtattttaaaggagatcccaggtgttgtatcatttcattgcaatatttccactgtgtgttttgaactaatggaaacttrgttcaaatctgatggggaacctaacagaaactagatacctatagagtaattaaggattaaactgaaagaattccccttgggtagcagctttggaaggttttgttttccaaatgactttcttcgggtgttggtgccattgttggggcaggagggattgagtgaggagagtggctgagggtggggggaaacagctcgtctacttgcgggatggggtttagggtgaggagagagtggctgctaggagctgcttcatgagccttctgcttggagcatgtgaacctgataatgaaccttgaatttatcattgcaatgagtatttcataggaaactgtgtgagcatttcccaggcccttccttttatattgactgcgtcaccacagctgatgttacctcttttttgtttcagatgggaataactgggaacacaagtccatttggacagccctttagtcaagctggagggcagccaatgggagccactggagtgaacccccagttagccagcaaacagagcatggtcaacagtttgcccaccttccctacagayatcaagaatacttcagtcaccaacgtgccaaatatggtaagttacccttggccctcagtgttatggctctccggtgggtgctgtggtctgtggatttttaycattctcacagtgaaagtctataactaaaagtgtgtcagtaggtgataggaagagaacccagatttctcatgagtagctctctaaatgagtttaacattttctgtgatgagctagcaacaggagagataggtgaggatgattcagccgctcttcccaggctccttttgttgatggagagaattcacgtgcacgaatcactttacctttctctccagaatcatgagaaccagagacactggcttttcttacacttcctgtttgttagtggcttgatgatgtcagtagaagcccattgatttgtattaccgtcagatgatggacatttatcttccaaagacaatactctgttgatgagatgcatattacgtccaacacaatagatgattccacgtgtcttcatcctccctgaggtttgaagggattttatagatgggaaatctrtaaaatgggaattatccttatcacttctcaacctgatgaaycaagatattaatgggaaaatatctccttttgcaccaccaaataatagaatctcttttatttcaaaacactgaggggtagtgcgttcttttgtccrgcctctcttgttcacccccagtgctgcatgtctggtgtgctcttggtggtgggtgaggaccacaagcagccatctctccccactgtgcttgttgctgagagcctgaccttcccagctgccatagtgatttgggaagatcacaagaaagtgagaggattatgttcagaaaaagttgctttttgtctttcggttttttatgctttttattttgaagtatttgttgtaaagatagcacagagaattcctatatatctttcacctcatccagcttcctctgatgcatcttacataaccttggtcttttctcaaaactaagtaattaacattgcttacagtgcttagaagttttgaggttgctgggaagcagagagagccagatctctttatttacttgtttgataaaatcaggaaatgggaataatgaggtgtcctgtcaggtgctggctccctgctgtatggtacctccatttaaaaaggtggttgaggccgggcgtggtggctcacacctgtaatgccagcactttgggaggctgaggcgggtggatcactaggtcaggagttcgaggccaggctggccaagatgatgaaaccccgtctctgctaaaaatacaaaaattagccgggcatggtggcgggcacctgtaattccagctactcaggaggctgaggcaagagaatcgcttgaacctgggaggtggaggttgcagtgagcggagatcgcrccactgcactctagcctgggtggcagagcaagactctgtctcaaaaaaaaaaaaggtggttgggtatgtacaagtaacaaaacttgctctcaaaactgtgaaaacaacctaaagttcttaggacttctttatttcttctgataatccccttgtaactttccttgatatgcttctttctttccaataactttttgttgccaggattgtcctgttcctgatagtgcaggtccagaacctgaaacagagcccagaggaccctaggtcagcccctcaagttcagggaacggtactgacctgcataatgctgggctctggcaccacacagatcccgttctctcctgtgcttccttttccagtcctcaccgaaaggacagtagtgtggactctggggttagctgtcatcgattatgcctgctcagtaaccaggagcacattttggcttcatagtgaaagcatttgctttttccaagacttcttgtgttttacagtcagggaaaccctgacctaacattttgctcccttttctcttttaaaatattctccagccccacttccccatcccctctcctttatctacaacttagtgacagaatctgtgctccgggcccctctgctgcctccactgctgctccagagggctgaacttggcagatgtggtatgcttgtcaagggcagtttctgcccgggactgcaaagaggctgctcattcccttcacctgcagcagggctggagccgtttggtctggggcaggctcccctctgcctctgcactgatggcagttctctgctgtgagccggttgtgccccagaggatgttgggcagcatccctggccctacccactgggtgcttacagccttctcctctaagccatgataatcaaaaatggctcaaggcaccaacatatgttctccagggcatagtcgcccctagttaaaaactcctgctctggagaactggagagtaattaggagaagcagtagcaacagcatctcatccttttgcttgtcttccagacatctgacaaaagtagaaccacttcttttcctctctgcctctctctctcccccgctgccccccccttctttcatccctccctctccccttctctccccaccccctctctttctctctccctctcttcctgtttcttggtctgtctctgatcttctcagggtaaactgagaaagcatttttgtccatgggaactgcattggttgcctggtggccactgtctcacaagaacccctgtggactttgagacagatccacaaatgcctgttgggggtaaactgaatgacaccactgaccctggagggcacagatcagatggggctgtgcccacgtgtgcctttgtgaggcagcctgacccaggaacagccttcagtgctccacatagtggtaggaaccagaggggctggtgggaaagtggggtaccagcacacatggtctccccaacatctttctaggtaatttttaacatattcctgcaatagcctcttgagagacatcattccaggtcccattttacagctgagcaagttgagactctgaggagtttgggttgttcaaagctatgtagcttcctgtttgcaaagcctgaaactcttcagttatgttctgaggtcatgtttttgcagccctgagcctgccgggaatgcttcaccagcccgtgcttacacagtttgtctgcagttcctcagatgtgttttgtagtctttttgaattttgaaaattatatctggcctcaaaacccacagacttttgcatactgagggcaaacacttacaaagaaatctaggtctatttactgaaaaaatgaggtgtcaaacatatttgcatttattgtcatgctttagggggtacccaactaaatttggtgtcccaaacaatcccagtcaggactccagtgccaaatcacctggtgccctctgcagctctttcctggagtgatttagccacgtggtcttgggccagggagctcttgttcctctcccctcctagtttctataggartccaacactgggtagcattgaggaagggaaggatatgatcattcaattaatttgtcacatgtgttgaaagccttttgtgggctcaggtgctggagtcggctccccagaaggcaactgggagtgacacagagctcactccacttttgtgaaatggaaggtgtagtggccacggaaaacaaatcgttacamactgctccaagaggtctgcgtagcactcagcggttcagattgtcatagggacctctttagatggagccatcagagaaggccacattgaggaaggagatttaaaggcaagattggaaagttgagaagaagccacagwgaccccagggtattgggacagcactggcttgcgtaggaactggtagaagtccagaaaggccaccatgagggaagggagcagggcgtgagtggaagttgggggttgagcaggaaccatttcagggggccttggagggaagatgggccatcggcttacagggtggggtgtgatgcaggaagttgaagccactttagctgagtgaggaggagaagttcaagggcgatccttctggaagtggaacccacctgattcttggtgacgtcttgcttaagctttggattgggctttctgacattttcacaaaatgccgtgtagaagtgggatacgtcttagactgagaacattcagtgaccagaggggcctcatcttcaggttctcccacgtggtctcctgcaagagttatttctaatgtggagttcgtaggtgtgatttttttttttttttaagaactgcrttatggagacttcaccattaaagttgagatgcaggagattcatcagtagtgctgcttatttaaaattgctcatgagtgatgttacgatttgttgtgactgagtttcagaattttggagtggaggttgtggacagggcccacggcagctgctgatctacgtctctgaatggaagggtggtgtggctggaagactgtgtagacgggaggatgggagagtggtcttctgtgtcctgccagaatatcacagctgcggcagtgacactggtagcacctgagcggcaagccatgtgctaggatgccctccagggccccctgtgtccaggggttcattccattgctgtgtctcagcacctgtccatggccccacctgcatccgagtgactggcagttcctgggcctcacccagtcctcccgattcacaatctcttaggacgaaggtgcagaatctgtgtcttgtagtcactcttaacttgtgaaacttcagcttttttctttctcaatttcccaattccacctaattccctctaattataactcagataattcttaaatacatgggcttgcggttctttgtgttctgctggaactcgtggttttacatgagctggtctagtgattctgatgtggaataaagatcatgaaagccactgtccactgacaccatgagccattggcattgtgaccagctgtcccactgtggagtggacttactttgttggtcttcatgtccactttagtacttcagaaggcttcactaatcttcccccactccccaaccttgtttgtcatattttsataattttctgtcccctgtctagattgtgatcattgagggagcaagacttaaactggctgcatagggttaagcttcgtgaacgccaggatctctctctgttgtcgtctttgatgagctcctcttagttttggtttccttgcacaaatgcctgtgttccctaacattatacacaagctcctttcactgcacaagtagaaattgtaaaatcactgcttgtctaatacctccctctatcctaggactaaagagagtccttacagagttctgtggagacggcaggtgaatagtcatgtcatctctttaccataacagtgtctatagaaaaattacactatgattatgaattgtgtctcactaattgaactggaaaacgtggggaaggtttggaagtaagcccttgtctataattattagtgatttaagtgtttgtgtattcttaagagtttacatctattgactccatctgtatcttgaagatcactgagaaaacatgtatgcagggccttcaaatgccgctaagtataaatcttctattcaaacttatccccgttggttttggcaataagtatcagctgggaaacataatttaagcacaaaataatgatacgtgatgtgttgcaaatgagaagaaactataaattgagagaaagtagcgagtcctttggtattaggggtagccccacatattacaaggcctcagtcaaggtcatttaacttactttccagtatgggtttcccattaaccagcagtatcttttctagagtctgattagtataatcctttcttcagcaaaacctcctaggtggaagcataaatcatctcaaagatactcatgtaaagtggaggcctagccagaaggttttttttgttttgttttttgtctacacaagatgtgctgcatacttactaacagccagcattgcagcctctgcctgcctgctggaagtgtataatgaggatagcaggcatttctgagaaatgaagtgacttttagaagaaccgagtaaatacaccgcagtagtcctgcaagaagcaacaactcagtaaacagcacaggtcatgggtctgggtgaggtcagtcgtagctagcagtaatgcgaatataatacttcacttcctctggagcggtgtgagctacatcagtctctgcacagcccaaatcaccctaacttccttttaccttttccacaaccctttgagatggccctgaggttcacgtcaccaaaaagacagtctgtccagtaactaatttgccaagttatcaaaaaattgtgtaaatttttgtttatgttcctttttttccctctaatccttagaacctgtaaatgtcgtaagtattcttgaagaatacatatgtatatatcaacagtattcaagaagagtattctaaaaactttaagtttttagtaaattggtaattctcttgaacttggtcattcgactcctggtctggtccagcagtcactttgaccgtaggaatagatctggtgccttctatcttctatcttgcaggttgtcttttttgttgtttctttggttggttggtcgggtgattttttttttttaagctggggtctcactgtcaccccatttggagtgcagtggtgtagtcttcagctcactgcatcctcttcctcccaggctcaagcgatcctcccacttcagcccccgagtagcttggaccacaggcacgtgccaccatgcacagcaaattttttgtattttttttggtagagacaggtttcgccatgttgctgaggctggtctcaaactcctgagctcaggagatccacccacctgggcctcccaaagtgctagcatcacaggtgtgagccacctctcccggccaccttataggttttctttgtgctgtaacaagtaactcccaccccttctaggtagaatgctgggttctgaaggctgtggctgtgggtccaggaagagagtggggagggagtggcaagtccctcgcccttggccacatttcttaccctgagccttggccttgggctcaggctttcctgctccccttagccatttgctttctactttaaatcacagctttaagattacttataaatcattctggattatttccctattgaatttagatgttttgttttttttgttgttgttgttgttgagagagagtctcgatctgtcgcccaggctagagtgcagtggcgcgatcttggctcactgccacctctgcctcccaggttcaagctattctcctgcctcagccttccgagtagttgggattacaggcgcccgccaccgcacctggctaatttttgtatttttagtggagacagggtttcggcatgttggccaggctggtcttgaactcctgacctcgtgatccacccccccccccccccccccgccgtcagcctcccaaagtgctgggattacaggcgtgagccaccttgcccggcctgaatttagatcttaaattttaagataatcttatttttttaaaaaaaatcaataaacacaaagcaaaaagaagaaaacacaagaaacatttcctctatgaaaatagctatgttgtgtttcttaccagtttatcacctctgaggtgattatcgcttcttcccaggttggcagctgtgtacatttaatgagcattttctttgttttatggcgccacagctttgcatacccagctgttgtaggtccttatgagggaacctgagcaagtggttattgcagagccagcccttgttctgcctgatgttcgctttggtatcgttttctgattctaggtggaggttgtggaggagtcaggtttccaggtgggtgggggagtatccgaggagcataggtttggaccctgttgcgatgtggaaggttgaggacgagcagcaggaatcccagcctggtgtggatccggggcattggctgcacagaggggtgacactgtccttccttgttctttcttggtcagtctcttgctgtttggaacacagggtcctttgaagacatgataacctactcttggacacacagtaaaaaatgacttatttttttgtgaggaatgtgaggataagcgttattatccacattctgtatgcacatctctgttatgtccttagcatagaatacaggcactataggaaaaatggcattggggctaaattacccaaaacctatgtagcaataacagtcctaataaaaatgcatgttagattcttttaaaatttaaggaataggctgggcgcggtggctcactcctgtaatcccagcactttgggaggccaaggcgggtggatcacttgaagtcaggagtttgagaccagtctggctaacacggtaaagccccgtctctactaaaaatacaaaaattagtcaggtgtggtggcacacgtctgtaagtccagctacttgggagggtgagacaggagaattgcttgaatctgggaggcagaggttgcagtgagccgagatcatgctattgcactccagcctgggtgacagagcgagactctgtcacaaaaaaaaaaaaaaaaaaaaaaaaaaaaaaaaaaattaaggaataccagagtaaatataaagagtttgcttttaaaggtagtttgacagtggagtatacacagtggttgaggctgccaattatgtaataagcaacacatgcaaagagcctgtggctaaaccgagtgaagatgatgggtggggtgagtgggctcagtgagctttgtgttaacctccctttactcagtggctcaaaatagtaacaggcaggggagactaaggtttaaaccagtatggctctcacaccatactcacctcctccttccacattacaaattgcatgtgaaatgatcctcgctccagaaacacatattgcatatattttaaggcttctgacagataccattatagtgctttccatcaaaagccatgtacccgattaccagcatcacaccatcttcccaaggctagggactgttaccccgttcttctgtttttttttagacagaatgttgctcttgttgcacaagctggagtgcagtggcgcaatctctgctcactgacgcctccacttcctgggttcaagcgattcttttgcctcagcctcccgagtagctgggattacaggtgtgcgccaccacacccagctaattttttatatttttagtagaaatggggtttcaccatgttagttaggctggtctcaaactgctgacctcaagtgatctgcccacctcggcctcccaaagggctggattacaggtgtgagctgctgcacccagcccaccctgtcctttaataggagaaaatgatgtcatcttactttgatgagcatttctctcatgagtaagatttaaagtgcttatgtttagagacataggcatttatttgagttgctttggtcctgttgttcaccagttttcctgtcagattctcttagaacactttataatgcaaggtggtcagccctctgtggaggaggggcacagagagctgcaggattggggctttgctgctagttggttggctcatcacccaggcaaggccctttccttggggcctcagttacttcacctgtcgtgtgtggctagtccccagagtactcttccctcggggatgtgtgtgtcttcaatgaactgctgtaccttggaccctgaacacagagcctggcacagagtgaggaataaagatggactgggaggagaaaaaataatagctccatcatgatttgttttgtcttgtgtctttcagatttaatttttcctagttcataaatggcccttacacttgttcctagtgattttagtcatagaaagaatgccagtctttatgtaatctagcctctcacacctatttaattgtacagtcttctcctgcattggagtcgcccatggggcttttgttcttttttctcttttctcaatgtttttgattttgtttttgtctttttttagcaacagggtcttgctatgttgcccaggctggggtacagtggcaattcacaagcacagtcgtgggagactatagcattgatctcctgggctccagcagttctcccacctttgcctcctgagtagctgggactacaggtgtaccaccactcctggcttcttaaatgtctttattctcattgtaaaggcacatatatgttaattttggaaaaattgggaaaagtctaaattaaaaaaacaaagcaggctcgtctcttaggggaaaaatgagaggatctgtattttaagaatttttactggaaggccgggtgcaatggctcatagctataatcccagcactttgggaggccaaggcgagataattgcttctgcccaggagttcaagaccagctcgaacaacatggcaagactctgtctctacaaaaaattttaaaacttagctgggcgtcgtgatgcacacttgtcatctcagctactcaggaagctgaggtgagaggatcgcttgagcccaggagggtgagactgtgtgagccatgattgcactacttcacttcagcctgggtagcagtgagaccctgtctccaaaaataaaaagaatttttactggtaatagtgaggaacactgctttatgttctgtgactaaagcctttactgcctttacgtaacaaagtacccaccttaattaccttcccatacttttacaatttaattttttatatttagttcctcatcattttcttactgattcgtctgattttgttttctcgggaatttccccccaaaatggaatgctttttggtattaaaatagtagtcacttaaacagctttttgttaaagcataaaggtctgccttattgttgttagtaattcgttgccttaaataacagtcattggatgttttctcccacaaattcagacagggcttggctggcccattcccctgctccacatggctttgacaggggttatttgaggtctgccttatttttcatgggtgcctcttgtttcattataagtctgtagccataggatgtttaattagtccacctttaatagacatttagaattttttccagttttcaatatttaatcagaatgtgatgcattatctttgcacacatattttaacatacttgtccaattacttccttaacaatgaatcatgagaagtggagttactgtcaaaagaaatgcatgtttttctttttgatacatgttgctttccaaaattacaccgaattgccagagtacttgagaattgccatttctttatatcctcatcaataccaattagcattttttaaatcttggccatatagatagattaaacatgcctcattgttttatttctattcctttagtgattagtaagaactttttaaaaacagctttttaagatataattcatgtaccatatagtccttgcttcaagtgtacagttgagtggtatttagtatattgtgtaaccatcaccacagtcaattctgaaacattttcaccactccaaagagaaacctagtaccattagcagttattccccatttcccctgaacccccatctccagccaaccgctagtctttctacccccatggatgtatctattctgggcatttcctagaaattgaatcacagaatatgtggtcttttgtgactggcttcttttacgaagcatgttttcggagttcatgttgtagtatgtgtggttacttccctttttacggttgaataatattccgttttggttatacaccgtgttttgtttttcccttcatcacttgatgggcatttgaattgtatccactttttggctatttgtaaaaggctgttgtgaacattttttacagttttcgtgtgaacgtgcattttcagttcttttggttgtatacctaaaataggaattgcagaggtcatgtggtaattttatgtttgaccttttgaggaattgccagactgttttccagagtggctgctgccttctacattcccacaccaatgtatgaggattccaggttctccacgtcctggccaccctgttgctattggttagcatttgactttttattatagccatgtggtgggtgtgaagtggtatctcactgtggtcttaacttgcatttccctaatggctaataaggttcaacatcttttcatgtgcttattggccattcgtgtatcttctttgcataaataactgttcagagctttcacttattttttaattgggctattagtctttttattactgagttgtaagagtttttaaaatatgttctagatgcaagtgctttatcagacctatgatttgcaaatattttctctttcactttccactttcacagttcattattttgtaatggtatcctttgaagcataaaagtttaattttttatgaaatcagtttatttttcttttatcacttgcacttttggtgacgtagtaagaaactgcctaatccaaggtcgtgaagatttattctcggttttcttctgtgaatggtacgattgtcactcttacgttgaagtgtttgctccaccttgagttcatttttgagtgggaggtagagaggaggctgcctgcatccttctgcctgggctgtccagtgcctgtgctcctcctcattgtcattgagaaacgatccctccctcccttgtgttgcctcagcaccaaggtgtagaacatttttgtrtttgtcgtttctttgtgttttgtgaggtgtctgcattttctttgcccaattttttagtgggatagtatcctttctttcctgagagcatttgcataaaagatcaaccaatttgctcgcagtttttcactttttaaactccattatgtgtttatgttaagaaggctttctcatcctcatgtcctaaaagtttttaaatttttttctccattttaagccatttttattcactttagttcatgtgaatttttttttttttaaataaaagggaagataaggatcaaagatgcctcaccactcttgaatgtaaagcaccacctttaggagacaatcgtcctctcttatctggggtttcactttctggggtttcacttaccagcaatcacaaaataagtgagtgcagtacaataaggtgtttagagagagagagagagagaccacattcatgtagcttttattacagtgtattgttagtaatggttctatttcattattagttaatgttaatctcttactatacctaatttataaattaaactttatcataggtgtgtgtataggaaataatacagtatatataggattcagtactatctgaagtttcaggcatccactgggagttggaacctgaactctgaggataaggggggacttctatatgctaatttgatatacacctatgtctgtttctggacttaagtaaagaaattagctttatagtatgtttcagtatctggcaatatagattgcccctttatttttactgtttttcaaaattttcttggctcttagaaaaacaaaatcacacaaaacgtagattacttttggggcagcttccaccacgatggctttgttctgtgctttaaagggaggttccgaagtactctccctccatcctcagtgcctgcctgccagtgggaactgggcagggaggttgggaaagtctgaaggatgcttctgacagatttgggggccacctgcagttcacatctaactctcatggctcattgaacaccagcctgggagaggaggaaattaagtgtgcccctgtatttgtaagtactttgcaaaactaagctagtcccagacaaatatacagaattccatggggaaagacagagacagggacataagacattttccattccactgttgattcaccctcagaatggcttttgagatgcatgttgtaaacaatatgtagagctcattaaactgtgcatttgtcctccatccagaggtagacaaataacagaacaaattttaaatttgccatrtagtttccaaccatcctgttttgacatatggtcaggtgtagtgcaaaagacactattaaaaatacatgccaggctgggcgtggtggctcatgcctgtaatctcagcactttgggaggctgaggtgtgccggtctctttaggtcaggagttcaagaccagcttggccaacatggtgaaaccccatctctactaaaaatacaaaaagtagccaggcgtggtggtgggcatctgtaatcccagctacttgggaggctgaggcaggagaatcgcttgaacccaggaggcagaggttgcagtaagctgaggtggcgccactgcactccagcttaggcgatagagtgagactcccgtctcaaaaaaaaaaaaaaaagtacaagccagttaggtggcaccacacatctgtgatcccagctacatgggaggctgaggtgggaagatcagttgagcccaggaggccagcctgggcaacatagcaagaccttgtctctgaaattttaaaaaaagaatatttttaagtcccaaatgaaatcagtgtgttaattgttggtgaattaagaacagtctggttataatttacttgtagagctaaattttttgcctaatttttatataatttttttggtatgtgatatttctgtactttaagacacagtgagaggacaactgtgtggtctcttcaacaaggtagtgtcaggagtaaaaaaagggaagatacaatagattaagaaccttaaaaacaaccaaatacaggatgtgggccttcttggggtcctgatttgtgaacaccagctctaaaagacatgttttggacaaccagagaaattgggatatgactcagtattagctgatgcccaagaaggatggttctttttcttaggtgtaaggatgatatcctttcctttccatttttctgtatgtttgaaattttcataaacgtaaaagaaagagtcctaaatgaggctcattttgtgtttctcccattcctccatatctccattcctgttgatttctcgatggaccttccaatccacagggataagccagttgagcagtggacttaacaccagtactgcatgcttgcaggggcagctcaaggcctgtttgcttactgaagctttatttacagttataaaaaataaaggaggggccagggattccagtttatgccccataacaagaactagttaaatgagtataaagttaaaagagtaacatgctgttcattacaagtcattccagcccactatctgagacagtttagtggtatggggcagaacatggaaaaaacactaagcaaaacatgtgtgttgcaggggagatacgaggctctattgattatggttcatacgtaaacatttatatagaaaaaagaagggaaaaaaacctatcaacgctttagtagtggactcctggataatgggattttaattgttgttaattatttctgtagtagttctctagctttccaaatttcctgcagtgtatatatatacttytataatcaggraaaaataaacataagaggctattttctcttaggagttgagccctgcattcatggtgttctgcttctcagctaggatgctgattttgctttgggtccttctcagaattgctttgggtccttctcagacttccaagagttttgctcccaagcccagccacccagcttttctacgtacttattttctagttctcataaaggtaaaatcaaaacagaaaactctataaacttttaaaagtgagctttgattcattaaaaattatttgtatagttttctctcctctttgtgaatatacagttttgattcatacatttttaaaaaatccgagtggcgtactttaggggaggtaatgagggtcgtggaagcaagctggaaatatcagagtactagagaaaattggaaatcccggaactgtggatgatactgttgcacattaggaacacttctcttactgcctaagtctttttcagtaagtttatctgaagaatgcttatagtttgtaaagaagaagactctatgggtccccttttccatttgccttgctgttaaaaggtttgtttggtctggcttgttatttcaggcaactgaaagcaaaccctttctgtatttttagcagatcaccaaatctttaaaaattgtcagctgtctgagtggaaattgtaatgaaaaacaaagcataggacaagaatgcatttcccattgcactgggtggttgtattaaggctaactgtcattattcttttaggagaggtaatggttgctgtgaaatcaagctgcacgcattgtccttctagtcatgygataatgaaatccaaaaggtggctctgattctttttgctacatcaaatgtttgtagtacattgcaattggtcaggccttggcaaatctttttttttttttttttttttttttttttttttttgagacggagtctcgatctgtcgcccaggctggagtgcggtggcgccatctcagctcactgcaagctccgcctcccgggttcacaccattctcctgcctcagcctcccgagtaggtgggactacaggcacccgccaccacgcctatagtcctaattttttctgttttttagtagagatgaggtctcatcgtgttagccagggtggtcccgatctcctgacctcgtgatccgcctgcctcggcctcccagagtgctgagattacaggcgtgagccaacgcgctcggccaggccttggcaatctttttaattaggttgtaccctatgaaattgccagtgtttggccatttgggacctacagaaacagcagtttcatatggtccagctggtatagtacacagcttttcctgtagttgtgtatattgtagagtgagttggattttggttgctacagtgaagagccagccrttgtcttgcttggatgataattgtatacaagtgaacttgaatcagccttgctgctgagttgggttgatttctgtgctgctggatcttcttaaagtcatcagtgggttagagaactacaccagccttctctctgtggtcggtattatccatcagcttttgcttttgtttgagaaataattaatgaatatgacttggaactctgagaggttaaagtatttttattattttgctttattttagtctcagatgcaaacatcagtgggaattgtacccacacaagcaattgcaacaggccccactgcagatcctgaaaaacgcaaactgatacagcagyagctggttctactgcttcatgctcataagtgtcagagaygagagcaagcaaacggagaggttcgggcctgctcgctcccgcattgtcgaaccatgaaaaacgttttgaatcacatgacgcattgtcaggctgggaaagcctgccaaggtaagtgctgtttttggaactcctagtggtagaggtcaggaagaatttgcctttattgttcttacagcagctctctggttcataaggctccggcagcctgagtgctgccttccaytgggtgtggcaagacatgttgcgctcacgttccccacgcgacgacagtcaggtgctccaggaagtcttatctgctgaagagaaaggcgatttggttttctgatactctgtgaacttctgctgcttgaagctgtgccccgtatttgttcttttcctccttcctctgtcacggaagacattggtcacttcttgagcactgtctttgttgtgaatgtctagattgtggttttcttttggggcartgaacatagcacaggcacgtgcaggcacacgcccttcctgcatcccaacatctgtcttggtggcctgcggccttgctcctctgtcctgtgtcttgaggcaagtgcggatgacagcgaagttgtcctgggtgactggcagtgacatggggaactatgcactgtatcatcccagggggggtggtgaactaggcacttcacgtgccctctgtctccccttttaccgcagacacctcatttctaccgaaggaagtgtttcttattaacagctgtactttcctttaatctttattctctttccttctctgcttatgctcataaacttaggggaatctccccctggtctccccgtctcccgttgtgacatttgtgagtccccagagtaaccctgttgtaacagagaagcagagaagggtaaggttagacctttagaagatgaagacggaataaccagggtcagttagcctctcgagtacttcttcaccaagtgcccagagtccctttcagaatctctacagacttctcatttgcttctctatctgtatttcttcactgtagtatttaggtggtttcatcttgaaacataattgaacatttttattttaaatagtgacatcacagaactattatttgttctacctttcattgcagttgttcgctattccaggttgaatagtttttgttttgttttgtgggctgccctttatcacccatccttcataacattgcttctaggggaagttttgtttggatttctcaacagtcaacttacaaactttttggaaaacagcctgtttgtaagttgaggactgcctatactgtgttatggttacacttgttaccattttcttatggaatctggcattataayttaggtataattgaaagtgtgacgatttggatagaaaaataacatctcgttgtttttctggtcatagttgcccattgtgcatcttcaygacaaatcatctctcattggaagaactgcacacgacatgactgtcctgtttgcctccctttgaaaaatgccagtgacaagcgaaaccaacaaagtaagtgagcacgggggcagagaagcttggagatgagaatagaagttgtttctaaagaaaattcagagagtaggtagggagtgggcaggggttatgagccatggagtgcagggtgaggtagggcggacagcagcccaaggtacagccaagctcagagggcaggcgggctctccgtgtcaggaacggctgtgataatgttggaccctgactcactcactgcctctccctctccctgccccctgcatacatgcacttgaagcagcatggaacagcagagtcactttgttcactgagccaacacgaagacatgrtatttcctgacagttactccatacgtgagaatttaaattccatgtcgctataatggcagtgacgtcttagggagggggatagaggggatacttcttttggaattggaaagcccttatcctgaagtaaattttgaaggctctgtcagtcagtctgggtcagtataaaatcccacacagacatttrtgaaggtttccctctacgtggagctatggtccccagaactctttgtataactaaacgttcactctgcttcacagtgagagcctctgccctagggctgctgcatcctgatcaccccagtcgttttgccgttgtctaggttgtctgtagccctcggcacggctggttacgcagcgatccctgcttgttgggaggtccgcctggggctctggggctccctgccatttgtaggcttcaggcagtaagaaggatgaacctccctcccgtttttcaaccatcttcctgtcattttagaggtaaaactgtggtctttgggtgtgtcattcagtttcggacagctaggaagtgcccttcagtctcctgtcccctctggctggagctgtacccttagcgacccttccagcacagcacagtcttcctcatcttcctccatctcgtctgtgccatcttgccaccctcccctgttttgtgtattacgtgttcattcctctcattcttcttgatcatccttcctcaagaccccgcagctgcctggagaacatgtgctgcttttctttctggttgtttctgagtggcccagggaaagatggaaaaagtgctttgttcctaagastactgtggagtggcgtgccagtgacagcccccgtggttttccttttactgagtccagcccacctccctctggcggcgagggagtaggcagcgagctgacgctgaccctgcttcctttaaagcagggtgtccctgtcatagagaagagaaatgccagggtaatggggcctgttatctgcctccctacagaagaaccacaacgagtttcctttaaaagccagtttcctggccaggcgcaatggctcacgcctgtaatcccaacactttgggaggccgaggcgggcagatcacctgaggttgggagttggagaccagtctctactaaaaacacaaaattagccgggcgtggtggcgcatgcctgtaattccagctacttgggaggctgaggcaggagaatcacttaaacctgggaggtggaggttgcggtgagccgagatcacgccagtgcactccagcctgggcaacaagggcgaaactccgtctcaaaaaaaaaaaaaaaaaaaaaaaagccagtttcctaaaagtcagttaaattattctttgattgactaaaatttgaattaataaacartttccctggacatttcttatataaagtgacattctggaatcctgggtcttctagaaccagatatttgggacagtagttctaatggaatacagtctgtttttcctcccacattactgtaaaagttttttctttagtatattgtgatggctaaatttcttgtgttttagggcacatttcagtaataggctctttaagtgccaaaatattcattgtcaagtttgtagttatacaatattctatgaataatgagctagaattttattcttaactttaatttgggggtgtggctttttgaggatcttttgtttttagtacatactaccatgacagttgtaaactttggtgatttctctttttaagaaacacttatgtggtttttgttttaaaagaaaaaagaagcgtatgtggttttttttttttaaaccatccttataackgcctgagtgttgtgaaaattgattctgtgcatgctctctcaagtggtaaaccacaggttttctactagtcagaatgtaagatattaccaggatgattttataaagtcacaaggaagatttagattaacttgctgcaaggttttggtagtttttttttacaaaagtatgattgacaaggtttcagcaatatcctttttgtaaattttattgttttttctcttctcccaaagcaaattatgcttatcgtgtgtgaactcttgagttaggaacccagagaggaaaatgtgaatctgaccctacgttggcttaaggttgggttttgaagacaatatrtatgttaaaaataacgtaagggtgacctccctcaaaggaccgaggtagagacaagtcagtgcaatcagcattcttttcgaggagaattggagcgcacctgactactttgtagagaaaggtgggacttggtggagcccagtgcaaacagaataacaaaggaagaacatttcagacagtggggacagtgtctgcacagtgcacagcttgtgagggcatgcatttgactggactggggttcctgtgcaaacgaggtgaacagaaaggtggactgtgatgagctcctggaagcctcagggactctgccgagacccacctgtgctcgctctgtggagactgccttaggggccccgggactctgctttttaggcagtgtttcccacaggccagcgctggtcttacctgatgcacacttccttggtcagcacatgctccactctcttaacttctgtgattaatgtctctactgagagaaccttccagaatcacctgtggcgctaatctgaggttctttgaaatgaagcccagaccattgattacctttttggcctgtgttgagttttgtttggttggttggtttgttttgagacggagtcttgctctgtcacccagactggcatgcagtggcatagccaagtctcactgcagcctcaacctctcgggctcaagcagtcattccacttcagcctcctgagtacctgggactgcaggcatctgccaccatacctggctaatttttgtattttttgtagagatggggtttcaccatgttgctcaggcttgtctcgaactcctgagctcaagtgatcttcccaccttgacctcccaaaagtcctgggattagaggcgtgagccaccgcgcctggcctcattcgatttttccttgaattgttttttaaagattctgtaatcactgatctcgagttaaccatcccttatagcaatattcaattttttttgaataattaggacttgccaagataagtatcttatgtcagtcctggcatctgacctccagtaaattcagtgcacagagtggcatggttgactgggctttgggacccgtgagcaggttcccctcttggggcttatgctgcctcacttgtgaagttcttgctgctcaaagtgtaggcctcagggaagccatagaggtgctcccaggttgtaagcaataaagaaattgggcccccatttgagacctcttatattaaaacctgcatttttataaaaatcctgggtgattagtgtgcacattaaaatctgagatgcactgctctggatgccttggaagaccaggtatctgggccagtgctggtgagagggtttgagtcattctctgagagagagaccaggggttttccaacctagagtcccccagggactgttgaagcaagtgtgcagggtcggccccagagccagcctaatgcacgcactgtcccggctgcgtcagccatggccccagctgctgcccggcatctccatgagtgtagctcccactgcttcacctggcaacatgttccatctgtaggtgcctcagattgtttaaaacacctccttttggccggacgcagtggctaacgtctgtaatccttgcactttgggaggctgagtgagacaggcgggttgcctgagctcatgttcaacaccagcctgagcaacacagtgaaaccccgtctctactaaaatacaaataattagctgggcatggcagcatgcgcctgtagtcccagctactcggtatcctgaggtgggaggctgaggcaggagaatgacttgatgaacccgggaggcagaggttgcagtgagccaagatcgcaccactgcactccagcctgggcgacagagcaagactacgtctcaaacaaaacaaaacaaaacaaaaaaccaaaacaaaacaaaaaaaaaaacctcctttttttatatggagtcaagatctccgtcctttgaactgccactcatcgaatagcccatcaggtgcccagtgagtgtgtgtggagcaggccctttgttcacttgagggcccttcagagattttcacctcttttgacagactgtagtgggatgggggacagcaaggagcagaatctgaaggctgtagagagaatggtgggcttgattgaccctgacttaagcaccaaagggtcgtgggtgatgtgtttcatctgaacagcttttctccttgctagcaaggagcagtgtcactgcgccagtgtcacttggcttctgaagaaagccttttgcttgagggcttgtggccgtgcctgataggaggctgagtctccagcctggcagtgcctgggttcccctcagtgcttctcttcactgtggtgccccacgcagtgcataggaaggtgccaggtaggaagtaggtcctggcccacacaatgcccgcaaggtacggtggtgccaccagcaactttgtagagatggctgcaggtctgaataaattcttttttttttttttttgagacgaagtctcactctgtcgcccaggctagagtgcagtggcgcgatcttagttcaccgcaacctccgtctccctagttcaagtgattcctgcctcagcctcccgagtagctgggattacaggcacatgccaccatgcctggctactttatgtatttttagcagagatggggtttcaccatgttgtccaggctggtsttgaactcctgacctcaggtgatctccccaccctcatactcccaaagtgctgggattacaggcgtgagccacctgaataaattctagcattgcttttttagtagaaatctaagtgtcttggtatccttgggaatttggttccaggacaccccaggtataccaaaaccaggtggactcaagccctacagctggccttccccatacacaagtttcgcctcccgcaagcactgtgtttctggcctgcgttgggtgaccccgtggctcactctcgtgctggtgaagcatcagctgtagcaactactgctctgcttcatggtctgtctccccctaccctcacaaagtttggagatttgattcatgtccgttttcactgaatttccaaatggagttcagttttattgaggatgattaggggcttaagttgtctgagtaactgagttctttgcatcagcaacatagactgtacagaaaacctcttagtggaacattccttttttcttttgttttttgagacagagtctctctgttgcccaggctggagtgtagtggcgcgatctcagctcactgcaacttctacctcctaggttcaagcggttctcctgcctcagcctcccaagtagctgagatgacaggcacgcaccaccacactcagctaatttttgtatttttaatagagatggggtttcaccatgttattagccaggctgrtctcgaactcctgacctcaagtgatccacctgcctcggcctcccaaagtgctgggattacaggcatgagccactgcacccagttacacttggccgtacccggcctcttagtggaacattgtttgtgcatgaagagtggcaggtgagtccgagaaagagcctgctataaaacttggccttttgttcataggtcataggctccttcttcagcaacatcagaaggggtggtgagactaggggatgttggggagctttaaagaggtaaatatccgggacaggagtgttgcctgatgggcccagaagaacccagccactgtgttagtgcattgcaggtgtgttgtgacttcctaaaagttagagctttatgctctagcgaggaaaaaagatgtaaaaatggccaaatgagcacacggccttgacattggaagaagttaagtggcaataatacagaaaggataaatagagaaacttcatccttagggatgccaggtagatggaccaatctccgtgcatttctgttcagttccaagacactccatgggctgcgctgcgagggcccacgatgtgctggccgctgcgctatagctggcacgtcccctggactctgcacagcaggttacgtggcccatgtggcaggtggtgaagagcaaaaccgaatttgacattaatcccacctttcagggatgcacagggaacgtgacatgagcctgattttccctgtcccagggttccaaggtgcagtttgggtgcattaggtgattattagataatctgttgtccctaggctcagggaatgcagagattgtgcccacaccatgtctgggagcctggcagagtgtactcactgagtctgtcacgtgagtgagtgaatacacgaagggtcagtgtctaaagacaagcgggtacaggagtcactgtgggatttcagagagggattgggaataccaccatggagcacttggagcaccttgaggttgcagtacagttgatggtggcttatacatagtgactcccctttcagtcagccatcaccctgcagtgaatgcctgagcacccttacccttcagtatttgtgtcatttcatgtaatagcatcatttggacttcaaattcagccatgcttaaatggcagagaccttctttatttgttcataattaatttcctttgcttctgaattttagaaatgatgagttccaaatgcttctcataggtatattttcttttaaaataaaaatataataatgtttacgtttagaaaatgaatgcctctaacacaaaatgcagtgaccgtgtcagcagcttccgtgggaggcctatgtgagtatgaggcgttggctgccctgtaagtgctgtgagcttaggagtggcattcactgtaaggtggggcattttagttaagtagatggcacttggggaggtgtggataaaagagaaatgtagtaggaagaagtcaataaagggtttacgggaaatggaaggctccatactttgttkcttttaagttcttctccacagtccatcaccatgtgtgttaaatatagtgtagccctgttcttccttacagcgcaaggttgtagaaaaataaactatcctaccactgttaactttgatttctataccatagtgcttcttaaaaatgtaggatgtcggtttcagaagtatggtggacacatgtttaaagttttggggagtagtaagtattagaatacttttaaaggtattgtgcgtgacttacttcagctacacacttgtcataaagtgcaccttgggagttgcttttcatttatgttaatgagtgcttggtgtatgtagttgtgtctgatgagtgttaatgagttgatctgaatatcrttattagaaaagttaatagtatggaaagtataattaccaggaattttttttcacacattttagtttaattaagttgctctggtaggtattgggtttattataggtgtgctgatggttgaatgtgagaatattactgttacacatagtggttgggatttgaaagaaaggctttgtggtcgtgttttatgtatcaaaaatggtgtgttayagcaacaacactataagatgctatttttaacatgactctaaaatttgtggaagttagaaaggaactcaaaaataggaataaatggtatcatatagaacttctgccatatgataaattttcacacaacagcatttgggttgttgygacagatgagggggcaggcaaacaggtaacaggtgggtaggtaggtgggtagatgaattgaccttgaaatgtccaagttgatgcaagtttggagttgtctctccattaccttggaagccctttgggatggagctccttatgttgacaccagtttttcctttagtctcctggggttagctagctggatggggcagcttccctgccagccagcagtgggcctcagtagcagaagctgactttggccacgtgaggcagagccacctcctgaatatcagaggtgctgaggtagcccctggataataagacccatgcagaattgcgaagcctcactccaaccttaatttcaaacagctcagtcagtcaatcaatcaagtacagtatttcttgaacagcttcatgtagccggagagctcagcatggtgctctgctgcataggaatcccatcagaaggatatgtccatgctgtcattgtttgtgtatgtttcaaggacttgcaattatgtgatttggaagagcacattatagatttattaatcaaaactgaccgaccaggtatcatctctgctccttctcttaagccctctgtacctgtgcaggtgagcagtgaaggacagggttggggtcaacaggagggggctcctctgttcatctcagaggygtctgctggtccccagagaatcagacgtttcccttgtcatacatttgccactccctggaactgacttcttgaggagtctctaggttttaagacataataatttttttcaagtgttatctgtgagattttatggtctgttgcatgctaagatagaaacttgacttttctttaactttttgttcctcacttactgctaggcagaataaatgagtccttcagcacagttcctttctccctaggcttgtttactgctttatgatattcatgtgtagtattttgrtgaaatgtatttgcttctcaatagtttttaaatcattcgtgggcttctcccttttacttacctctcktttttgtctgtctgtctgtttgtcgttatagccatcctggggtctccagctagtggaattcaaaacacaattggttctgttggcacagggcaacagaatgccacttctttaagtaacccaaatcccatagaccccagctccatgcagcgagcctatgctgctctcggactcccctacatgaaccagccccagacgcagctgcagcctcaggttcctggccagcaaccagcacagcctcaaacccaccagcagatgaggactctcaaccccctgggtaggtgaaggaactctcaacttcgttcttacttgtccacatgcagcaaagggaatggagtgatggaacccaaggcagttttcagtttgttttgtgttttttactacggtggttgaaataaaaaatctcccaggaaaaagctgaagtatctgatgcaaggaaaatgttacatgcttataaaaagagcagcatttgcaaatgaagcaatgttttygttgcttgctgtgccacttctgtctggacggttttcataaagaatgtgccatgtgcctcagaatgcagatctcacaagtcaggatgctgactggaygcctcatgctgactgttgtcatttatttgttggagtacttgtgtttgccagtttctcacacatcttggttagggtctacccctcagttggaagtgaccagcctggacttcagcaggttaatgacaatgacaggagtcctggaaactcttggctcaggctgctggacatgtcatggtttcttttgtcaccccagcccattatttgccagcctttgatcgtttgctcacacatcgccatgattttgccatttctgcatatggtttccttaatatttttctttaagtggacacagtccctttacatttaggcttaagctaagcagtgatgtctgtgaagtcaagactggctgactagttgtgctagttttgttctttccctaatagagtaactattttacacttaaaaattactccttaaaatatgcccagctaaagtcatcttacttgttgctttctggaaaacaactgccctaatgaatgtctaactaatactggccaggagactgagttagaatcctgagacccaagtgttaatctaactcctctcctgttgatggtataatttgggactagcttaaccttttttagtctcagctttcgtttcctttaataggaagattgtagacaaattgacctctatatttttttcctgagcttaatttctatgattttattttctgatattgggggtggagacacagaggtgtgtgtcagtgcagctgagtcactcaggagcgatactaatgaagcagaatgaaagtaagaggctgcatrtgggtcatttataaytttttcacttagatagcagctaacctccataaacacaccttactttggttacaaagtagagtggggagggtgtctactgattatttgtgcacgttgattaccattattgaaaatatgacactcagagttcctgccgcagtgcttactataactggccagaatcacttatttaaataaccaccaattgtttwtatggtggcatgttggttatctgtcatcaaaactttgaagtatatattaaaatttaactgttgattgatttcttttctgtctttaaaggaaataatccaatgaacattccagcaggaggaataacaacagatcagcagcccccaaacttgatttcagaatcagctcttccgacttccctgggggccacaaagtaagaccctgtttcagwtctgagtgacagtccaacaggagcatggactgagaaccacacaaaactgattctttctaaatgtgtggcagagaaaatagtttaaatggggtggtgaggrgtgaatgctgttttcctttttttctttaattataaatgtagagcagataatagattaaaacatagtttaagttttatttatttacatcacttggctctcctgacttaaacttttaaaagtcacatgtggtggcagaagaaccttactagacaaagtgtgtttgagtcacttcagtagayggatgaagtgtctttatttcctccttagcccactgatgaacgatggctccaactctggtaacattggaaccctcagcactataccaacagcagctcctccttctagcaccggtgtaaggaaaggctggcacgaacatgtcactcaggacctgcggagccatctagtgcataaactgtacgtaacagttttgcagtttcatagatgtttgattttattcctgtgttgcccattggctaccagatgacagtaccctaggagcctatacaagtcacgtgcttatttagggagccactctcactgctggtagagttctggcagccctaggcaggccagagattcccacactctatgtcctcggtgagcgggggtgacaaagagagcattggtggctctgtactgccgaggggcactgacttgcagcccctatcaccgaggcaaagaccctcagtgcagcccggccttaatgtgcttctgcactttaggctgcgtgagggggctggggttagctcaagagcctcaccttattttgtagttccagattctagttgtggagacccctcagaattggaaaagtttagagtatagatggcatgtcattatcaccttacagttagttaacataacggaaagttaacagttaacttttttttttttttttttttttgagacagagtctcgctctgttgcttagactggagtgcagtggcacagtcttagctcactgcaacctccgcctcccaggttcaagtgattctcctgcctcagcctcccgagtacctgggattacaagcacgtgccaccacccccagctactttttgtgtttttggtagagacagggtttcaccacgctggccaggctggtctcaaactcctgacctcaagtgatccgtccacctcagcctcccgaagtgctggggttatgagccaccgcacccggcctttttgttgttgttgttgttgagagagagagacggagtcttgccaggttacccaagctggtctcaaactcctggcctcaagtaatcctcttgccttggcctcccaaagtgctgggtggcatgagccaccacaccaagcctaacgttgttgagctagttattttaaatgagctagacttacattccctttgagttttttcccttccttattttgatcaaattttttttagtaataagtagtttaaaaattagggatttgaaaatcgtgttattctggaaatgacccagcacatacttgttaatagcaaaatattgatgtgtttgatgtgtagataagttgataggtcaggattgtctccagggagttaacttcattcatgtattgacatgcgaggcaagagaggcttggcatttctctccacactgtattgccaccagagatacatgatcctgattttgtagtgcttatttgatggcattggaagtagcttcaggccaggtgcagtggcccccacgtgtaattccagtgctttgggaggctgaggtgggaggattatgtgagcccaggagttcaggccagccggggcaacataataaaactccatctctacagaaaatttaaaaattagccaggcatggtggtgtgcacctgtacttcccagcttactttagaggctgaggtgggaagatcattgagcccaggagttcaaagttgcagtgagctatgatcatgccactgtactccagcctgggcgatagagcaagaccctgtgtcttttttttttttttcttctttttttggtatggagtctgactctgtcgcccaggctggagtgcaatggcacgatctcagctcactgcaacctctgcctcccgggttcaagcaattctcttgcctcagcctcccgagtagctgggattacaggcatccaccaccatgcccagctaatttttgtatttttagtagagacgggatttcaccacgttggccaggcagatctcaaactgctgacctcaggtgattctcccgcctcagcctcccaaagtgctgggattacaagcgtgagccaccgcgcctggacgaaaccccatgtctttaaaaaaaagaagaaaaaaaaaagtagtttgatagatgtgttatcctttcagcgtccaagccatcttcccaacacctgatcccgcagctctaaaggatcgccgcatggaaaacctggtagcctatgctaagaaagtggaaggggacatgtacgagtctgccaacagcagggtaggttgctgtttaccgtgctctggcctctacagcatctgtagtagacagcactacatttgtctgctttgttatctggaaatagtggaatctatgtagttgggacagactcctccccttgaggccactgaccaaggagacttcccagataagacacaaatctcctgcagaactctcttgattagctacattggtgcatggagtatataaatttacattatatccatgggatatatttttcatagtaggtggtgttgtaatattgttagcatcagtgaatattcaagaagttcatttgaatgaaatggaacatgtattaagtacctactatttgatatgtcctataaagtcaytgggaattcagcaagaatgtgggcttctggtgtatcaggtatttgcatactacttttgccagtgtactcaatgaggaagttcattagttagaacctacaacacagatcattcagttgctttttacagttttaactgtttcrtattgaatattattgctttttaggatgaatattaycacttattagcagagaaaatctacaagatacaaaaagaactagaagaaaaacggaggtcgcgtttacataaacaaggcatcttggggaaccagccagccttaccagccccgggggctcagccccctgtgattccacaggcacaacctgtgagacctccaagtaaggattttatttcctactgccatcccttagcctgtttccttggttttccttcgtgtttggggtgtatttctaagaacrgagaattagaatatctgatgcatgccctgcagaagctgttgatgtggcagtggccctgaccacctgcctcaggctgtgttgggacactgagtttctctcttgggaaggccctttacagggtgygctggcattggaacacacgtgcttttggacctattggctgttttcccttttaagtttgaagtcctaataagaaatttcctattcctgaatcaaggattatattaaataactagggtggttttgtttttgtttttgttttgccaccatagatggacccctgtccctgccagtgaatcgcatgcaagtttctcaaggtattgaactgtttgtggtgaatcatattttagttttacattcaacagccataactttcaytgttttttcctctccccctgtatatttctttctaaccctttcttctttccattcctttttgctgataagcagaattcagttctacaggtagtatggatatgtttatagtatgaagtttggagattataggaaagatcttccaagagataagaagcagtatttagctatttatttatttatttatttctattttattttattttatttttatttttttgagatggagtctcgctctgtcgcccaggctggagtgcagtggctccatcttggctcactgcaagctccgcctcctgggttcacaccattctcctgcctcagcctcctgagtagctgggactacaggcgcccaccaccacgcgtggctaattttttgtatttttaatagagacggggtttcaccgtgttagccaggatggtcttgatctccgtgatccgtccacctcagcctcccaaagtgctgggattacaggagtgagccactgcacccggccttagctttttattttactttattttcttttcttttatttttttgagacagagccttactttgttgcccaggctggagtgcagtggcacgatctgggctcactgcaagctccgcctcccgggttcatgccattctcctgcctcagcctccatagtagctgagactacaggcacctgccaccacgcccagctaattttttgtatctttttttttagtagagatggggtttcaccatgttagccaggatggtctcaatcgcgtgaacttgtgatctgcccaccttggccttccaaagtgctgggattacaggcatgagccactgcacccggccagctttttatttttttaatggatggtgaagggggtgtggtacgttactcttaggaagagtccgagaaagaagcaccctagatgtggggagggagtgcttctgaatgctgagaaggagaagcatgcaagacagtcctagactgctgagcacttgcagaggctgaaatggggacggcacgggctgctcttggccctaggggttaagcccagctggctggatgtcaacttctggagagagtgtacacacaggtcctgtgccaggttggggtgtcagcagctgtctcaacaaccttgaaaggttcttaagtagagagcctctggtttttggttggttgaagcagtgatttttattttggggcagggagcatttgaaaaccctgtagctcttgaccattgagacccaagcaggaggacatttttccaggttgtgaaacaaggtggtgacattatccagaagactctaaggaaagaggctttgctcaggctttgatttttgaaagaaatcaaggagtcaggctgggcacagtggctcacacctgtaatcccagcactttgggaggccgaagcaggaggatcacttgaggtcaggagtttgagaccagcctagccaacatggtgaaacccccgtctctattaaaaatacaaaatttagccaggcatggtggtgcacacctgtaatcccagctacgcgggaggctgaggcaggagaattgcttgaacccaggaggcggaggctgcagtgagttgagatcacaccactgcactccagcctgggcaacaagagcgaaatctcatctcaaaaaaaaaaagaaagaaatcaaggagtcagagaaattgakccttgggaaagtggctggatgctgtgttggggattggtccaggacttcagcctggataggaagatgctgctggtgtggggtatgatgcccctgctgtttaccagcagaatattggaatagatgttttctagttatgcacttagcaacctccctaccagcacatctgggtaaatacagatttctttaagtgctgttccttagtaattgtttttcattttgtttaaaaaaattctcaaggagtggggaagcttacattatagactccctggaaagtcttcctggtctgcatcggcactccgttatttgagggtaccatttctaggtagccattgaaggtagtgctccgtgagtcatcctttgagccttctcatgactacagcagcgctaaggcagcaccttccagaaattctctaaagggttctgtcagattctagtgttggtcctaagactaatttgaactggtgcttctttagaactcagagtttacagagtattattggaaattggaaggaactagacaccgcagtctggagacacttactggctgtgaagtgtctttcagtgatgtggtgttcctgtaaactacaggaggctaaggttgaggacggctgacccttgggcacttcttaatgcttaaggtgcttgcaaaattaaaagaacatttggagacttagcacagattctaacaatgaatgtaaacccagcaaggagctgggaatcctcggatgatgggcgtcagctgctccagaggcattaggtatgggtgtgcacagaagcytgccctggtctctggaaacatctcttctgtagcttgtgagggtgctgtcctttcagggcacctcctcaccctctttgttgctatgacactttggtactgtgccctctggctcagctctaccacagcctcgtttaatgtctcacttgttcctgtcttacccaaccttatgccttcatgtcctcgtccttccctggtacccctcaccatgccaccgtcaccacccccacattgatgccgttttctctggatatggagaagtctgttccttcatcatcttcattgattaattgggtgatttcttttcagttttctgttgcctgtgcgttccatcttattttacttaagagtttatttagcaagttgtaattctgttttcctgtggrtgcttttcctaatgaaccgttgtgggtacatttacagggatgaattcatttaaccccatgtccttggggaacgtccagttgccacaagcacccatgggacctcgtgcagcctccccaatgaaccactctgtccagatgaacagcatgggctcagtgccaggggtaagtgttctctttcgctgtgctgcagatagccctccctctcacatggaacattatctaagcagcagaattcatgtcacttgagaatcctgtggttcttgttcctytgaatttgggttatgctttatttctttcatctctcattttaaaaaaattattactacacagaattatttgactgttagttattttattggaataacaaattcataggaatgtgtggctttgtgagaatgtgggagttccaaggctggagaaggcagcctcagatatgtggccagcagggaattgtcagcatctgttgactgagagctcgctgttccgaggctgctttctaaacacttyagagaactcataggcatgtcttaaactttaaattatagcctgctattgatttctattcagaggacattttgaagctggctcatttgagagattgcctgagaaagtgtgtaaggtgcccaggagcgcgggagttcttagcaagtggtggtctcttcccatgaggaagggcaggatgtgagccctgtgcttgccatcctctggggttgtgaagccttggatcattctggctcaccttgaaaactctggccgtcagcttccgaactacagctctggtggtgcttgttgtctcgtagatggccatttctccttcccgaatgcctcagcctccgaacatgatgggtgcacacaccaacaacatgatggcccaggcgcccgctcagagccagtttctgccacagaaccagttcccgtcatccagcggggcgatgagtgtgggcatggggcagccgccagcccaaacaggcgtgtcacaggtactgtgccccactgggaccgtggctccctaggaaataaaattcttgtgttaagttttggttttttttttctgtcttccttcgtggaaattaaaattccagaatgcacatttcatgtctttgtatcagcttctctttgttttctccacctttgtcctgtagtccttaactcgtttggaatttctcttatcctttctgggttaactatatgcaaaagtgggaatggatttagaatttttggtttgtatgcttttgtgttttgatctttgagtttttgttttcttattttttgtttgtgtattttaaattctaactttaacgtgaccctgagaggcattaggattttaaaaagcgagtgagaaggacccatgaattcactcttgatgatttggcttttgtttcttttgacctgtctccactgccaggtgaaatcaagctaacagaatcatttcaatagttcccttcttgttaaatgtttttaatttctcaatctagagctgaagaaattgattttccatttattccttccttttttcctcttttgttagttgtagtgcgtatcattgctactgtatacaaaatatacatgtatttaaaacacaccaaatcctccctaaaagataaaattcttgttttaagtttttttttgtttgtttgtctgttttaagacagggtctcgttttgttgcccagactggagtgcagtggtacaatctcggctctgcaacctccgcctcccgggttcaagcgattctcctgcctaagcctgccaagtacctggggttacagatgcccgccaccacacccagctaatttttttttttttttttttttttgtatttttagtagagacgggatttcaccatgttggccaggctgatctcgatctcctgacctcaggtgatccacccacctcggcctcccaaagtgctgggattacaggagtaagctaccgtacccagccttgttttgagtttttaatgtgaaataatgctgcataagtcattattatatattagatttcctcactaaatgattattcttaactttccataacatttcatttctctagaacaaggattagcaaacttcgtgtaaagggccagatactaaatattttcagctttgcaggccattcaatcttggttttcatcacttctgttcttgtagtgcagaagctgctgtggtacataaatgaggtggctgtgtgccaataaagctttatttacagaaacaagcagctcagtgtgtttgccctgggagattgccaacccctgctctagaacagtgattcagaatcatttttaaaatgttcacaaataattctgaagtgtatccccagtatagaaccactgcactgaaacagttctctttcagtaactaacgtgtgtgtgtgtgtgtgtgtgtgtgtgtgtgtgtgtgtttgtgtttcagagagaattttttttttaaatttttaattgttaagggtacttatggatgtatatatttatggtcaataacttttattcttatttttatttatttattttatagtccccagggaagaagcaacttaaaaaaaaaatacctttttctaagctaagcttagaaaatgttaaagaacattgggtacatgttatagaacatgaagcttataggctgggtcaatgtacagtagctcccccaatctgtcatttcactttctgaggtttcagttacctggggtcaactgtggtccaaaaatattaaatgggaaattctgggaataaacaattcataaattttaaattaattagctaggcatggtattgcacgcctgtaatcccagctactgaggaggctgaggcaggagaatcactggaacccgggagatggaggttgcagtgagccaagatcatgccattgcactccagactgggtgacagagcgagactctgtctttttttttttaaaaaaaaaaaaaaaaagttttaaattgagtgccattccaagttgcatgatgaattctgtcaccatcccactctgtgcccccagggatgtgaatcatttatttgtccagcatttccacactgtagacactacccacctcttagtcactgagtgtccaccttggttgtcagatccaaaaatcttrgtaaatattgggttcagtactatccgcagtttcaggcgttccaagactgggggtcttggaatgtatccgagtggatatgaggggactgctgtagatgtgtgtgtttaagccataagtttcaatggttgttttaattatataaatcagactataagaaacgtgtgtagttttaccgttattgaggagtgcccattacaagtgtatagctcgatgaattttcacaagcagaacactcccaagaaaatgtgattaaattcccatacatttggctgggcgcggtggctcacgcctgtaatcccagcactttggaaggccgaggcgggaggatcacttgaggtcaggagtttgagaccagcctggacaacatggcaaaacccgatctctactaaaaacagaaaaattagctgggcgtggtgacgggcacctgtaatccctgctactcgagaagctgagacaggagaattgcttgaacccaggaggcggaggctgcagtgagccgagatcgcaccattgcattgcagcctgggcgacaagagtgaaactgtctcaaaaaaaaaaatttttttttcatacatttaatttttcaaatgtttcatcacattttcaaacgggggaaataattttaccatactctgtccatttctggtagggacaggtgcctggtgctgctcttcctaaccctctcaacatgctggggcctcaggccagccagctaccttgccctccagtgacacagtcaccactgcacccaacaccgcctcctgcttccacggctgctggcatgccatctctccagcacacgacaccacctgggatgactcctccccagccagcagctcccactcagccatcaactcctgtgtcgtcttccgggcagactcccaccccgactcctggctcagtgcccagtgctacccaaacccagagcacccctacagtccaggcagcagcccaggcccaggtgaccccrcagcctcaaaccccagttcagcccccgtctgtggctacccctcagtcatcgcagcaacagccgacgcctgtgcacgcccagcctcctggcacaccggtaagcctctctgtctctgctgtttttgggccaagactcttagaagataattttcccataaaaattgtgtgtcaggccaggcgcggtggttcacacctataatttcagcaccttgggaggccaaggtgggagaatcacttgagcccatgagttcaagaccatcctgggcaacatagtgagacctcgtctccagcaaaaaaaaattttttttaaccagacaagcatggtggtgtgtgcctgtagtcctgtagtcccagccactcagaaggcttaggtgggaagatcacttgagcctakgaggtacaggttacagtgagccaagatcacgccactgtactccagcctgggcaacagagcgagacattgtcatcttttgtttgtttacttaaaactccattgaggctgggcgcggtggttcacgcctgtaatcccactactttgggaggctgaggcaggcggatcaccggagctcaggagttcgagaccagcctggccaaagttgtgaaaccttgtctctacaaaaatataaaaattagccgggcatgatggctggtgcctgtattcccagctactcgggaggctgaggcgggagaatcgcttgagcctgggaggcagaaattgtatcgagccgagattgcgccattgtactccagcctaggtgacagagtgagactccgtctcaaaaaaaaaaaaattccattgagtaagaatttgcaaattaggaattcttttagtggttccttcgtgtaatgttcatttactccaccagcacccgtgttcctaccgttcwcacaggctgggtaacactgtctttgggtaggcacttgatttccctcccttcagatgtgcttaggcattcataattcagccttttaccatacacattaaccaccatattgaagggaattaatttcaaaatatgagatttcatgatttagctagaaaacttcgagaaaataaatttatgtcaaagtttgaaaagctctgctgtttcctctgcctttgtggcaagacctgagttgtacctctggctgctgttacctccctctagaactcattcctactttaacccctgttcttcggtttcacagaagggcacctgctggatcagtattgagaaatgttaatgggaaattgtaggttgcatgagcagcatagttgaagatcatttatgttaccttgcttactgaagtcagtgctttcggttttttcacagctttcccaggcagcagccagcattgataacagagtccctaccccctcctcggtggccagcrcagaaaccaattcccagcagccaggacctgacrtacctgtgctggaaatgaagacggagacscaagcagaggacactgagcccgatcctggtgaatccaaaggggagcccaggtctgaggtgggtgccgctccctaggaatgcattgactgcgtatcgcwactttacccaggtgtcctcgggcgaggcttggagcctgccatgggtatccctgactttagttaaaatwttctgtttgaatgtgggttcggggtttggtgtataggaaattgattgaaaacagcttggtttttcatttttaaatatgaggggtgggtttattttgcccgaaatgaagaatactggcttatatttgaaatacttgaatcatccaacagccttttattttatgttctccattcatttctagttctgcagaggtagactacagaaggggtggtggattcatttactaattaacctatggcagaagctgaaagctggcagaccgtgggctggatccagcctctaaatgtgtttggcccacacaataccttaaaaatcaggaaattgcaaataaaactctagatttctggcttttcttgaaaaatgagatgctttcagcattgtgcctgcatccctgtgtgacagcagtctggttgtgagcaccaactgtagtgggctctccaattagccacagtccccactgctccttcctgtctcataccacacctgcctctgagaaggacttttggtccctgccccaactttcaaggagattyttattccaaattagaaatatctgtagtgaaaaatctgagtatgtgcaatttttaaagcagttttacatttaaaaacttttaaattaggctgggagctgtggctcacacctgtaatcccagcactttgggaggccgaggcaggtggatcacttgaggtcaggagttcgagaccagcctcgccaacatgatgaaaccccatatctaccaagaatataaaaaattagccgagtgtggtggcacacacgtgtaatcccagctactcgggaggctgaggcaggagaattgctagaacccaggagggggaggttgcagtgagccaagatcttgccattgcactccagcctgggtgttagactctgtctcaaaaaaaaaaaaaaaaaaaaaaaaaaaaaaaaacacttttaaatttaggaccataattgcactgactctgtgctgaagcgacttaatgaacaccaagtactttatttmttcttccggaagagaagaggaatcataaatgcaactctgactagaggaaggttttaacaaacctgttttaggcttgtaagagtcttcccgtgaggttgcggtaacataaaggtgtttgatattcatatgttatctgtaatgtttttctcaagatgatggaggaggatttgcaaggagcttcccaagttaaagaagaaacagacatagcagagcagaaatyagaaccaatggaagtggatgaaaagaaacctgaagtgaaagtagaagttaaagaggaagaagagagtagcagtaacggcacagcctctcagtcaacatctccttcgcagccgcgcaaaaaaagtaggccatttattcattaccttattaaagcatgctgcttttccacggtgttaggattccatgtggaggattaaaagctaaagtagaaacataattctatctgcccttttacctttcttgcctgccattccccagactktcccctgcagaaacactcaggctgagcaggacccctgccctgtgcctgtggggctcatggcaggagtgagagatgagctgctgctccgagggcacccaggctgcagagctgtcttctgatggtgctggcaggggccgagttgaaatgtgtctgggtccttgagcaggttaaggagcttggctttactcataaaagtataaagaaccagtgatgtatgtgagtaggagaataaccaaaaaagccataatttaaggaagatggtcattatgacagcacagggtgacttggaggcagaaggtttctgcaggtgcagtgaggaagctgagcatgcagagtgaggggcagggtggcgcctagggaccctgtgtagtgagacatgggggaggggtaggttaggcatctttggggtctgagatgtgtgaggtaagcccgcctcacagtggaagttggatggaatccatttgagatgtatccacagtaaagagataacagggtatcagaaaattgtcaagtgaaccttagaaatgggagacaggactcagaaagtccaaggctgcagatgacacttttgggaaagattgcagagaaatgttagagactgagaccatgttactctgcagctggaagggaccctggagagtgtggagtacagtgaatctcagggctctttatactcttagaaattgagggccccagagagttgttgtgtggattatctatcattgcttactctactggaaactaaagttgagaaatttgagtacagtggcttacacctgtaatcccagcactttgggaggctgagatgggaggcttgcttgatgctgggagttcaaaaccagcctgagcaacatagcaaggctccatctctacaaaactaaaataaaactagctaagtgtggtggtgcacgcctataattctagctgctcgagaagcggaagcggcaggattgcctgagcctaggagtttgaggctgcagtgagcccagatcacatcactgcactctagcctgggagacaaaagtgagattgttgtctgaaaaaaaaaaagagaaaaatttttaaatatttagttcatttaaaatagtctgttacatggcacccatagaaaacatttatatgaaaaacaatttttccaaaacaaaaataagtaagaatagtggcgttattaagggtatctgcctctgcatttactgtgttgtgattggttattttggttgaagtgtatgaagaaaatcctgtagttggtaaagggagaagtattttcgtagccctttcagctgattgtggatattctttgatactataccaaaattcagccagtgaaggtttcttaaaggttagttgcgacattgaaccagaatctatagcactggatttttcatagtctgtgacattagaatccattgatccatcttgtacttggaatggatcttttgtgcttgcatgatttttttttcaattgacacttaagttctgcagattttccatatgttgacatatttcactatacagtgtcaaaaaaaaatcaacatttgttaataccaccatcagtctcttcaaacaagtcttaccaacttagaaaagcagggcgtgcatggtggctcacacccgtaatctcagcattttgggaggctgagggggaaggattgcttgagcccaggaattcagggtctatgattgcaccactgcactctagcctggagctcaggagttcgagagcagcctaggcaacatggcgaaacctaatctctattaaaaaaaaattagctgggtatggtagtgcatgcctgtagctgcagctactcgagaggttgaggtgggagaatcacctgagcctgggaggtcaaagatgcactgagccttgatcatgtcactgtactccagcctaagtgacagagtgaggccctgtctcaaaaaataatactaataataaattttgagaagctgtgaagcccatgtacaagttttccaaagcatttgatttttttatgaaagcccaaattttagcattggcaacaaatactgtcagttgtccttgaagtaactggccctctttgttcatttctgagaaaatgtctgacatataaccagagcttagtaactatagcttatctctcagtcattcctgaaagttttaatgtgctccacgagggcaagcagctacttcagctgtaaattccaacacttgcccaagtactgcctcctgatgtggccactgtgcctatgcagcgcacatcttttattctgtgtgaggagataggcagaatgtttcatcacacagaataaaagacatgtaccaggcggccagacgcggtgcctcacacctgtaatccccgcactttcggaggccaaggcaggcagatcacgaggtcagcagatcaggaccatcctggctaatacggtgaaaccccgtctctactaaacaaaatacaaaaaattatgcgggcgtggtggcgggcgcctgtagtcccagctgctcgggaggctgaggcaggagaatggtgtgaacccaggaggcagagcttgtagtgagccgagatactgcactccagcctgggagacagagcgagacgccgtctcaaaaaacaaaaacaaaaacaaaaacaaaacaaaaaaaaaaaccacacacatgtaccaaacgcttaagatttaatacaaggaatactttttactatctcatcaagaatattttttcagccaggtgtggtggctcacatctgtaatctcagcactttggaaggccaaagtgggaggatcacttgaagccaggagttcaagactagcctgggcaacatagtaagaccctgtctctacaaaaaattaaaaatcagcsaagtgtggtggtgcatgcctgtagtcctggctactcaggaggctgaggcagcaggatcacttgagctcaggggtccaaggctgcagcaagctgtgatgccactgttggactccagcctggacaacagagcaaggccctatctcaaaaataaattaattaattaagaaatgagtggacacagtggctcccacctataatcccagcactttgggaggcgaacacaggaggattacttatggccaggcgttcaagaccagcctgggcaacgtagtgagaccctgtctctacaaaacagtttaaaaattagccaggtgtggtggtgcacctgtagtcccaatggctcaggaggctgaggtgggaagattgcttgagcccaggaggttgaggctgtagtgaaccatgattgtgccagtgcgttctagcctggatgagagagtgagaccctgtcttaaaaataaagaatattttttcttggctgggagcagtggctcatgcctataatccaaggactttgggaggctaaggcaggaggaatacttgaggccaggagttcaagccagcctgggcaacatagcaagaacccatctctacccaaaaaaaagaagaaaaattttaaacaaattttcttaagcatggctggtattttttttcttgtgactgtacagcagcagcagtgtgtgtgataacagtagagtttggtgatgttggctttcttttcctttgtttttgctttttagctgggtgtggcagcatgcgcctgtagtcccagctactcggaaggctgaggcaggagaatcacttgaacccaggaggtggaggctgcagtgagccgagattatgccactgcactccagcctgggcaacagagtgagactccttctcaaaaaaaaaaaaaaaaaagattgcttttttcccatctgtgcagatgtccaacatagtgcaaaaggcaaatgataatttagtgttataaaaattgtttcaggccgggcgcagtggctcacacctgtaatcccaacactttgggaagctgaggcgggtggatcacctgaggtcaggagttccagaccagcctggccaacatggcgaaaccccgtctctactaaaaatacaaaaattagtcgggcctggtggcgcatgcctgtaatcccaactactcaggaggctgaggcagaagaatcacttgaacccaggaggcggcagaggttgcagtgagctgagatcgtgccattgcactccagcctgggcaacaagagagaaacttcgtctcaaaacaaaattgtttcaggctgggctttggggttcacacctgcaactccagcacttttggaggctgaggtgggaagatcacttgaggcccagagttcaagaccagcctgggcaacatggtgagaccctgtctctgtagaaaaaaataagaaaatagctggttatggtggtgcatgcttatagtccctcatgctactcatgaggctgaattaggagggttgcttgagcctaggaggtcaagtttgcatgcagtgggctgtgattacgctactgcactccagaagacctcgtctcaaaaaaaaaaaaaaaattggtttcagttttggtgaaatagttttcatcttacagcacatagaagggcctagggcagtgctataacttgagcacctaaaatgtgaccagggtggccgggcgtggtggctcacccctataatcacagcactttgggaggccgaggcrggcggatcacgaggtcgggagatcgagaccatcctggctaatacagtgaaaccctgtctctactaaaagtacaaaaaattagccggccatggtgacaggcgcctgtagtcccagcgactcgggaggctgaggcaggagaatggcatgaacctgggaggcggagcttgcagtgagccgagatcgcgccactgcactccagcctgggcgacagagcaagactccgtctcaaaaaaataaaaatgtgaccagggtgaccgaggaactgagttttttattttttgtaatattattcgtttggtaaaatttcagtagtcacaggggctggggactgcgatatgagacagcagcctccaagggctcgagagccgcgtttttgggagatgctggtgcgctgcaacagccctgccgcgtggagcaggtcctcgggccagaggaggggagcggcgcagttcacatacactcctgacttcacttctgcacatatgggatcttcttacagaaaggtgctggtgaagacaggagtctgaaaatgctctcctcggccaggcaccgtggctcacgcctgtaatcccagcactttgggggccgagattgcaccactgcactccagcctgggtgacagcgcgagactccatctcaaaaaaaaaaaaaaaaaaaggaaagaaaatgctctcctcagcacggaatttgaatagttatttaatgaatgaataaatgatcaaccaaagtgacacttgtttcaggccctgtcactcccgattaccactggggcggtgacagggtctgcaggccttctccgtgcagaggcccagtgatccacgctgtgggctttgtgcgtcctgaggcctctgttaccactcctcagtgctgccactgtggcacggaggcagctacagatcctatataaacgaatgagcacagctatgtgccaataaagctgtatttttggagactaacacttgaattttgtgtgattttcacatgtcatgaaatagtattcttttctttttcttctgccaaacattaaacaatgtgaaatccattgttagctcttgggccatacagaaaagcaagcagctggccacatttggcctcttggtcataatttgccaacccctcattcagagaaatcaaaaggctatttgttacataattgttttctcataaaaagttattcaaagactagcaaatgctgcttcgtctgtgcataaaacagaagaaaggagttagtaggaagcaaggctgtgtgtttccgacgcttcccactgtgaagggcacgtctgcaccctggaccaggcctttgcaccttcaagtgctggggaccgtgtgcgtggggagtgctgcgtcggggtttttacctggttgcccggacctcaggctgctgtcagaggtctgaagcagccacgtgccctggagaggaggcrgtgtctgcggaggttggtcaagagtctgtatcctgggctytgatggaaatgagccctgaggcatgttcttggtgcgcctgttttcatctctaaagtgagcctgttaaacacatgggtttttccttccaacttttaacttttgctttcaccagttaggaatcagatgacgctttccagaatttgtcaagttagaccatccccaccccacacagaattgatggcaggtccatgtacctgatgcttgccgcttcccaactggaactttaaatgtttaccatattttaatctgatttttaaattacagtttaccacttacctgttgtaagaaatcttttcagccgggcatggtggctcacacctgtaatcccagcactttgggaggctgaggcaagcagatcacatcacctgaggtcaggagttcgagaccagcctgaccaacatggagaaacccagtctctactaaaaatacaaaattagctgggtgtggtggtgcatgcctgtaatcccaactactcggaaggctgaggcaggagaatcgcttgaacccgggaggcggagattgcagtgagccaagatcacgccattgcactccagcctagacaacaagagcgaaactccgtctcaaaaaaaacaaatcttttcaagatacaaaaaacagaccaggcccagtggctcacacctataatgttattgctttgagaggctgaggcaggagaatcacttgaggccgagagttcaataccagcctgggcaacatagtgatatgacaagatcacttgagcccaggagtttgcagctacagtggctatgatggcgccactacattgccctccagcctgggcgttggagcaagactctgtctctaaaaatataaaatgagatgggcatgatggctgggtacagtggctcatgcctgtaatcccagcactttggaaggccagggcgggtagatcatttgagatcaagagtttgagaccaacctggccaacatgatgaaacccatcttctactaaaaattacaaaaatcagctgggcgtggtggtgggcacctgtaatcccagctactcgggaggctgaggcaggagaatcacttgaattcaggaggctgaggttgctgtgagccgagatcgtaccactgcactccagcctgggtgacagagcaagactctgtctcaaaaaaaaaaaaaaaaaaaaaaaaaaaacctgggcatgatagcttagtgcccgtaatctcagcactttggaaggctgaggcagggggagcgcttgagctcaggagttcgagaccagcttggacaacatagtgagacctcatctccataaaaaatttaaaaatgagtcaggcatggtagcacacacctgtagtcccagttactcctgaggctgaggcaggaggatggcttgagcctgggaggttgaagctgcagtgagctgagatgatgccattgtcccccaacctgggcaacagagtgcgaccttgtctcaaaaataataatttaattaaaaattaaagaacaccaagaaaaaatacatcacttataagctaaggcatcagaatgcctgagacatctttgcctccagtttcttctctgtgtgagtgaacatgagccaggtggggtcgtgacacgctgactgctgactggccggcctcccacaccgaacagcttccctggcacctgttcccatacttgttgagggtttgtatgaatgtaccatcttgaatgtatttggcagccagtattttatgtttgtattagtgaaaacagagagtgtagtaggcagtaaggtgtctgaggggttggagaaattggcattagtaaatgtgggagtaagcaatatggaactttttataaaaatgctttattttgtagctctattactgtttacatttatgagattcaaaaccgtttgtctccagtggcctgaatttaatttagccaaggataaaaaactttactcagaggatcttttaaggtcccttccaatgaaatggtcttttttttttggagacagagttttgctcttgttgtccaggctggagtgcagtggcgcaatctcggctcactgcaacctccgtctcctgggttcaagcaattttcctttctcaccctctcgagtagcggggcttataggaacccccgacacacaccaggctaaatttgtgtttagtagagacgaggtttcactacgttggtcaggctggtcttgaactcctgacctcaggtgatccgccctcctcagtctcccaaagtgctgggattacatgtgtgagccaccatgcccagcctgaaatggctttatttgccacccagtttgatgaatgagacagatttgggagttagctttactttctttttcagccaagtttttaatgttggaaacctttcatggaagaagcaaacttcccagtgttgtattttgcctcacaagctgaacacagttctgacactagtgtgttttcagaagctttagtccttaacggtgatggacgagagcccctcgagtgccttaggagcatcgtggctgggatgtcacagcagccaggattccgttttaaatgtgaggtaggagggatctgagcaccttttacaaagtgtcttttcttgatgttttctctgcagtctttaaaccagaggagttacgccaggccctcatgccaaccctagaagcactgtatcgacaggacccagagtcattacctttccggcagcctgtagatccccagctcctcggaattccagtaagttaattcataaaaatagattataactttgctggtgtgacttctgagtgtccattgttttatctcttgaaattagataaaataatccccctgccttgaagattgttytcctaatataaaaaactgttgtctgttaacagttatcagtgaaagtgtttattttgtttgatttcacctgttcatgaagccctggtccttggaggaggggtgcactgaagcaagggaagcacatgcccctgagacttcactttatatttggggccttgtrtcacttttgtctgaaagaatttgtgaacatgaactgtaaaaaaatatttgggcttctctcttttatattcctggatagccttgcaaaggccatggggacccagccgattctatgtagcagtcattactagctttgtgtttatatttgtcttgtaatttcattttgcttgctaggatcaagagtgaatatctagaaatacacactgtttgataaacttgttcactattttaattcagtggattaaagatctatttttaaaattttttgttagaagtatcttttaacaatttttctttacttttgcctttggagtattataatgtgatcatacctgaaaatactaattacacttttagtgagtaaaatcagttgcgtcagaggttattttcttttcatttcctatttcttactgttgggaatggaagttattttggtgctttctgtttctattattttaaaacaaagctgccagatgagactggcatttggatattgggggattccctatactgagaccatttttttttttttaaggactattttgacatcgtaaagaatcccatggacctctccaccatcaagcggaagctggacacagggcaataccaagagccctggcagtacgtggacgacgtctggctcatgttcaacaatgcctggctctataatcgcaagacatcccgagtctrtaagttttgcagtaagcttgcagaggtctttgagcaggaaattgaccctgtcatgcagtcccttggatattgctgtggacgcaaggtacagttttaagtttttccggaaagtgaattttcctggttaatmcagccagaggggtgttatactaatatgagaccaygcctgtatactgggagtgcatatgtgcaatctgctgtctggtgacacagttgatgcctgaagcgatgtgatgggtgatcagagctgggtgtacaggcgcttactgagggaggccatggggaagcgtttctggctgcccctctctgcctgtggtacctgtctgtagtgaatgtctcttagagccagttctatcacatgctatcccaaaatgtctttaaagctactaaaattgttagaaaactgtctaatatactaacagaaataatttactagtctctatagtagactagaacattataagacagtaaatggaatgtatttttatataaaagtatttctcctttatttttgcagtatgagttttccccacagactttgtgctgctatgggaagcagctgtgtaccattcctcgcgatgctgcctactacagctatcagaataggtaagcgtcaagcagcatcctgcattatgtcttagggcaaggcacgttcatctggttatagtctgtgtacattatttctttcctgaagttccaataaaaagtggcccaatttcaggccgggtgtggtggctcacgcctgtaatcccagcactttgggaggctgaggtgggagaatcacttgagcccaggagttatgttatcagccttggcgacatagagaaacccccatctctatttgaaaagaaaaaaaaagagaaaaagtggctcggtttcagtgtcttgttagtcacttaggcccayggcctcttagttagttataaagcrtacttttacagtgtaaaaactgtaacctcagagccaagtcttgccgtactacttggattaggtacgttatttcttcagccctgcccgttctaaaacgcagccctagaagcaagcgtctgaagttgagagtaactctgataaaggttgacatgcctttttcaagatgttcatagagtagaaaatgtggattttactattctrcctgcaaatatttgcctggtaatttggcctgatcagtctcatggaaagacttgcatgagtgctgcttcctwwaaggcagaggaaaagggtccatgatctttatttttaaattttacactagcagcacgatacaaaatgagatctggtgttttaattgagttcaagaatgtgattctgttgcctcctattataagatggccatttcagggttttgtgagtggtggatctgcttaagaaatacttgccattcttttggaatatgaagatggctaaagaatagatctcctgtcttaaaataggtagagagtgagaatagtattttttgttgtggtttcccacaaaatacagcttgcgtagttttggagttgtttgagaagtcagcttatctgtaccgcagcgtgtaagtgtccatgtgccgctgcagtgtgagcgcaccatgcgtggaggcacaggtcaggaatcttgctcaaactgtgacgttgcctctattttatgagccagcagctggattctctgtggccaagatagaggtttgtgcctgttctttgtctttaggttcaaataataagcgtcaacagtggggtttggcgttttttattattttactctcatttggtcagagtaattatgtcctatacttcaaagaagacagaaggctttttgttatttgttcacaggcctgaaaattttggagttttatggttatgtgttttaattcttctatgttttttttaaaaatccatattcaagataagtaataactcccatcaaaaycctatttttaaaaaaaatccttttgacacaaaaatgtctcaaaaaaggttcctaagccttttctattaggaataagcctggcctgcttattcctaatactgttcagtgtagtgaaacactggtgcaagggggaaggacagaccctaaactgcatccctgctagaagtgcagcgtgtgcaattgtcctgctgaaaatagtttaacattcagagtctgatttccatctcaacttcccctttatcaatagaaacattttatgaccaagtttaaaatgataccatagccccttcctaatgggatctctcccatagtgacttgctgctctttgggaagttctggccactccttttatgcttttagccccatgaccttcagcagaccccatgatgtattaatgtattaagcttagccttgtctgtgatacagacaatagcgtcttccctcgcagcctcattttgtcaggtcctcaatgatgaaataatgaataggaatgcactttaaaaaccatttgtgccaagcaaaataaagttaatgatatcttcagagaaaggttaatattaactacacccagaaaaatgccacccctgctacgttgcccaacacagttttggtctagaaggaaggtagattgtttaccactgtctctaaagtgttgtggggcctgttcctgggtccgttggtaccctgcstttgctgatttgcacagattttggtcttttacattgagagcaattaaagttaaatggaattggtaggaccaaagagtcattgatggcatatgaagtcattgatggcatataaagtcattgatggcatgaaagttctgaaacgtctaattttatttctgtatagaacttcatttttactaaacaaaagtaatgtatttttaagagtggaaatgcaaataaaggagttccattttattagtgataatttttaaagcgtaggcgtagcgttcctcagacgatcacaggcatgctctctagaacagtgtatctgactgagtaggttagcatattatcatcctgagaaagcagtggcctgattctgtaacaaatactttaactgcttatgtttttattttcaactttgactatttatgaacactgcagtgttcttatgawtaattgtcttggcacttgtagtcctaaactgggcacttagaacaataaaaaatcctacagatcatttaaacaagtgaaaccctaatatataagtgagcgtatgattacattttcacttgttttcatactttgcaaatttgaaagtaactcatgttggaaaaactgttctttagctttcccagttagtatctgtagataatataagtattatctatagatatcccagtgatatgtactgatatggtacttaaaacaatctgcatttgaaaacttagtccatatattaaattacccttacagataaactatgcagttccatggtactaactwtagcaaccctgaaatgcatcatcactggattatgtgaagtatttctcctttgcaattccatattcatcaagctgcttccttcacaccaggcaaaatgtcatctaggcgcttaagttgaaaagtgaatttctaaatctttatgtgtttccagggagaataaagtgtggactaggtaagaaggtaggggcagtctggcaataacatctatcactcatwgactgccagggttgctttagctgattttactagttgggggtgactgttcccttttctgtgtgctgtcttcctctctcagaacrgtaataaagtgaagccacgggcccctcttcctccccttcttaaacacgaacaggctaarttgtccatttctccagcagttttgaggcagacaaggagtctgttgataatgctttgcctccccggttctgatcctgggattttccagggtgggagtcagtcatacaggaagagcctcagtttcccagccactgcatgggctgccattccaccaccagtgcctccctcagtgtcactttcctcggtggggaaggatgggtttatggttcttgtttcctggatgttgctgggcttgctgtccttaaataaaagcaaaggatttctccaggattttaaaaccatttagactcacctgtgattacggtgggagtttcatttcagaatgtcttgaacggtcccttctagttggccatagttctgcgtgtttgattgtatcatgaatggggcactcarttaggagttttacttataaaagggaagtattggggattgagggaatgtctttyttgtgtattgttttggttgccactgaattggtttatagtttctgtactttaattccttcttgccagtgatgacmataccctcctgcacacggaagttcttcttcataccggattttaggatatttacaaaatagtgaatggccagaatattgctrtagttcattcagggaaaaaaaaaatacatatttaaagaaaaacattaatctgcctcttgcctgtcagagtgttaaatcctgacataatttattaattgagttagtgccaaataaattagtcccagcaagaaaccttcattaatctagtgaatctgtcatgttcctcatcaaccaaacacaaaaaattggctcatcttgagatgtgcatgcactgaagttgtatgctttaaaatttgctgtatgtgtgtggttagtgaaatacaacagacaaaatgctcaatgtattgaattaagattagatttgggacttgtgggggacctgtcctagtggtagtgaactggccacacggtggcccacgcctcaktcttctgtagccgtgtgagtgcgcaagtgagtgagactgcagctgccgcgtcccattctgcacttggtggttcagcctggcgctcgagtcctgtcgcactgtttttaatactaatccttcctggcatcttgtagacatagttttgagcactaaaccgcattcgtgctgccgtcgctacctgacactcattcttctcgcttgtgtgatccacctccacccgcttgtttattcttacggtattcttgtgtactcatcttgttttatgcagcatcagcctgcatttctgttgatttctcatttatgtcctttccaaacatttagtagtttttattttaattgtttgtatttgatagcttgagcccaggctctatattgtcttacaagaaattggggtgatggataatttctcaaatgcagattgttctttaaagattaactctaaattcacttaacttggattgcccccaagtcagaacagtcattcgctaagtctttcagattgatgaatgattggtcccagtaccaaaaatgtcaaatcaaagcttagaattgaattttcaaagattgttcatggatttacatatattgtatttcttatacaatatatcacatttcttwctctgtatattcatattgataaatgggtggaaagtctttgaccctgactgcatttatgttaaatgtttgtctagaatatggatttggtttcatttgtattgtaacacaattaactgaatgattaacatgaaaaaaaaaaaaacaggaaaaaattaaaatcagttctgggtgctcagcattttcatacatttaaagatctggcttaataccggaaataaaatctctgaattgctgtcaagcataaattttccattttgaaaaataaagctatttcagtttaaattgcttttttaaggccttttgtcagactgttttgttcaagtaaatttttccatctcaaaccctggagttatatttgactttctctgagtaagaacaaaattcagattcctaaatttgggctccatgcaattctagtattaacaactccttgaaaacatttgcctcttggagccggaccgagcctgtcgttgttagtgatgatggcctgtgatgtgtgcaatgagaccgaatgctaatcaatgctttgccttggctttctgctctgtgttgtcttggtgtctgcgtcttacctctgtgtctgtgctatttgttcccttccctgttctctaatcctgcctttccccacctgcccsctgttcctttcattgtcctcactgacccatcaatcaaccaacaacgcccccccttcgtcgtggtgctctgccctgctctgattggtggcttcgttgcttgggtggctgtgtgttatgatggaccagttcacccaagtatggccttcttgctgacaggtatcatttctgtgagaagtgtttcacagagatccagggcgagaatgtgaccctgggtgacgacccttcacagccccagacgtaagtaccgtcctgtcattttctctggggtgagggagggtgaccttaaattgttttttcctcttaccaatgactatraggaaggtaccggtgccattttgacttccttgcaatgttttttggttttttgtttttgagacaggttctcattctgtcacctgggtggtgtgcagtggcactatctcgactcactgcagccttgaccacttgggttcaagcgatcctcctttctcagcctctcaagtagctgggattacaggtgcacgccaccatacccagctaatttttttgtattttttgtagagacgaggtctcgccatgttgcccaggctagtctcaaactcctagactgaagcacaatccacctgcctgggccttccaaagtgctgggattacagtctgttgtgttgtggggtttgtttyatattaactatgatcacatttaatttgaatatgtgtatacgtatacatttacactgaaaaatgtgttttggctgaaccacagcgccacctctgcctttatcattcaaggcggtggtactgtggcctaccactggagaccactggtctctcttgaccttggtctgtctttttttctaaaataattgctttttcctagtggttccattttggggaattagaaattttctttattttaattttttttttgaaatggggtctcactgttgttacccaggctggtcttgaactcttgcctcaagcagtcctcctgccttggccttccaaagtgctggggccaccatgcccgaccatgtaaattttcagttatacctgagaaaccaggtatccccatttrcagaactggcagtagcaaaaaatgagtttggtgtacatgccctgccctttacatttagtttatctccacttaaacctccatcctttcagttactgaagtctaatccagattaatggattccagtgttctccaaccccattttttggcctaaagtctaaatgtgtttccttccttcactagtgctttacctgttgtttaccagctccaaagtggacagctatgactttgttagttcactcctgcacagggttaaacttgtatttccagtgtttattatccggcagagttaccttcgagtgttagaatggccactgtgtggcaagaaaaagcaaatgcacaaawtgtgttatcaactcatttctatacttaagtaactaaaaacctgccagccacccaccacatctgcccaggtctgccgttccctcttttcgtcagactgagttccccagtcttccatgattcctaccaccctaccacagtgtgacttccccaacagaaaggaagggtttgccacaggagcttcttccagcagtgtaggcacttacgctctaccattttctttgttcaaatgcagaaaaaacctaacttgtaagacaaacaaaccaaagtgactgaaattctacattttcaatttatttcccttgtcatcctaattctctttagtctagttgtgtgattaataattggattgttgcctgagcaacatagtgagaccccatctctacaaaaaattaaaaaaacttaacagggcgtggtggtttgtacctgtagtcccagctactcagaaccggggtgagtttgagttcagccttggcaacataatgagaccctcatctccacaaaaaatcaaaaaattagccagtcctggtggtgcatgcctatagtcccagctacccaggaggatcacttgagcctaggaggttaaggctgcagtgagccatgrtcacgccactgcactccagcctgggcaacagagcaagaccttgtctctgaaaaaacagaaggaaaagaaatgatagtggaatatgtagaaaaagacattgtagtgttctrcgaaattaaattttctgttcattccgttattacatgtacttgagattttaaggggccatcatgtctttttgtttgaagaaytagttacaaaataacattccagagaccctatagtttatactcaacagataaattttagttaataaaacatgttttcttattttaaaacaaggacaatttcaaaggatcagtttgaaaagaagaaaaatgataccttagaccccgaaccgtaagtatatagctatttcttttttactttcagttttggtttgaaatcggtaaagttactccttatggagtgggttgtgggtaaaaacattggaaatatgttgccgtaagtggaatttctggtgtgaggttatcttttagatatagatttcttttaaacttaaacaaaatatgtatgtctctgtaacatgtactctagttactggattttaacaatgataagattaaatggatgttttagttctatgagaacctctctaataatttggtcatgggtgtctttaagaagccatttagcatgaatctttagagaccaaaggttaggagtatttggtggggtagtactagtagtatcgtttaaagggaaataccagaaagaaaacctcttggaaactgctttctcaaataatgtaaagcttggcacattttcttgccrttgttaagcactttttttgttgttgtttttgttttgttttgttttttgagacagtctcgctctgtccccgaggctggagtgcagtggcacgatctcggctcactgcaggctccgcctcccgggttcacgccattctcctgcctcagcctcccgagtagctgggactacaggcgcccaccaccacgcctggctaattttttgtatttttagtagagacggggtttcactgtgttagccaggatggtctcgatctcctgacctcaggtgatgtgcctgtctcggcctcccaaagtgctgggattccaggcgtgagccaccgcgcccggccctgttaagcacttttctacagtgatgagtgagagtgctgcatttgctaaccttgcttcataacagcccctraagagacttcagatttttttcagtgtggtagcctcttcccaggtccccaatgtaaagttctgagggcgctccaaattggcatggcgatactggctattttttgtccccagggtgagcacaggctccaggagcgttggctacttgggaagtgtgggctgtgactcagccaaggcaagaaacagaccctgctctccctatcctgaccctctccagggaagccagtggctagagtggcaagcacagatttctacccaggccacctctggaaacctagcttgacttttggcaggttacttcatctctaccagcacatggtacacagacaggacgatratgtgaaatcctagagctgtagtcttggcgagatgccagggcagagcgcccacccctctcatgaccatcggattgtttttcctgactttccacctttcttttcacattgtgtctttctctccttggctttatagtttcattattatttatatctacttttctttcctttttttttttccccctgagacaagtcttgctctgtcccccaggctggagtgcagtggcgcgatctcggctcactgcagcctccgcctcccagattcaagcaattctctgccttggcctcccaagtggctgggattacaggtgcccgccaccacgcccagctaacttatgtatgtatgtatgtatgtatttatttttatttttgagatggagtttcactcttgttgcccaggctggagtgcaatggcacaatctcagctcaccgcaacctccgtctcccgggttcaagcgattctcctgcctcagcctcccgagtagctgggattacaggcatgtgccaccacacctggctaatttttttgtatttttagtagagacggggtttcaccatgttagccaggatggtctcgatctcctgacctcgtggtccacccgcctcggcctctcaaggtgctgggattacaggtgtgagccaccgcacccagcctgtatttttagtagagacgaggtttcaccatcttgaccaggctggtcttgaactcctgacctcgtgatccacccacctcggcctcccaaagtgctgggattacaggcgtgagccaccgtgcccggccaatttatatctacttttcaacttcaaaatatattacattcaagtagtaggtgccaggcagagggaacacatggatgagtgaaggggtctccttcctgctggttgtagtctagagagacagctgggtaatggcacagcctgcagcaggagacagtacaagtgagtcccagacagaagggaccctgcttgggcagagcggcatcaccacagttgcgcctggtttcctggacaagatgacatttacattgaagctgcagagcattctagaaacaaaggcatgaaagaacacaggttgctcaataaaactacaaggcccctagagtgggtggttggtaggcagaggttaacttcatgaagggccattacacygtctcttgacgtttagactttatcctataatgtgctgaggaggttttgaagaatagcactggttctagtgtaagagggtcatctttggtctatgaggtgaactgaacagaagaggagaagacattgttctgtagtagagaagttagttaagaracacaaagcaggagaaggcaagaaactgaaacaccaattaaagcaagagcttttggagccaggcaggggggcttgctgggggactgagggaaggggagacatctagttggcccataataattgggagtgggagaaagggggaaattcaaaatggatgtcatggggtctagaatatgcagtgtgttttgtttgtttggattttgtttgttgtttttgaaacagggtcttgctgtgtcacccaggctggagtgcagtggtgcagtcatagctcactgcagccacaacctcccagacccaagcagtcctcccagctcagccttctaagtaactgggactacaggcacacaccaccatgcccagctaatttttaaattttttgtagaaatggggtctccctattttacccaggctggtctcaaactcccagtaaagcaatccttccaccccagcctctccacatgctaggattacaggtgtgagccactgcacctgtccccagtgtagttttgggggacactcctttcccctgacatgggagggaagagttgagagcaggggacctttggagacggcacaggaattgaggaagttcttggccccaacctttgaaattcttagcgttggggatgagctcagtggctgagttgtcaaagacagagcttgtggaggataagcactggaggaaaggagtgcagattcagagcagctgccacgtggaagggagaggtagccagacagagccgggctgtcagagagtgccataggaccatgaacgggtgccgccatttgtgtgtgtgtgttttttttttcacagatctgtgtgtgtgtcttttctttccctccagcagactgggcagagaagccagatgagggtagacccatggctgagggcttgcatagcacgtgcartggacagattaaggggacgagggcaggggcacactttagaggagctgtagctcaaagctcaggagcacacagggaatcacattactcaccagtcccttcagccbrtcctcggaggtatgcattgtggtggcagcaagggagggagctgacaaaaacccaaggtctwgacctcaaaatgtcatcttggcatttaagattcctgggttgaggcggttcctggaggtgacggagccctggtgggccgtggttgtgggctgccgtagaacagtgtggaggattcrtggggaatgggtggtccattctctygcttcaccagtgtttacttgaataaacccttgtcaacttgccagtaggcctgacacattccaccttttgtaactgactcagaactggtgtttttgtgcctcgcgcctagcgtggctgctctgaactggccgtgtttcccattagtatcctcaacaattttagacttaagagcacatgtttagaactcaaagtattgttctctattttttaagtcagtttwggcatgtgaaatcacctagagaaggcattgttcttgcaaatgtgtagcagtgtcagaaataccggcctgtgaaatatgtatttgtcgcagcaatttttaaaaagtaaagtttcctttctggttgcaaagggagattgggagaaaagaggaatgaagcgcttgtacaaacaaaagaagaaagctttttcctgtagaagatatcatacggatgcattgtaaaatatagctgaatcagccaacacacgcattaatgtcagcactactcaaagtaacccagagaacaaggtgtggacgcacacacagacttctacaagtgactctggtcttgtggttccgtgtgctttaacagtgcgccttctttgyctcctagtttcgttgattgcaaggagtgtggccggaagatgcatcagatttgcgttctgcactatgacathatttggccttcagggtgagttgtttcccctggcctggagggcagttctgcacagagccagtggcggggcagttgcagtggctactgcatctcattcattgttgtcagcaagaattcagcgattaagagagatggcagttggttctaaatttaagttctaagcgtttgtccgctttaggaattgtggaatcaaagcagtctgcctcttcactctttaattttataataatgtgatttaaactgccaacaaactatctgaatgctgcattttgttggtttgacaatttacatcattatatacagtctcatcataccactattattttgcagttttgtgtgcgacaactgcttgaagaaaactggcagacctcgaaaagaaaacaaattcagtgctaagagtaagtttcgggaagctttctgtttcctggactgcacattttagaaacttgtagaaattgtccccattgttctttggttcctctcaacacatggttctgaggtycggttgtcaaagattttcgttagttttttccccagtactttgtatttttcttgtctcatccttaaggagagccaggccagtcatgmgggtaagaatgcaagaatgttcttcaggggcttcactgagaataggcagcacagctgtgagtccctgaagtctgtgcttctcagaatggtcatctcagccacggggctgctgagcacagagctcagagcaggactcgcagccttgggctgtggatcttcatcaagtgtaaaacatctcagtccacccttaaagggaatatttggcctgattgttatatgaaagtcagcatttatgatcagcgcatgttttagatgaaaggttagatgtgcagtaaactttgtaaattctgagaaaatttatcaacagattattctcaagtggtttagacctaagacccctcacccctcgtgcgtgcatgtgtggtgtaatgttggccagcactctctwaccctgggccctatgtgggctgccgtgggtctgtcccgtgggtgctggsttctgctacagtggggtatgagccatggcctctgggaaccagccaccaccccaggagmggtaggagcctggcctgcatgtggacttggctggacatgttactrcagctggtggtgcctgtgcagaaatagaaggaacaacctgttactgctagaagtaactttgcatgagtagactttcttttttttttaatttgagacattctcgctctgtcgccaggctggagtgcagtggtgcaatctcagctcactgcaacctccacctcctgggttcaagcgattctcctgcctcagcctcccgagtagctgggactacaggcgcccgccaccttgcccagctaatttttgtatttttagtagagacgggtttcaccatgttggccaggacggtctcaatctcttgaccttgtgatccgcccgcctcggcctcccaaagtgctgggattacagccattagccaccgcgcccggctgacttttttttttaagaccacattgcattgttatcaaaagtttatggttatttaatctttatagagtcaattctcaagtcttgggatggccttctgcagcttgacgcgccaggctggccttttgccgagttaaccagcaaacccacacaagaacggcaactgcagcagtgttctaacattgacttgccagctgctccctacagctgtcacctttctctggcaggacaggtgactagcatgttgctcaggagatccccaatagaaccagggtcatttggggagctcagagtagaagagagatggaaatgctaggatggaccatgcactgggggaaggggaggaggaagccaccctgtagacttgagactgagtcttaattcaagttcaaactctgttgttaaccaacatccaaagttatgcaatagcttacactgcctctgttaaaaacttgtgaaatatcactcattgataaactattgtaatacttttccttagctcggtttctcaactgaggcactgttgacatttcaggccaggtaaccctctgttttaggggctgtcctgcgcattacaggattttagcagcatgcctggcctctgcccactcagtgccagtaacaccttcctcagcaattcattacgtctgtcagaaatgtctccagacattgccagatgtcccctggaggggcacagttgcctccatttgagaggccctgcttcagaggattcactctgagtgagttcgctaatgcatttgagcaaattggaagttcttccctgggccagaggctcagtagccaaaacagaattacccagagaactaggcctccgtagaacagtcattgcctgaaaggggcaggaggtgactgggcggaatggcacaagtggccccagagcaggtccagccccctcccaccgcagcatccagaaagacccgtgggcattcggtagatgagcccaagatctagaaatggaacattactggagaaaagggcctaggagactagaggtagctctactctcagtgtgagcgtgtgtcagcacaggcgttgtggtgtctgatcacagagtaaaggtatgcttccttaatcttgcattgaaaaccatctccttcgcatacaccatatgcaaaaccaaattcaggtagattaaaaagcgagaaaagtaaacaaaactgcagatgcattcaggataaaagtaagataataattttattgtgttgagttatgaaaagccttccttaaaaagatacagcccagagatgagaaaggaaaaggcacaaaaggcccctgtcatgcgccatggatgaagatacaagttgaatgccagaaagcgaggggcacaatttaaagtgttcatttttagatttagcaagtctactttcacmcatgtatcctataaaaatatttgcacatatgcataacggcacatacaaggacataactgcagcaatggcaaggagtgatgaaaaagtaggaacagtggccaaatcgagtgataacagaaaaggaggcagcactgtgaggaaggttgcgcagagtgcaccgcagtgagcacggcctgcgcctagacccctgtgctgtctgagaccacctctggagtatgcagccatgtgtggatcacaggtgtcaaatagcgaagttactctggaagagttttttttgtttgtttttttggggggtttttttgttttttttttgttttgttttgtttgtgcagacagagtctcgctctgtcgcccacactggagtgcagtcacgtgatgtcggctcactgcaagctcttgcctcccgggttcacgccattcgcctgcctcagcctcccgagtagctgggactacaggcgcccgccaccatgcctgtagtcctaattttttctgttttttagtagagatggggtttcaccgtgttagccaggatggtcccgatcgcctgacctcgtgatccgcctgcctcggcctcccaaaatgctggaattacaggcatgagccatcgctcccgacttaattttgcattcttagtggagacgggggtttcaccatgttggccaggctggtctcgaactcctgacctcaggtgatccactcgcctcagcctcccaaagagctgggattacaggtgtgagtcactgcgctcagcttaattttgtatttttagtagagatggggtttctccgttttggtcaggctggtcttgaactcctgacctcaggtgatccacctgcctcggcctcccaaagtgctgggattacaggcatgagccattgtgcccggccacatttttctttttaaatcatttttattcaggtacaacttatccaaaaatcagcaccactggtttgtttattgcagaaaaatgaaatttagaagtttggtctaaattttctagctcgctaaggaatcttckaaaattcccaattttcctatttctcactaatgtaggaaatatttaaaagccagcaaagaagaaaacatcttttaaaatctcattgtctatacgtaatcactaagaaccttttgcaactttcccttatagttytttaacctgtatatgaggcgttctctgtcctgaagtaatgtcctgcctctggctagctcctgtgacggtagccctcccggggctggccctgggtgaggaggggtggcggcggggaggtgagcccaggaaaggctgccctcgccaaggctcggaaacttcattcgtgcaccgcacgaggcgatggctcagggcaggcttggacaccaatactttgccagctcctgaggcaccggacaggctctggccagagcttaattggttagccctagaacgttccacgttcacgtcagactccatagtagggactttctcctcagagctgggcaggaggagcccactgagggtgtgccatctctgccctccagggaaagcgggaagcaacagggaaacatccatctgctccgccctagagcccctgtcaattttggacccaccgctataggtcttctgccccatactgttagaaaaagatgcaggttacctgggcacgtaaacggttttcaggagtggagtgcctgagatcccagagtccacctttcctttatataacactcgtgtcacaggacagattagatttcttccgtgtttggagaacattagtcctttaaaatatcagcctgtgctgcaaagtggggtggattctctagtctcagtcactgtctcagcagtgctgttgaagccctctcacctgctccttctggacttcctagggctgcagaccacaagactgggaaaccacttggaagaccgagtgaacaaatttttgcggcgccagaatcaccctgaagccggggaggtttttgtccgagtggtggccagctcagacaagacggtggaggtcaagccygggatgaagtcacsgtcagtgtgcctgctctctacagtgctctgcgagcagtccccacgcccgcttgccagagcctgctctctgcaaagctcttgagtttgaggtcrtccttccaagactttgcagcagcgaatgcgtgcagtagccccctcagctgcggttgtcctgtctggggttttagttaccctatacagtgcagtaagctattttgagagagagaccacatamcatattatagtatactgtttataattttcttattttattattacttattcttgttaatctcttgctgtgcctaatttataaattaaaattttgtgaccagtacaggtgtataagaaaaaacgcatagaggttgatactgtccatggtttccagcatccactgctggtcttggaacatacaccccgtggataagggggactgctgtatagccagtcctcctcagaatcccgtatttcattcacagaggtgcagttccctagtgagggaaactggtcagaaagcaagtgctccctgctccggggctgactggcccatagggaggactccaggccacggtctgaggaggtggccatgcctccgctcatctgcagtggccagagttagaggagcaggcctggtgtgcagaagcaccttgtcagcaacagcctttgtaaatgtccggctctggcttttgtttcaggtttgtggattctggggaaatgtctgaatctttcccatatcgaaccaaagctctgtttgcttttgaggaaattgacggcgtggatgtctgcttttttggaatgcacrtccaagaatayggctctgattgyccccctccaaacacgaggtagttttccagctccttccagggcgtgtcattcagtgagyygtgttaggatagaccagggctcttwagtgtcccagaggagcctgtgagccttcataggggattaaagtaaatgaaaccacaattaactaaccaaagtagttagttttgttttccattaaactagcgggaaatgaactgttgagatgactgcagtgagcgtgttttgtgtggcgagtctgtgtgggacccgctcttacctaacgcaggtaaacctggggagttgggatgggacagcctggcacctgaacagaggaagtagctctgccacgagggcttcatgtgcagtcaggaatctgggcaagaaggaactaaaagtggcttttctcagtttgccttaactgtggctctctgtgccgagtggtgcyattcatccttttgttcagtgacgaaaactgaattccatttaactgattggcagcagggttggtgactggttggtttttgggttttggtttgtttrtttgtttatcacatcctgtttggtggccagtgtaaataccatcaaaagaaaaactggccaatcacagcactgtgggaggccgaggtgggaggataactggaccacaggagtctgagacaagtctgaacaacaaagtgagaccctagctctacaaaaaataaattatctgggcatgatggtacatgccttgtcatcctaactatgtgggagtctgaggcaggaggattgcttgagcccatgaggttgaggttgcagtgagctgtgaccgcgtcaccgcattgcagcctgaatgacagagcaagaccctgtctaaaaagtaaacttccagggtgttgtttgttgcttgtgtttgatttcagatttgagggataccctgagttaaacatgtgcctccttcccacaggcgtgtgtacatttcttatctggatagtattcatttcttccggccacgttgcctccgcacagccgtttaccatgagatccttattggatatttagagtatgtgaagaaattrgggtgagtttggattaaattatttggaactagtaagaaccctttattttttactgtatgtttattccgtgaaataatgggtattttaagttttatgcgtttttatttttccatcctaagatcaattcagaatctccaaagctcctctttccaggtgctccccgagcctcacaggtctggctcctgggcacgtagcaagctctttccctacctttacttccttttcattccctttttttttttttttaactttattgaggcaaagtttacatatcatagaattccccttttttggatatatgattcagtggtttttagtaactttacccattagtgcaactatcacaagtcagtttcagaacattgttattgrcctataagatccctcctgctgcggtggatcacctgaagtcaggagttcaagaccagcctgaccaacatggtgaaaccccatctctactaaaaattaaaaaaaaggccgggcgcggtggctcacacctgtaatctcagcactttgggaggccgaggcgggcggatcacaaggtcaggagtttgagaccagcctgaccaacatggtgaaaccctgtctctactaaaaatacaaaagttagccgggcatagtagcatgagcctgtaatcccagctactcaagaggctgaggcaggagaattccttgaatccaggaggcrgggggttgcagtgagctgagattgtgccactgcactccagcctgggcgacagagcaagactccatctcaaaaaaagaaaaaagaaagaaaagaaaaaaagaaaaatacaaaaaaaaattggctcacctagtctgtaatcctagtactttgggaggccaaggcaggtggatcacctgagatcaggagttcaagaccagcctgaccaacatggtgaaaccctgtctgtactaaaaatacaaaaaatgagccaggcgtggtggcgggtgcctagcgtaatcccagctcctcaggaggtgggggcaggagagccactcgaaccagggagacagaggatgcgctgagtcgagatcatgccattgcactccaccctgggcaacaacaatgaaactctgccccccgcccgcaaaaaaaaaaaaagaaaaaagaaaaaaaatgttcctcctgccccttgctgttaaaccttccctgccccaggcgaccactaatctactttgtctctctgaatttgtcttttgtgaatcctttgtgtaaacggaaccctgcagcgtatgctgtcttgggtctggcttccttctctagcmcttggtttctgtactctagacctgccccattcccttctgaaacttgaaaaggataggggcatttgatcaaagtgtcttgaacagaatgaatgaggtttatgttgacattgacccttggagaaaaatagtcaaccgaactgcctttacagtgcacaggaggaaggggatggcattgccttgatgagccatcatattccctggttctttaatgaggcctcaggtttcttttgcagcctcggccctgccctgtgtgtgcaccccaagggagaagtgttgcagggctaatttgcaggcttgcatttgctcaggataaagttcgagccttgcccccaccacacccagctttgtgggcattcattctctctctctggttacttctgtcctggctttagtccttgctcctctgctataactccttaaaggcagggccgatttcastggcacgttcatctgacgtgtgtgcgtgggtcctgcaggtawgtgacagggcacatctgggcctgtcctccaagtgaaggagatgattacatcttccattgccacccacctgatcaaaaaatacccaagccaaaaygactgcaggagtggtacaaaaagatgctggacaaggcgtttgcagagcggatcatccatgactacaaggtacccggcgctgaaggaaggtggtggcttttgtcacaactgaggggaggatatttgtgtgcctttttcttgcattcgcatacttgttaattaccttcacttatgaggattagaaagcagaaaaataaaagcctaaagtgagaacttagaagcattttcttcagctgattgaggctttcccctggccgtctgagagcagcacagttggagctgtttccatcagtgggcattggggcctgtgcatcactgttgcacacataggggctccagcactgtggtggggggtgcacatgtgtgggggtctgctgcactgtggtgggggggcacacatgcatgggactctgccrcaccatggtgaggggcacgcttgcgtgggggtctgtcgcaccatggtggggggcacgcgtgcatggccctcatctcacygttgtgctttgcccactcaggatattttcaaacaagcaactgaagacaggctcaccagtgccaaggaactgccctattttgaaggtgatttctggcccaatgtgttagaagagagcattaaggaactagaayaagaagaagaggagaggaaaaaggaagagagcactgcagccagtgaaaccactgaggtacagacccttctctgagctccattgcccacgtgtcccgctggagctgcagggtggcaggctgggaggcgcgtgtcgactgttaggtccttcctgtggtggtgtctccgttcacacatgcacgtcgacaccacctgcagcacagggcgttggtgggcagcagtgtgggctctgcactctctgcacagtggatgctctggggagctgggggtccacttagactcggagagggaagagaggaagacagaaaatgggacatggggcagtcaggacacaacccgctgatgtaaaaagtgagtcgaggaggcacagggttgccaggccttattccgtgtttggtggccactctgcacatgatgctcatgccctgctgccctctctccttggcgctgcccctgagtgccaggcagtgcagactgagccaaacaaaaccccatccctggccaggcgcggtggctcacacctgtaaccccgcactttgggaggccgaggcaggcggatcacaaggtcaggaaagggagaccagcctggctaacacagtgaaaccccatctctactaaaaatacaaaaatttagccggttgtgggagggggcacctgtaatcccagctacgagggaggttgaggcaggagaatcgcttgaacccgggaggcggaggttgcagtgagcctagattgcgccgttgcactccagcccaggagacagtgcgagactccgtttcagaacaaacaaaaccccatctccgcccccaagggagtggctgtgtcctggtaggatgtgaaacaaaaagaacccagaccyaagcatggtgtgctctgagcgtggcagagctctgaaggggaaggagccttggggaggtggcgtgtgggccagacccgcccaccacaggaaggtgctggaagaggacccgccaggcggtgggaggaggcgcgctgtgtgcgggtttgtgcggctgtctggggaagagatgatggtggcgtgggtgtgggctgtagctgtaggtgcagggagagcgatgacgaaygttgaaggctgcagccccagaacttgggacaggcgattgtgaccagtgaggaaaagcggtgaatggaggtggctcttgcgtgggctgctgccatgggtgaggcagccgggagccggctggggacatactgccactctggtgcctgtcccatatgagagcacgtctgtgaggtgggtgccggatgggctgtaggcggagcgtggggcctgggccgcttccgccacacacactcgtgctcactgcacaggtggttgagaggcagccacctgctggacggcgccccagagtgtcattcgcaggacagaggaggcgcgggcagggggtggcgtgggtttacgccctaggtggctcctaagcagagctcctggcctgttgtcttcggacttgctcccgctggagtgtagctggtctcactggtgtctggtgagttaatgcttgagttccatctcctaagggtgacacgggaggttaccgcgtccgagacaggctttgcgcagctgagttccaccccaggagggggcacctgcctgtggcatggcagcagtggggttgtccagaagacaggcctgataggggctcctgctggggcagccttccctgtgcaccggggacatgcatgtgttaggaggcgggatgctgaggtgtcggcatgtagayctgctgtcccttgtgtgtttggttcatggacaacaatgggcagggacatgccttcgtcagcaacaccccaggagctcgctctgggggtcagccttagtgagggctggtgcgtggggtggagcactgctttgctattagctctgctctgcatcatgctgtcaattctgggaaatggggaaaggctcgcgatagtgtcaggtggggcgagaaacggaaccagctccctgtgtgcagtcccagcttcgtgaggaatgtcgcaaacacggagacaaatgtgcccagggaaagctccagaacacagaacactgctgctcgggaagaccagaaaaacaaaactttttaaaattacttgtctatattttcttaatttcatgaacatatttattttataattttgtaaaaatagacttccaggccgggcgtggtggctcacgcctgtaatcccagcactttgagaggccaaggcaggtggatcacttgaggtcaggagtttgagaccagcttggccaacatggtgaaaccccgtctctactaaaaatacaaaaattagccaggtgtggtggcgcacgcctgtagtcccagctacttgggaggctgaggcaggagaatcacttgaacccgggaggcacagattgcagtgagccaagattgtgccactgcactccagcctggtgacagagcgagactccatctcaaaaaaaataggcttcctttgttttaaggctgacacaaaaattgagcacagagttccagtatattgcagcacgcagtttctcctgttactaatgtcttaccttagtgtggcacatttgctgccacggtgagccatttgttgatgttgatgcattattgttaagtctacacttcgttccaatttcctcagttttcccctgacgtcccttttctgtctctgaatcctgcggaggacccacgtgatatttgggctcctcgggctgcttgtcggtggggtgggaattttttttttttttttttgagatggagtctcgctctgtcgcccaggctggagtgcagtggcgccatctcagctcactgcaagctccgcctcccgggttcacaccattctcctgcctcagcctcccgagtaggtgggactgcaggcacccgccaccacgcctggctaattttttgtgtttttagtagagacggagtttcaccgtgttagccaggttggtcttgatttcctgacctcgagatccgcctgccttggccttccaaagtgctgggattacaggtgtgagccaccccgcccggctggattgttgaattctctctggactgacccctctctttgaacaccaagagtctctctcatcttgttaaaaatgaaactctctggctgggcacggtggctcatgcctgtaatctcagcactttgggaggctcaggcgggcggatcacccgaggtccggagttcaaggccagcctgaccaacatggtgaaaccccatctctactaaaaatacaaaaattagctgggtgtggtggcagcacctataatctcagctactagggaggttcaggcaggagaatcgcttgaaccttggaggcagaggttgcagtgagccgagatcgcgttattgcacttcagcttgggtgacaagagcgagactctgtctcaaaaaaaatgataggtagccgggcatggtggcgggtgcctataatcccagctacccaggaggctgaggcaggagaatcacttgaacccaagatgacaccactgcactccagcctggcaacaagagcaaaactccgtctctcaaaaaaaataaagctctctgttaaagtgtaagtgagtggtaatcctgcgttctttccagaggaggagcctgtgggctgagagcaagcccaccttcagccagtcaggcgcagcactgatggccccagcagggagccagcctgctctccgtgggccttgagtggaccccgcaggggcctcagagtccctgctcttgatggggcagctgcttttcccatcagcagctttcctgtctcctggaagctctcatgctttctcgggtgtgtagagccttcctcaaggcagacagctgctgaccacagttgtgaygtggaatcttccgcatctggttgtggcacagtggaaacagcccccactgccctcatttgttaatttctgaactcgcactctgggtctcttttcccctttagaggcagcgtggcataaagctgataatgacaccagcctggccgaggacaggccctgctctgtcccgaaggctgcagcacctacagccacctgtagccgttcacgtatggggtctgcctggtggtgacctactttggcctgagcttcctgatgcccacrrcctgggagctgggcgtccgtgccaagtgtggaggggcacttgcctggtctcacagccttvcgtgttgttgcagggcagtcagggcgacagcaagaatgccaagaagaagaacaacaagaaaaccaacaagaacaaaagcagcatcagccgcgccaacaagaagaagcccagcatgcccaacgtgtccaatgacctgtcccagaagctgtatgccaccatggagaagcacaaggaggtaggcgtgggctgcggtgctgcagccgtgcctctggccgggaggagggaaagactcgcagctggcgggcgtgggcccgtgtgcaggtctgtggtgggagggaagtggcccccaggaaaccaagtggaccagttgggtgacatcatgcaacgtgtcaccaattttgttccatcccaaggcatcagggccatcaggctcagccacctgcctattctgcaggctgggtggctgcgcctgccctgagctcwccactggaggtgccatgtcccttgtgtgggactaaagcccctcctctcctgcaggtcttcttcgtgatccacctgcacgctgggcctgtcatcaacaccctgccccccatcgtcgaccccgaccccctgctcagctgtgacctcatggatgggcrcgacgccttcctcaccctcgccagagacaagcactgggagttctcctccttgcgccgctcyaagtggwccacgctctgcatgctggtggagctgcacacccagggccaggaccgctttgtctacacctgcaacgagtgcaagcaccacgtggagacgcgctggcactgcactgtgtgcgaggtaggccctgcccccacccccacccccacagccggcctggggtctgacgaagcatcctgtccctttgcatgggtgcccgggttggtgtctgtacctgatggtggctgcactgactcctccagaactaggacagcgtcacaaggcagaaggcgttgctgtgtgtgtgtttcctaaacctgctctgtgtagccacagccacaggcctgaccctggggacggccagagggaggctctgctgggaagtctggcctgtctgtgcccagttctagtcttgctaaatggctggaaacacccgctgtcctgttggcagcttgggcccctctggycacttgttcctgaaggaccccccggtcatgctccctcactcccctctaggaattttgacccccctgtgaaatgacgtgggtgtcccttgcatgggccgagtcaggctgtgcagggcaggcaggtgacagytcccaccatccccctcccaggacagtcaccatcacctgccaacccggagcctcctcacttgctgtggtgtctgtagcggggcagagcgggtcctcagcagagcgagggcctttcttccctccccaccttcacacacttcttccgctttccacctttctccagtctcctttgtcctctttctagtttctgaatgcggcagttttcatatctttttgtgaacacagtcatggtacctggtcctagggctccatcaggttgccaggtgcgagcagttttcagtaacttgggcttgcgcgttggggaagtcccactggtgcactgcggatagctcaggccttcccagaggcacttcacggcagctgtcggcgctttgggagggaccggcctccctcagcctttcactgtstggcttcatagtttgagtacaggagttggacaggctgtggcaagggctgatgtgactcccaggtcagaggaagtcggaaggaagggggctggtgtctactgtccgtgagcttacaggccaggggttcttsgggcatgggtcaggttatctttgagccttcagggctgttgccaggagtgaaggtccttgggagcaacacataggcagtccatgcccccgtcctgtccatgatcccatgttgtccatgatcccatcccgtccatgatcccatcttgtccgtgctcccgccctgtccgggtctcccacctgtccgtgctcgcatcctgtctgggtctcctatcctgcctgggtctcctggcacagacccagacttagcggtggagggaagcagccaggatgcctggtggtactgggtcccatgctgacacyggcctgtcccctttccttgcttgcaggactacgacctctgcatcaactgctataacacgaagagccatgcccataagatggtgaagtgggggctgggcctggatgacgagggcagcagccagggcgagccacagtcaaagagcccccaggagtcacgccggctgagcatccagcgctgcatccagtcgctggtgcacgcgtgccagtgccgcaacgccaactgctcgctgccatcctgccagaagatgaagcgggtggtgcagcacaccaagggctgcaaacgcaagacsaacgggggctgcccggtgtgcaagcagctcatcgccctctgctgctaccacgccaagcactgccaagaaaacaaatgccccgtgcccttctgcctcaacatcaaacacaagctccgccagcagcagatccagcaccgcctgcagcaggcccagctcatgcgccggcggatggccaccatgaacacccgcaacgtgcctcagcagagtctgccttctcctacctcagcaccgcccgggacccccacacagcagcccagcacaccccagacgccgcagccccctgcccagccccaaccctcacccgtgagcatgtcaccagctggcttccccagcgtggcccggactcagccccccaccacggtgtccacagggaagcctaccagccaggtgccggcccccccacccccggcccagccccctcctgcagcggtggaagcggctcggcagatcgagcgtgaggcccagcagcagcagcacctgtaccgggtgaacatcarcaacagcatgcccccaggacgcacgggcatggggaccccggggagccagatggcccccgtgagcctgaatgtgccccgacccaaccaggtgagcgggcccgtcatgcccagcatgcctcccgggcagtggcagcaggcgccccttccccagcagcagcccatgccaggcttgcccaggcctgtgatatccatgyaggcccaggcggccgtggctgggccccggatgcccagcgtgcagccacccaggagcatctcacccagcgctctgcaagacctgctgcggaccctgaagtcgcccagctcccctcagcagcaacagcaggtgctgaacattctcaaatcaaacccgcagctaatggcagctttcatcaaacagcgcacagccaagtacgtggccaatcagcccggcatgcagccccagcctggcctccagtcccagcccggcatgcaaccccagcctggcatgcaccagcagcccagcctgcagaacctgaatgccatgcaggctggcgtgccgcggcccggtgtgcctccacagcagcaggcgatgggaggcctgaacccccagggccaggccttgaacatcatgaacccaggacacaaccccaacatggcgagtatgaatccacagtaccgagaaatgttacggaggcagctgctgcagcagcagcagcarcagcagcagcaacaacagcagcaacagcagcagcagcaagggagtgccggcmtggctgggggcatggcggggcacggccagttccagcagcctcaaggaccyggaggctacccaccggycatgcagcagcagcagcgcatgcagcagcatctccccctccagggcagctccatgggccagatggcggctcagatgggacagcttggccagatggggcagccggggctgggggcagacagcacccccaacatccagcaagccctgcagcagcggattctgcagcaacagcagatgaagcagcagattgggtccccaggccagccgaaccccatgagcccccagcaacacatgctctcaggacagccacaggcctcgcatctccctggccagcagatcgccacgtcccttagtaaccaggtgcggtctccagcccctgtccagtctccacggccccagtcccagcctccacattccagcccgtcaccacggatacagccccagccttcgccacaccacgtctcaccccagactggttccccccaccccggactcgcagtcaccatggccagctccatagatcagggacacttggggaaccccgarcagagtgcaatgctcccccagctgaacacccccagcaggagtgcgctgtccagcgaactgtccctggtcggggacaccacgggggacacgctagagaagtttgtggagggcttgtagcattgtgagagcatcacctttycccyttcatgttcttggaccttttgtactgaaaatccaggcatctaggttctttttattcctagatggaactgcgacttccgagccatggaagggtggattgatgtttaaagaaacaatacaaagaatatatttttttgttaaaaaccagttgatttaaatatctggtctctctctttggtttttttttggcgggggggtggggggggttcttttttttccgttttgtttttgtttggggggaggggggttttgtttggattctttttgtcgtcattgctggtgactcatgcctttttttaacgggaaaaacaagttcattatattcatattttttatttgtattttcaagactttaaacatttatgtttaaaagtaagaagaaaaataatattcagaactgattcctgaaataatgcaagcttataatgtatcccgataactttgtgatgtttcgggaagatttttttctatagtgaactctgtgggcgtctcccagtattaccctggatgataggaattgactccggcgtgcacacacgtacacacccacacacatctatctatacataatggctgaagccaaacttgtcttgcagatgtagaaattgttgctttgtttctctgataaaactggttttagacaaaaaatagggatgatcactcttagaccatgctaatgttactagagaagaagccttcttttctttcttctatgtgaaacttgaaatgaggaaaagcaattctagtgtaaatcatgcaagcgctctaattcctataaatacgaaactcgagaagattcaatcactgtatagaatggtaaaataccaactcatttcttatatcatattgttaaataaactgtgtgcaacagacaaaaagggtggtccttcttgaattcatgtacatggtattaacacttagtgttcggggttttttgttatgaaaatgctgttttcaacattgtatttggactatgcatgtgttttttccccattgtatataaagtaccgcttaaaattgatataaattactgaggtttttaacatgtattctgttctttaagatccctgtaagaatgtttaaggtttttatttatttatatatattttttgagtctgttctttgtaagacatggttctggttgttcgctcatagcggagaggctggggctgcggttgtggttgtggcggcgtgggtggtggctgggaactgtggcccaggcttagcggccgcccggaggcttttcttcccggagactgaggtgggcgrctcagcgttggccccacacattcgaggctcacaggtgattgtcgctcacacagttagggtcgtcagttggtctgaaactgcatttggcccactcctccatcctccytgtccgtcgtagctgccacccccagaggcggcgcttcttcccgtgttcaggcggctcccmccccccgtacacgactcccagaatctgaggcagagagtgctccaggctcgcgaggtgctttctgacttccccccamatcctgccgctgccgcgcagcatgtcccgtgtggcgtttgaggaaatgctgagggacagacaccttggagcaccagctccggtccctgttacagtgagaaaggtcccccacttcgggggatacttgcacttagccacatggtcctgcctcccttggagtccagttccaggctcccttactgagtgggtgagacaagttcacaaaaaccgtaaaactgagaggaggaccatgggcaggggagctgaagttcatcccctaagtctaccacccccagcacccagagaacccactttatccctagtcccccaacaaaggctggtctaggtgggggtgatggtaattttagaaatcacgccccaaatagcttccgtttgggcccttacattcacagataggttttaaatagctgaatacttggtttgggaatctgaattcgaggaacctttctaagaaattggaaaggtccgatctagttttagcacagagctttgaaccttgagttataaaatgcagaataattcaagtaaaaataagaccaccatctggcacccctgaccagcccccattcaccccatcccaggaggggaagcacaggccgggcctccggtggagattgctgccactgctcggcctgctgggttcttaacctccagtgtcctcttcatcttttccacccgtagggaaaccttgagccatgtgttcaaacaagaagtggggctagagcccgagagcagcagctctaagcccacactcagaaagtggcgccctcctggttgtgcagccttttaatgtgggcagtggaggggcctctgtttcaggttatcctggaattcaaaacgttatgtaccaacctcatcctctttggagtctgcatcctgtgcaaccgtcttgggcaatccagatgtcgaaggatgtgaccgagagcatggtctgtggatgctaaccctaagtttgtcgtaaggaaatttctgtaagaaacctggaaagccccaacgctgtgtytcatgctgtatacttaagaggagaagaaaaagtcctatatttgtgatcaaaaagaggaaacttgaaatgtgatggtgtttataataaaagatggtaaaactacttggattcaaagatggttcagattggctaatgacttacagttagctcaacggctcgtcattataggattgcagatgcgggcccggtgcggtggctcacgcctgtaatcccagcactttgggaggccaaggcgggtggatcatgaagtcgggagttcgagaccagcctggccaagaaggtgaaaccccatctctattaaaatacaaaaaaattagccgggtgtggtggcaggcgcctagaatcccagctactcaggaggctgaggcagagaatcgcttgaacccaggaggcggaggttgcagtgagccgggatcgtgccactgcactacagcctgggcaacagtgagattttgtctcaaaaaaacgattgtaggtggtgctggccgggcttggtggctcatgcctgtaatcccagcactttgggagtctgaggcgggcagatcacatggtcaggagtttgagacgagcctggccaatatggtgaaaccccatctctactacaaaaaatacaaaaaattggccgaggtgtagtggctcacgcctgtaatcccaacactttgggaggccaaggcaggcagatcacgacgtcagcagttcgagaccagtctgaccagcgtggtgaaaccccgtctctactaaacatacaaaaattagctgggcatggtggcgcacgcctgtaatcccagctactcaggagactgaggcaggagaatcacttaaacccgggaggtggaggttgcagtgagccaagattgcaccactgcactctggcctgggcgacagagcaagactctgtctcaaaaaaaaaaaaaaaaaaaaaatattcagccgggcatggtggtgtgcacctgtagtcctagctactaaggaggctgaggcaggaaaatcggttaaacccaggaggcggaggttacagtgagccaagagcgcgccactgcactccagcctgggcaacagagtgagacttcatctcagaaagaaaaaaaaaattgcagatgttcagtggagtttttctctacagagcatgtgtttgatgctatctttgaaattctagcatgttagaaacatagaatgagctgtccctggataatgtggcatggagaggcttctgcttctaagatctcaggttgggctgggcatggtggctcacgcctgtaatcccagcactttgggaggctgaggtgggcagattgcctgagctcaggagttgacaaccagcctgggcaacgtggtgaaaccccgtctactaaaatacaaaaaattagccaggcgtggcagcatgcgcctatagtcccagctactcgggaggatgaagcgggagaattgcttgaacccaggaggcagaggttgcagtgagccgagatcacgccactgcactccagcctggggaacagagcaagactctgactgaaaaaaaaaaaaaaaaaatctcaggttgaagacgtgtaactgtcttccttttttctttttgagacagagtctccctctgtcaccctggctggagtgcagtgacgtgatctcggctcactgcaacctctgccttccgggttcaggcgattctcctatctcagcctcccgagtagctgggactagaggcatgtgccaccatgcccagctaatttttgtatttttagtagaggcaggatttcgccatgttggccaggctggtcttgaactcccgacctcaagtgatccacccgccttggcctcccaaagtgctgggattacaggcgtcagcaaacatgcccggtccttttgattactataaaatagaaccaaagattttatttgagccaaaacatgcttggagcattgcatggtgaaataagctgtttttaaaaaagaaacacaccttttatgaaggagaggattgcacatcagtggccattttgctaccaggacgttctcagcacaggacagtgtgtgccgggaagcagaggctgcgcccacagcgccgtaacagacgggcaggggcatgtaggcaggagaataacttcatctcagaccatgaagacatcgcagcctcatggacgtatggattttatgtgttaattccacatgaattacttgtatacacttcataataaataggcagaggtgggaaaacataggtcccttataagatactgaagaaatttaagtgagtgtaatgcccagactagcaaagtagattctgaggagctttgatgagtagatgacagtgctttgccgttgatctaaattgtgcataaaacggtgcttttgatgggctcacatctttttatagaggactcctcgaactcctgacctcaagtgatccacctgcctcggcctctcaaagtgccaggattacaggtgtgagccaccacgcccggctacttccttcctttttatggctgagtaatattccattgtatgaatagaccacattttgctgacccattcatcgttcatggttacctgagttgcttccacattttggctattgtgaataaagcaccgggcatttttcacggccctcagctgaccccagtggaaggcagtggcttcatatgggcagcctcgtattggccatagaggtgggcaggagacttgggggttcttccctttccctccccaagcagctcccagtcattctccactaattcaagtcaagtacgtctgcgtgtaaacattttttcctctttctagattcttggtttacgcggagcctgaagtccatgtgtggccaccttaggacatgccttggatccctcagtaccttacaaagccacaggtccagccgggcgcaggggctcacgcctgtaatcccagcactttgggaggccaaggcaggcggatcacgaggtcaggagatcgagaccatcctggctaacagggtgaaacactatctctaccaaaaatacaaaaaaattagctgggcatagtggcacgtgcctgtagtcccagctacttgggaggctgaggcaggagaatcacttgaacccgggaggcggaggttgcagtgagccaagactgcgccactgaactccagcctgggtgacagagtgagactccgtctcaaaaataaaaaaataaaaaaaagtcacagggccctgggctagcagaggccccaggaccacaaggctctgaggctgagggtttgtctctgaaggctacaggccaacaggacagaaggctctgggggtttttctggaacttggtagatttgccctccacagaacttggggcctgccagtcttggcagaggccccccacccttaactaaagcccaggtttccctccttttgccaaatatcacttccccttgttgaaactggcctggtgtggtggcttaagcctgtaatcccagcattttgggaggccgaggcaggcggatcacttgaggtcaggtgttcgagaccagcctggccaacatggtgaaaccccgtctctactaaaaatacaaaaatcggccaggcatggtggcgggtgcctacaatcccagctactcaggaggctgaggcaggagaatcacttgaacatgggaggcagaggttgcagtgagccgagatcacaccactgcacttaagcctgggcaacaagcacgaaactctgtctcaaacaacaaaaaacaaaacaaaacaaaaaaagaaataaaaggcctaagccagatatattgccccatggaccaatgtgacagctgttacaaaacagaggattggccgggtgcggtggctcacgcctgtaatcccagcactttgggaggcagagatgggcggatcacgaggtcaggagatcgagaccattctggctaacatggtgaaaccccgtctctactaaaaattcaaaaagaaattagccgggtgtggtggtgggcgcctgtagtcccagctactcgggaggctaaggcaggagaatggagtgaacccgggaggcagagcttgcagtgagccgagatcacaccactgcactccagcctgggcaacagagcaagactctgtctcaaaaaaaaaaaaaaaaaaaaaaagagagagatgatttcctgaatggagcgaaaaagggatgaaatgtgaagccgagacaccccccacccacccccattccctgaggacatgctggaaagggctctgcctggagtgtggtgatagggaacacaggcaggcccatgcaggcctataggaggaggcagaaggagtttggaaaggattgtaaatatgtgcatgtgtgttggtagggggaccactggaggatctgagagacggagtatgatccggctgctgtggaggatgggaggctggcaagagcggaagcagggggcctgtcagggctgctggagtggtctgggtgacaggaccctgctcttccacccaaatctgcccaccctctttccattcccttctcaattgcttaagctgggaacttgccactttccacctggaagcgtttcctgacacatcctcttccacccagctctgtcccggccccactgaaggtcactctcctggctcctgtgcttctctgcagcacgtgccacgagctggagtcgctatttttgtacagttattagagtgtggcagtgaatcttcagtgtgcctccgaattacctgggaacctcagtggagccgcctgggccccactccgggactgaggaggtgccgggaaatcggcattatgaggctgcagctgggtctggaccaaatgttagaccagggtgtatggtctgaatctccaactagtctctaacctccagcaaggtgtaaagcaaaaacaaattctttttttgctgttgttttttgagatagagtctcactctgttgcccaggctggagtgcagtggcacgatctcagctcactgcaacctctgcctcccgggttcaagcgattctcctgcctcagcctcccgagtagctgggattataggcatgtgccgccatgcccggctaattttgtatttttagtggagacagggtttctccatgttggtcaggctggtcttgaactcccaacatcaggtgatccgcctgcctcggcctcccaaagtactgggattacaggcgtgagccaccgtgcccagccggcaaaaacacattataagtcccccaacccatggaatggatcattcctctccaccaaggggatttcaaagaaacctaaaaaactagttcaggccataattggaaggatggggtgggtcctgcctcattacaccctccaccccttggaaatgaggcacaactgaccagcgttaacattacaaaggacttttttttttttttgagacggaatcttgttctgttgcc

SEQ ID NO: 93599 - DNA, 78863 bp, Homo sapiens
tggctggagtgcagtgacgtgatctcggctcactgcaacctctgccttccgggttcaggcgattctcctatctcagcctcccgagtagctgggactagaggcatgtgccaccatgcccagctaatttttgtatttttagtagaggcaggatttcgccatgttggccaggctggtcttgaactcccgacctcaagtgatccacccgccttggcctcccaaagtgctgggattacaggcgtcagcaaacatgcccggtccttttgattactataaaatagaaccaaagattttatttgagccaaaacatgcttggagcattgcatggtgaaataagctgtttttaaaaaagaaacacaccttttatgaaggagaggattgcacatcagtggccattttgctaccaggacgttctcagcacaggacagtgtgtgccgggaagcagaggctgcgcccacagcgccgtaacagacgggcaggggcatgtaggcaggagaataacttcatctcagaccatgaagacatcgcagcctcatggacgtatggattttatgtgttaattccacatgaattacttgtatacacttcataataaataggcagaggtgggaaaacataggtcccttataagatactgaagaaatttaagtgagtgtaatgcccagactagcaaagtagattctgaggagctttgatgagtagatgacagtgctttgccgttgatctaaattgtgcataaaacggtgcttttgatgggctcacatctttttatagaggactcctcgaactcctgacctcaagtgatccacctgcctcggcctctcaaagtgccaggattacaggtgtgagccaccacgcccggctacttccttcctttttatggctgagtaatattccattgtatgaatagaccacattttgctgacccattcatcgttcatggttacctgagttgcttccacattttggctattgtgaataaagcaccgggcatttttcacggccctcagctgaccccagtggaaggcagtggcttcatatgggcagcctcgtattggccatagaggtgggcaggagacttgggggttcttccctttccctccccaagcagctcccagtcattctccactaattcaagtcaagtacgtctgcgtgtaaacattttttcctctttctagattcttggtttacgcggagcctgaagtccatgtgtggccaccttaggacatgccttggatccctcagtaccttacaaagccacaggtccagccgggcgcaggggctcacgcctgtaatcccagcactttgggaggccaaggcaggcggatcacgaggtcaggagatcgagaccatcctggctaacagggtgaaacactatctctaccaaaaatacaaaaaaattagctgggcatagtggcacgtgcctgtagtcccagctacttgggaggctgaggcaggagaatcacttgaacccgggaggcggaggttgcagtgagccaagactgcgccactgaactccagcctgggtgacagagtgagactccgtctcaaaaataaaaaaataaaaaaaagtcacagggccctgggctagcagaggccccaggaccacaaggctctgaggctgagggtttgtctctgaaggctacaggccaacaggacagaaggctctgggggtttttctggaacttggtagatttgccctccacagaacttggggcctgccagtcttggcagaggccccccacccttaactaaagcccaggtttccctccttttgccaaatatcacttccccttgttgaaactggcctggtgtggtggcttaagcctgtaatcccagcattttgggaggccgaggcaggcggatcacttgaggtcaggtgttcgagaccagcctggccaacatggtgaaaccccgtctctactaaaaatacaaaaatcggccaggcatggtggcgggtgcctacaatcccagctactcaggaggctgaggcaggagaatcacttgaacatgggaggcagaggttgcagtgagccgagatcacaccactgcacttaagcctgggcaacaagcacgaaactctgtctcaaacaacaaaaaacaaaacaaaacaaaaaaagaaataaaaggcctaagccagatatattgccccatggaccaatgtgacagctgttacaaaacagaggattggccgggtgcggtggctcacgcctgtaatcccagcactttgggaggcagagatgggcggatcacgaggtcaggagatcgagaccattctggctaacatggtgaaaccccgtctctactaaaaattcaaaaagaaattagccgggtgtggtggtgggcgcctgtagtcccagctactcgggaggctaaggcaggagaatggagtgaacccgggaggcagagcttgcagtgagccgagatcacaccactgcactccagcctgggcaacagagcaagactctgtctcaaaaaaaaaaaaaaaaaaaaaaagagagagatgatttcctgaatggagcgaaaaagggatgaaatgtgaagccgagacaccccccacccacccccattccctgaggacatgctggaaagggctctgcctggagtgtggtgatagggaacacaggcaggcccatgcaggcctataggaggaggcagaaggagtttggaaaggattgtaaatatgtgcatgtgtgttggtagggggaccactggaggatctgagagacggagtatgatccggctgctgtggaggatgggaggctggcaagagcggaagcagggggcctgtcagggctgctggagtggtctgggtgacaggaccctgctcttccacccaaatctgcccaccctctttccattcccttctcaattgcttaagctgggaacttgccactttccacctggaagcgtttcctgacacatcctcttccacccagctctgtcccggccccactgaaggtcactctcctggctcctgtgcttctctgcagcacgtgccacgagctggagtcgctatttttgtacagttattagagtgtggcagtgaatcttcagtgtgcctccgaattacctgggaacctcagtggagccgcctgggccccactccgggactgaggaggtgccgggaaatcggcattatgaggctgcagctgggtctggaccaaatgttagaccagggtgtatggtctgaatctccaactagtctctaacctccagcaaggtgtaaagcaaaaacaaattctttttttgctgttgttttttgagatagagtctcactctgttgcccaggctggagtgcagtggcacgatctcagctcactgcaacctctgcctcccgggttcaagcgattctcctgcctcagcctcccgagtagctgggattataggcatgtgccgccatgcccggctaattttgtatttttagtggagacagggtttctccatgttggtcaggctggtcttgaactcccaacatcaggtgatccgcctgcctcggcctcccaaagtactgggattacaggcgtgagccaccgtgcccagccggcaaaaacacattataagtcccccaacccatggaatggatcattcctctccaccaaggggatttcaaagaaacctaaaaaactagttcaggccataattggaaggatggggtgggtcctgcctcattacaccctccaccccttggaaatgaggcacaactgaccagcgttaacattacaaaggacttttttttttttttgagacggaatcttgttctgttgcccaggctggagtgggagtgcagtggtgcgatcttggctcactgcaatctctgcctcctgggttcaagcgattcccctgcttcagcctcccgagtagcctcagctgtacacaggtgcacaccaccacacccaggtaattttttttgtttttgagacagactttcactcttgttgcccaggctggagtgcaatggtgcggtatcagctcactgcaaccttcacctcctgggttccagcgattctcctgccttaacctcctgcgtagctgggattacaggcatgcgccaccacgcctgactgattttttgtatttttagtagagacggagtttctccctgtcagtcacgctggtctcgaactcccgacctcaggtgatctgcccgcctcagcctcccaaagtgctaggattacaggcgtgagccactgctcttggcctaatttttgtatttttagtagagatggggttttgccatgccgaccaggctggtctcaacctcctgacctcaagtgataagaccaccttggcctcctaaagtgctggaattacatgcgtaagccaccatgccaggccacctttgcaggtcttttcctgatcctgagggtctaggaatttttaacggtctgaataaacaatatttgcgaaaacatttgccatctattacctgtaagggtggtcatctatgagacttcctctacataataagaaccttggtcttcacaacctgttttttgtttgtttgtttgtttgtttgttttgagacagggtgtggctctcttgcccaagctggagttcaatggcacgaacttggctcactgcaacctctccctcctgggcttaagcaatccacccacctcagcctcccttgtagctgggattacaggcctccgccaccacatccggtacaggtatgtttggtacagacagggtctcaccatgttgcccacgctgctctccaactcctgacctcaagcaattcgcccacctcggcatcccaaagtgttgggattacaggtgtgagtcaccgtgctcgtgcccacaaccccttatcttcacccagacactctttttattgattccaggtctgtataactcaactcttttttttcttttttttgttttcttttttttttttttttgagacggagtcacagctctgtcgcccaggctgcagtgcaagtggcacgatctcggctcactgcaaccgcagcctcccgggttcacgctattcttccgcctcagcctccccaggagctgggactacaggcacgtgccaccttgcccagctaattttttgtatcttagtagagatgatgggttttcaccatgttggccaggctggtctcggactcctgaccgcaggcagtccgcccacctcagcctcccaaagtgctaggattacaggcgtgagccaccgcgcccaaccagaactcaactcttttaaccaattgccaatcagaaagtatctgaatccacctatgacctctaagtatttcaccctttgagttgtcctgcctttccacacggaaccaacctatgtcttacatgcattgactgatgtcttatgtctctctaaaatgtataaaaccaagcaagctgtaacccaagcaccttgggccaagttctcaggaccttttgagactgtgcctccctccatgcacactcatatttggctcagaataaccttctaaatactttagagtttgactcttctcgacaaggacaagagaagtggaataaacgaataaccgcagttttcctggtggtattggtcactgggttcaggttttggagtagtagccagtcaagcctggaatccccttcctcattcgctttagctttttgtccagtcttggtttgcaagagacttgcagcggcctagacggatggccgggattcacaaaggtcgcagacacgggaactgcttcttccccagcgtcgcctccacaccctcgcgtggatactgacatccgccccattccaggaatgcgcacagctaggcgcagccggccagcgtgggccgggggcggcggggccacctcccccacctccgcgcgcaaggcccgtcgcccttgacaacgcgatccaaggtcacggaggtcccacccccaggcccgaccgtccacgagacgggtagtaccccgccacgcgcccgagcaggcagctgcccggacagcccggcgcccgccgtgacgtcaccgccccgcgcccgaggaagccccgccccgcgcagccccgtcccgccccttcccatcgtgtacggtcccgcgtggctgcgcgcggcgctctgggagtacgacatggcgcgcgagctgcgggcgctgctgctgtggggcygccgcctgcggcctttgctgcgggcgccggcgctggcggccgtgccgggaggtgagggcgtcctggctggacgggcagcgggcgggccgggccacggagacggcagggacgtccctgtgctccggggagcgaggcgccggcacctgcttcacaggcgtgggaggtccggcgaggccaagcgcggcagacgcgtttactttcgctccgctcctcgccagctccagcttggctgccttttcctcggctggactcccctcgccacccgcccatgggagccctgaaggaggctgggtcttggggggtcgcggggtcgggcggagcggctgcggggtcgtccctcctggagcttcggtccagtcaggtagcgcacgtgcaggtggagccgctgcggagcgcggagtctttgcgggtgcatgttgcggggaatggactcactcggggtgatcgtgctagttccatggatcgtgctttacccctccccgcctcccagtagcgcactgagggttcatttgttaattcgttcattggacgcacatgtgagcgcccgctcagtgcccggcgccgtgcaggttctggggacgccacagtgaacaaaacctatagcagtcatccgggtccccagagcaggtggactcgatgtcgttgacgcagctgtgtcctcggggcctggaattgatggatgcgccaataaatgtttgtaaaacagagagaacgaccctaacctctgctttcccagtccccactcggaggtaacaacagtgaaagtttcggcattgcttcggggctgtacacagtgttatacgtgtaaatataaatgtctgcgtataagtattttttattctaaaaagcctaaaccatgtatgcattgtgctacgttgtacttcagaaaattttaacgctcccagcattctttccacatcttttcatgtcagtgtatacaggtccatgtgccttccagtgaccacacagtattctgtatgatggacgtgtcatttgtttaaacattgtcctattagtggacgcaataaaggttatttcaggttttactttttattacaatgctgcatagaatgggtgagtacttaaatatttgttcacgtgcggtatttctttagccttacataattagaattttagaattgatatttcagagcctatgcatttttgaaatgttagcagatactgccaaattgtccaaaaaggccttatcaatttatatcccctttagcaggcatcaagactgcctattccaaaggtattttcttcaacgctgaatcttatgtcttttcaaaaccagtggtctataaaagataccttgtggccgggcgcagtggctcacgcctgtaatcctagcactttgggagcctgaggtgggcagatcaggagttcaagaccagcctggccaacatggtgaaaccctgtctctactaaaaatacaaaaattagctgggtgtggtggcgcgcgcctgtaatcccagcttcttgggaggctgaggcaggagaatcgcttgaacccaggaggcagagattgcagtgagctgagattgcaccactgcactccagcctgggcgacagagtgagacttcatctcaacaacaaaaataataataattttccctcagaaagtgatgctgttgctctcttctagcaccagtgtctgatcaattatttatttatttttttgtctttatgaggtggggtttcactatgttggccaggctggtctccagtgcctgacctcaagtgatctgcctgccttgccctccaaaatgctgggattgcaggcgtgtgtcaccgtgcctggccaactgttctgttaatttggttctcgtttcttttgtagctgactcgggttttttcccccttggaggttaagattttttctctttgtcgtttgtggtctcgcgtccacaggtgtttgtgattcatgctttgtatcatgcactgtcccttccatttggaaaatatgtcagttttcagcccagggacattttaattctgtttctttatctctttttctttttctttttttttgagatggagtcttgctctgtcacccaggctggagtgcagtggcgcgatcttggctcactgcaagctccgcctcccgggttcaggccattctcctgcctcagcctcccgagtagctgggactttaggcgcccaccaccatgcctggctaattttttgtatttttagtagagacggggtttcaccctgttagccaggatggtctcgatctcctgacctcgtgatccgcccacttcggcctcccaaagtgctgggattacaagcgtgagccgctgtgcccagccctttatctctttttcttaaaaattgtctctctcctctcgtcctccatcttctggtgcggtggttcaagcattcctctgcctgagtctaagaaatggaacatgttcttggcagccttctgcgtggcaggtgcccttgtcattgtcacctgtgtggatgaatgggaaggtaaattgtttggattgattgaacgatgagagaatttagctaagaaaatacatgtcttgtgcaacaggggagaaagaatagtttaggcagatccacctatgtagaaaatccagacctcttgaaatttttttcttttcttgggaaagtatttccaggttgtagcatgtgcctggcttcaggtgtgcgtgtcttatgtctgtggaatcctctcgcccatgctacgctgcctcagtcacccatgagctcagccctcttaccctttcagacctcactgacccctgayactgccagccctgtcacttgccctcagaatatcttatttgattttttttgagccggagtcttgctctgttgcccaggctggagtgcagtggtgcaacctcagctcaccacaccctccgcctcctgggttcgagtgattctcctgacttcgcctcccacgtagctgggactacaggcgcatgccaccacacccagctaggttttgtatttttaatagagatggggtttcactatgctggccagggtggtctcgaactcctgacctcatgatccactagccttggcctcccaaaatgctgggattacaggcgtgagccactgcgcctggcctaccctcagaatatttctgtgaggggtgggctaggatatccgcttgtggactttatatttgtcatttttgcccataacagtttattcagcaaatacatttccaatgcccccgagtcktcaaagaaaatgtgaccctgctgtctggagtcataggtggctgctgagcagtgtaccagggccatcttggtggcctggacagcacattagagaaacaagagctgcttgccccagggtaagtttcacagatgaggagcgatttgggccgagtgtccaaggctgttttcactggaggggagggaggaacgttccatgtctggaaagctgcaggtgcaagggtaaggagatagctctgaataattggtttgatgaaagacttgcgggagtgtgcaggagtgatggtgaatgaggctagcagttgtgtcttttctgtcagatataagcttgtgcgtaggagcctcatcctgcattcctcaggacagtcacagagccagccctgggcctggtgtgtggggagcccagccacgtggcccaccatgagagcttttcgtcagagctccaactgtcagaagtgtcagatgtgccagtagaaggatgaggccgcctcctaaaggagagggaagacctggaaagatcaacagcagacgcrgtctcccaaagcaaacgtgattctgtggtcaggcaggtacggtgacgggttggtcattttgcatgacgaggtgactgccacaatcaccaagggtgccgagtccagtctcctggtcatgccagatgctcttgttttcgtgaaattgccagaacatgactgaggcaaccacgataggactggttggtgcaggcgttaagatcttgggcctttttgttctctgtaagctggagcctttgctggaacttcctgtcttggaaatcagagttgtgagagtaggtcccctgccagcaccaggaaggtcgggagagctggtttcctcactttgctcaggrctcaagtactagctagtttgtttcatcttccaaaaagagcctcacctggaccccgctcctgtaggtggtgcctgcctgctgcgccctccccttcagtacttcgttttgttgacgggttttgcctcctccctctgctctccctttgtttggagcctgtgctgtttgatttccgtgtcttgtgtgctgcacccttcaggagaattcaggtgaatttctggtgctytccggctgttcttttcagagtggaggggagtagtacttgctggtcagttgcgactctgtctgtgaaacagctctttgtgttgctgagatgacgctagaggtgtwgcgtccatgacatgtttgtcgtctgattaagctgtggtgctggcacttagacggcagaggaaggtgtggcccagctgtccaaggccaccaggargaccttcagcttagttaggaccaagggaactgagttatctgagtgcctgaaaaagaacacatcaggccgggcgcggtggctctcgtctgtaatcccagcactttgggaggccgaggtgggtggatcacttgagttcaggaatttgagaccaacctggccaacatggcgaaaccccgtctctactaaaaatacaaagaaattagccagggtggtggcaggcgcctgtaatcccagatacttgggaggctgaggcacgagaattgcttgaacctgggaggtggaggttggaggttgcagtgagccaagattgtgccactgcactccctcctgggcgacagtgcaagactctgtcttggaaacaaacacatcaatccgaatgtaagagattagcaargcgtttattggttactgggtgagtagttggcctaagctaagacaaaagaggaatctccaagtattttgctaccccttggcaggaagagagggaatgcagcttgcggggtggggatgggggtgtcaggttgataagaaaactgtgggaaaataaacatttactcctgccccccatgtcagtaaataccatgtgacaaaggtgagttccatgaaagaggctgttactgaggcctgtgatacttgcttgtctcaaaatgctgacatatcttttttttttttttttttttttttttttttttttgagacagattctttctgtcgccaggctgaagtgcagtggcatgacctcagctcactgcaacttccgcctcctgaattcaggcagttctcctgcctcagcctcctgagtagctgggactacaggtgcatgccaccatggccagccaatttttgtatttttagtagagacgaggtttcaccgtgttgggcaagatggtctcaatcttttgaccttttgatctgcctgctttggcctcccaaagtgctgggattacagacatgagctaccacgtcgggcctgacaaagaatcttgatagcgattgaaaatgtatccattcatactcaaatgaagtaaaaagtgcttttgggttcaaagccagagaatgttcatggatggcgtttttggtgcctcaagtgtagccagctagaacttttcttaccaccgtcctgcttagtcctactgaagacctgccttctactaggaagctgctcttagtccacaaagtggcttccctgtagttccacagcatttaacaaaatagatttcagggagtttatttgtggtgtggctggttatttctgctaaaaccactaggaattaccataaaagctgtagcttggagaaacagtatctacttgcgggagtattactgccacctgtgttttttttgtttttgttttggtttttgttttttttttgtttttttcaagatggagtcttgctctgtttcccaggctggagtgcagtggcacgaactcggctcactgcaatctccacctcccgggttcaagcagttctcctgcctcagcctcccaagtagctggggctacaggcatgcactaccgtgcccggctaatttttgtatttttagttgaggtagagtttcaccatgttggccaggctggtcttgaacttctgaccttgtgatctgcctgcctcggcctcccaaagtgctgggattacaggtgtgcgccaccgttcccagccctgccattggctttttaaccaggtgaattcctgtagattgggtagattgaaaggacatgtagctgaatcattggttttaaaaggaatggctcagttacttcatagccatataattaagaaatgtggctagaaggtaaaaaattggccaggcctggtagctcatgcttgtaatcccagcactttgggggctgcggcgggaggatcctgtgagtttaggagtttgagaccagcctgggcaacctagagagacccccatctctaccaaaaaacccttttttttttttttccaattagctgggtgtgcctgtggtcccagctacccaagaggctgaagtgggaggctcccttaagccttgagaagtcgaggctgcagtgagctgtgatcacgccactgcactacagtctgggtgacagagtgacagtgtctcaaaaaaaaaawatatatatatatatatatatatacacacacacatataaaagaaattaattttgagatagctaaattaaatgccatattaagagcaggaggctattcagcaatgctgctgagaagaagacagaaggacgtgggtccttctaatgtaactatgtgtgtcgggttagtgatatgcacctcgaaggagaaattaagacagcacattgccatgttagttcacacttgccagtatttcagcatttgtcaggcaatggaatgttcaagcgaattttccacgaggctgactttaaaacatttcattttaaccattatgatgagaagtctttctagaacactccatcatttgatggcccatgactgaacctctcttggatgttttcagggtcattattacgggtgttaatgtttggtcttctgttttaatatgtaggctcccgtagggccattgaaatgtgaagaatccttcgtctatgaagtgtccccacatcaaaactgcattgtgagtgtttatatttttggcctctcttactgtggccttaacttgcaggyctgtctggagccctgttctctcctttcctagtttgcagatgtggctgggaaacttgttagcatcaaattgttagaatgagatggatttcatatggggccagtagtcttccatgagcaaagctcagggtgagggcttcaggcccatattttgactattccgaggtgccctttcgctttttgttctttttctttatgttcaaggagttatgtttcctgatgaatgaagtatcagtatatcatagtagagaacgattagaccaggttctggaacacaggaaacctcaagaaacagtgagtgttgagaatgccagagctaagaactcagacatttgtgagggaatacaggtctttctgttcagaatgttcatgtacttaagaatcttctcgccaggcgcggtggctcacgcctgtaatcccagcactttggcaggctgaggcgggtggatcacctgaggttaggagtttgagaccagcctgaccaacatggagaaaccctgtctctacgaaaaatacaaaactagccgggcgtggtggcgcatgcctgtaatcccagctacttaggaggctgaggcaggagaatcgcttgaatctgggaggtggaggttgtggtgtgccgagatggcgccactgcactccagcctggcaacaagagcgaaaactccgtctcacacacacacacaaaaaaaagggaaacaaaggtaaactgggaaggaaccgtgtgtaatcttccgtaccttgcattttccacttatattctggggtttgtttcctgtcgccacagagctctggtattccatagcgaggatgttttgtaatttatgtaaccctctcatggcggacatttaggttgttgctgagtttccccaagataacagacggcattgccaacagtttctcacaccttcaccagtgctagaatgacagtatttaaaacatctgtcaatctggtagtgaaaatgctatctcgttttaaagtgcatttccttagttatgagtgtggtaaaacatcttttactaggacgtaaagccattgatgtttcttgtttttgtgaatggccatttttctcttgaaccaatggcctttttcttttttttttttttttttttgagatggagttttgcacttggtgcccaggctggagtgcagtggcgtgatcttggctcaccgtaacctctgcgctagcccttttaaataacttttaaaaattgagacagtgtcgggccaggcacggtggctcacgcctgtaatcccagcactgtgggaggccgaggcgggcggatcatgaggtcaggagatcgagaccatcctggctaacacggtgaaaccccatctctactaaaaatacaaaaaattatctgggcatggtggcgggcgcctgtagtcccagctacttgggaagctgaggcaggagaatgccgtgaacccaggaagcggagcttgcagtgagccgcgatcgcaccactgcactccagcctcggcaacagagcaaaactccatctcaaaaaaaaaaaaaaaattgagacagagtctgactctgttgcccaggctggagtgcagtggcgccatctcaccttactgtaacctccgcctcccgaggttaagcagtcctctcgcctcagcctcacaagtagccgggattacaggcacgcgccaccatgcccggctcatttatttttatttatttatttatttattttgagatggagtctcgctccgtcgcccaggctggagtgcagtggtacaatcttggctcactgcaacctccgtctcccaggttgaagcatttctcctgcctcagcctccctagtagctgggactacaggcacccgtcaccacgcccggctaatttttgtatttttagtagagatggaatttcaccatgttgatcaggctggtcttgaactcctgacctcatgatccatccgcctcagcctcccaaagtgttggcattacaggtgtgagccactgctcctggctttctggctaatttttgtttttttttgtatttttagtagagacagggttttgccatgttggccaggctagtctcaaactcttgacctcgggatctgcccgcccccacctcccaaagtgctgtgattacaggcgtgagccacggcactaaattttattttagaggcagggtcttgctttgtcatccgggctggagtgcagttgtgcgatcctggctcgctgcaggcctgacctcctggactcaagtgatactcctgcctcatcctcccaagtggctgtgacctcttcctcccaaggagcatgtgccaccatgcctggctaattaaaaaacattttttttagagatggggtcccactatattgccccggcttgtcttgaactcctggtctcaagtgatcctcctacttctgcctgccaaagtactgggattacacgcaggagccgtcgtgcctggcccccagtttttttcttaatgtgtttgtcttttttttttttttttttgagttagagtctcgctctgtctgttgcccaggctggagtgcagtggcacgatcttggctcactgcagccttcgcttcccgagtgcaagcaagtctcctgcctcagcctctggagtagctgggattacagatgcccgctgcgactcccagctaatttttgtatttttggtagagacggggtttcaccatgttggccaggctggtctcgaactcctgacctcaggcgatccacccacctcagcctcccaaagtgctgggattacaggcatgagccacctcacccgggtgtttgtcttttgacttaaatttttatgtggtccttatatttatggccttttgggttatatattttgtttagaaacatttcctcttaaggccgggcgcggtggctcacgcttgtaatcctagcactttgggaggctgaggcaggtggatcacgagttcaggagtttgagaccatcctggccaacatggtgaaaccccgtctctactaaaaatacaaaacattagccgggtgtggtggtgggcgcctgtagtcccagctacttgggaggctgaggcaggagaatggtgtgaacccgggaggcggagcttgcagtgagccgagatcccgccactgcactccagcctgggcgacagagcgagactccgcctcaaaaaaaaaaaaaaaaaaagatttcctcttaaatcattttttttaaaaactcaagatgcctggcagtttaggaactgcaaagcaaaactacagtgagttagcacttcctactcactagggtggctataattaaaaattaaagaaacaacaacaaaaaaacaggtgatacaaaatggataactaggatgtggaaaaatcagaaccctcccacactgctggtgagaatgtaaaacggtgcgacctctgcaggaaaacattcttgcagctcctcacacagtcaaaccgaattaccatatgaccccacagttctaccctgaggcacataccttgtagacatgaaaacatgtccacagaacagcctacacatgaatgttcatagcagcattattcataataacccgaaaatgaaaacaatctgaaggtccatcagaaggtggaaacgaggctgggtgcggttggtcatgcctgtaattgcagcacttcrggaggccaaggcaggaggattgcttgaggccaagagttgaatgccagcctggacaacatagtgagactccatctcgaaaaaaaatttttaaaaattgctgggtgtggtggcacatgcctgtggtcccagccatttgggaggctgaggtgggagaattgctcgagcccaggagtttgaggctacattgagctgtgattgtgccactgcacttcagcctggtcaaagagcaagaacctatctcaaaaaaaaaaaaaaaaaaaaaagagtgcaaataggccaggagtggtggtgcgcccttctaatcccacctgcttgggaggctgaggtgggaggatcgcttaagcctgccagttggaggctaccatgcaccatgacagtgcctgtaaacagccactgcactccaggcaacatagtgagacccccaccccaccccaaaacaaaagttacagtaaaaagttggaagctgggcctggtgcagtggctcatgtctacaatctcagcacttcgggaggctaacgtgggtggattacttgaggtcaggagtttgagactagcctggccaacatggcaaaacccgtctctactaaaaatacaaaaattaactgggcgtggtggcgggtgcctcagcaggagaatcacttgaccctgggaattggaggttgcagtgagcggagattacaccactgcagagtgagactccgtctcaaaaaaaaaaaaagaaaaaaagggccgggactggtggctcacgcctgtaatcccagcactttgggaggccgaggtgggccgatcacctgaggtcaggagtttgagaccagcctgaccaacatggagaaaccccgtctctactaaaaaaaaatatatatatatataaaattagccgggtgtggtggcacatgcctgtaatctcagctactcgggaggctgaggcaggagaatcacttgaacccgggaggcagaggttgcagtgagccaagatcatgtcattgcactccagcctggcaacgagagtgaaactctgtctcacaaaaaatttggaagcaacccagttgcccatcatttgatgaatggaaaaaaataatctatacagcggagtgctcttcagttataaaaaggaatgaggtgctgatacatgctatatgtggatgaaccccaaagactttatgctaagtcaaagaagccagacaaaaaaccatatattgtatgatttcatttctgtgaagtgcccagaaaaggcaaatccatagagacagacatagatgagtagttgccaagagctggtgggagagggaaaagagagtgaacatgagtggctgtagggcttcttttggggtgataaaaatgttctgtagttgtccgggcayggtggctcatgcctgtaatcccagcactttgggaggccgatgcgggcggatcacgaggtcaggagatcgagaccatcctggctaacatggtgaaaccctgtgtctactaaaaaaaaaatacaaaaaattagccgggtgtggtggcgggcgcctgtagtcccagctactcgggacgctgaggcaggagaatggcatgaacccaggacgcagagcttacagtgagcccagatggctccactgcactccagcctgggcgacagagcgagactccgtctcaaaaaaaaaaatgttctgtggttagtggtcgtggctgtacaactttgtgaatatactaaaaccactgaattgtgcacttgggtgaattatatggcagatgtgttacatctcaataaagttactaaatctttcatgttttctttcagtacttttagcttttatttttacttctatggtccatctggaattcattttgacttaataagtgacagcggaaattaaaaaaaaaaaaataagaggttggtcttgctatgttgcccaggctggtctagaactcctggcctcaagtgttcctcccaacttggccttccaaagcactggggttacaaacatgagcccctgtgccctgctggaaattaatttaacctttttttgtgtgtgtttactttttgagagttgggggggtctccctrtgttacctaggctggcctcgagctcctgagctcgagggagcctcctcctgcctggatctccctcccaaagtgctgggattacaggtgtgagcagccatgcctggtctggaaatttattttaatattgtagctttatattaatgttctttaatatttgatgaatttcctcagttttttcaaaatttctttggctatttatgtacactaacttttccacatgaattttagaatgagaatagtttaaaaatgtgtttgaaattttgtaaatgtgtttatgtttctcgtaagtttttaagtgttttttataatgcaacgttttgtttgttttgagacagagtcgtgctgtcgcctaggctcgagtgcagagatgcaatttcagctcactgaacctctgcctcccaggttcaagcgattctagtgcgttggtctcgcgagtagctaagattacaggtgtgcatccccatgcccagctaatttttgtatttttagtagagacgggttttcaccattttggccaggctgttctcaaacccctgacctcagctgatctgcctaccttggcttctcaaagtgctgggattacaggcgtgaggcacctcacctggcctgtaatgtaacttttgtaaatagttttgttttttgatttttttttttgagacggggtctcgctctgtcgcccaggctggagtgcagtggcgcgatctcggctcactgcacgctccgcctcccgcgttcactccattctcctgcctcagcctcccgagtagctgggaccacaggcacccgccaccacgcccggctaattttttgtattttcaatagagactggctttcaccgtgttagccaggatgatcttgatctcctgacctcgtgatctgcccgcctcggcctcccaaagtgctgggattacaggcgtaagccaccgcgcccagcctaacttttgtaaatagttttataagtagggtatttattttgtagattattgatatatgtagtccaatatgcaaacgatacagaggtatatctgatgaaaaactcgtctcccactgacatgcctcagacaacacccctcctggtggcaagtccattagccagtttttgggtgtccttgcagagatctgcgtggcatatgagaatagctatgcatgcatgtatcacataacatgtatatgcatttgaacaccatggtagtgtgtgcaaaccgctgttctacctctagtgttttttctttgtgttaraggtaattcagcatcagcacacattacacagcattgtcccatttctctataatcccatgctttccaagtgttaccttacgtctgtagtttacttgttagtcctccgcttgtgagtatgtagcatatgtaacagtcttaagtgggttatttaatgacagtctttggccctagtagtgtttcagagttttcttaaaagatcttgccaaaaaagaaaaaaaaggaaagattttgctttcttggtaaatgcattcttaattgtttagtttttgttcctggggtctcttatgtcatattttctaactagttttctgtatataggacgtccgggtgttgatttttgtattctaccatcttactgaatgctttttttttttttttttttttttcaagacggagtttcactcttgttctccaggctggagtgcaatggcagcatcttggcttaccacaacctccacctcctgggttcaagcgattctcctacctcggcctcccaagtagctgggattacaggcatccacgacaacacctggctaattttgtatttttagtagagatggagtttctccatgttggtcaggctggtctcaaactcccaacctcaggtgatccgcctaccacagcctcccaaagtgccaggattacaggtgtgagccaccgcacccagctttttaaatttctcttaaagacagggtctcactttgtcacccaggctagagtgcagtggtgtgatctcggctcactgcagcctttaccctctggtctcaagtgatccttccgcctcaagtaccccaagtagctggaactacaggtgcgtgtcaccatgtccacctaagtttttgtatttttggtagggacggggtttcaccagtttgcccatgctggtctcaaactcctgggctcaagcgatctgcctgcctcagcctcctagagtgctgggattacaggtgtgagccactgccctaggccttattctttaaaatgatctgcctcttgaaaaatgaaagtcttttctcaaaaaacttcttcccaggtctgtgaagcagcacagtggccccttctggctctcacsttgtacctcgtccttgtttgcctcgagcataggaccttgtctgtgtttgtgcctcaggccccctccctctgtgtttgctgggtccacttagtctagtcattgggccttggctcctaagaggcccctagactgaattcctcatccgatgtgtccataccagctttcaagtgacctcaacatcgacagcagggaaaacattagcacttttgtgacagcctcatattttcccccgcccgagatggagtctcactgtgtygcccaggctgggattacaggtgcacgccaccacacccagctaatttttgtatttttagtagagacagggttcaccatgttggccacgctggtctcgaactcctgactttgtgatccacctgccttggcctcccaaagtgctgggataacaggtgtgagccaccgtgccgggcagcctcatatttttaataatttaatatctgttttgaataaataaatatggtttgattaaccaaaaccatgtgaacaggtaaagcttgagaagtcttgctgctgttcagagcacctgctgtcttcataaccactattagttgcctgtgggtcctgccactacttacttgtatgactgtagtaagtgcagatgtacatattccctcagggacgcacccttctctgtgttctgttactcactacatagctcgtggagagcttgctgtgttcatatatagtttggtgctccttcgctttctgtagccactgtgaaatgccgttcatatcttttgccccaggtttttcttctggactgtctggctattttttttttttttttttgggacagggtcttactctgtcacccagactggagtgcaggggcgcgatctcagctcactgcaacctctgcctcgggttcaagcgattctcctgtttcagcctcccaaagtgctgggattacaggcgtgagctactgtgcccggcttctgttttattttttggtttgattctgtcagttattgagagaggagtgttaagatctccagctgtgattgtggaattgttttgtctttaattctttccgttttaacttcatatatgttgaagctctgttattaggcaaatacacacttgtgattacattttcctgatgaattgtttgttgtagtattctgaaatatccttcttttttcctaataatattttttattttgaaatgtattttacttgatattaatagagccactccagctttcttaaacacactttttggatggtatgtatttttccattcatttgtcttaagtgtatctttttctttatgtttaaagtgtcttgtagatagcatgtaattaggtcttcctttaccaattctgacaatccttgccttataattagagttcagtctgttaatgtaagagtaaatatcgatgtggctggatttattgctaccattttattatttgccttttatttgtccttttggattttttccctgtttttcctttccttatcaatgaaatgtatttgagatttccattgtggtttatctaatgctttttaaagctattcttctttgaattattattttagtggttactctggtgtttgaaatatgcacccttggccaggtgcggtggctcacttctgtaatcccaccactttgggaggctgaggcaggaggatcccttgagccccagagtttgagaccagcctgggcaacatggagaaaccccatctctactaaaaatataaaaattagcctggcgtggtgatgtgcatctgtagtcccagctactcgggcggctgaggcccgagaatggcttgaactgggaggcggagtttgcagtgagccgagattgtgccagtgcactccagcctgggcaacagagtgagactgcatctcaaacaaacaaacaaaaaagtctgggcgtggtggctcacacctgtaatcctagcactttgggaggccgatgtgggcggatcacctgaggtcaggagttagagagcagcctgaccaacatggagaaaccccgtctctacaaaaaatgcaaaattagccaggcgtggtggcacatgcctgtaatctcagctactcgggaggctgaggcaggagaatcgcttgaacccgggaggaggaggatggggtgagctgagatcgcgccattgcactccagcctgggcaacaagagggaaactccatctcaaaaaaaaaagtttgtaaagagtagcttttgtgatagatactttggcataccaagaaatatggatgttcctgtcttcaaagagtgttactgagaaatacaagctttttcctgccctaatttggtgagataaattatacattaaccaaaaaattaacagtgggaaatgtcatatgctggcatatagcagcagtttcaaatgagcagcacaggctgggcgtggtggctcagacctgtaatcccagcagctttgggaggctaaggtaggaagattgcttgagaccaggagcttaagaccagcctggtcaacatggaaacaccctatctctaggraaaaaaaaaaaaaaagaatttagtcctgtgtgatggtgcttacctgcagtcccagctgttcaggagagtaaagcaggaaggtcccttgagcccaggagttcaagactgcagtgagccatgactgtaccactgcactccagcctgggtgacagagcaatctcttttctaagaaagaaagaaatagtaaatacatgaataaatcttttttttttttttttttttttgagacggagtttcactcttgtcacccaggctgctggagtgcaatggcacaatctcggctcaccgcaacctctgcctcgtgggttcaagtgattctcctgcctcagcctcccgagtagcggggattacaggcacccagtgctaattttgtatttttagtagagatggggtttcaccctgttggtcacgctggtcttgaactcctgacctcaggtgatccacccgcctcggcctcscaaagtgctggrattatggtgtgagccactgcgcctggccagtataaaatttttttaaatgggcagcataaaaagttaagtgcagtgaactcataggaagagattattgtgaactgctggggccagggaggcctgaatgggagagagggcctgcagccaggccctgcagcarctcggatgggaaggagtcccagctactgagactgcagctgcagagtggaggagctgcatgggcactggcagtagtgggtagggatgtggggggtggaaggggaggggtgtgtggtgtcacattcaaactatcagtgcttcccattttgtgcgaccccaaaccaccagatagtttaacagtaagatcttgtagcctgacattgaggtttgtggtttttcctttagggtgtaggagaaacacaaagacggaaattgtacagytagcgtgtttggtatctggttcaggcagatttattcctctaatggtttattttttttttaatttttaattttttttttgagacagggcctggctgcatctcccaccctgaaatgcagtggcgtgatcttggctcactgcaacctctgccttgcaggctcaagtgatcctcccaagtagctgagactacaggcatgcaccaccacacctggctgtttttttgtagagatggggttttgccatgttacccaggctaatttcaaactcctgagctgaagcgaccccccggccttggcctcccaaagtgctgggattacaggcatgagccactgcacctgagttagtgattaaaagttgttgtagaagccgggcgcggtggctcacgcctgtaatcccagcactttgggaggctgaggcgggcagatcacgaggtcaggagatcaagaccatcctggctaacacggtgaaaccccatctctactaaaaatacaaaaaattagccgggcatggtggcgggcgcctgtagtcttgggaggctgaggcaggagaatggcatgaatccgggaggcggagcttgcagtgagccgagatggcgccctgcactgcagcctgggcaacagagtgagactctaaaaaaaaaaaaaaaagttgttgtggaaagtttacataacctgaaatcaaatctgcttttaagaatgctgtcaattcaattaatgtaatcttggcgttatgatactaagtcttgcaattctggctggaaatatagatttcttatttttttctttttcccaattgtgaggacttctatatactcctcccataatgaatattatattaaatcctttcaaaaatataggctgggtgtagtggtttgtgcctgtaatcccagcactttgggagactgaggcagacggatcacgaggtcaggagttcgagaccatcctggccaacatggtgaaaccctgtctctacttaaaaaagaaaaacaaaaaaacaaaaaaacacaaaagttagccgggcatggtggtgcacacctgcaatcccagctacttgggaggctgaggcaggagaattgcttgaacctgggaggcagaggttgcagtgagccgagatcacgccatttcactccagctctgggcaacagagcaagaccttctcgaggaaaaaaaaaaaaaattctgcatattaattggggaaaaaccaaaaagactagaaaaatgaaacatggggaaatcatgtttaatcttagagtgaggaaggcttttacaaccaaaagactaatttccttttttttttttttttgagacagagtcttgctctgttgcccagggtggagtgcagtggcgccatctcagctcgctgcaaactccgtctcccgggttcatgccattctcctgcctcagcctcccaagtagctgggactacaggcgcccaccactacgcctggctaattttttgtatttttagtagagacggggtttcaccgtgttagccaggatggtctcaatctcctgacctcgtgatcctcccgyctcggcctcccaaagtgctgggattacaggtgtgagccaccgctcctggcgactaatttccttaatatataaaaagctcttacaaatcaataagaagaagatttaaaatgtagtagaaaaattatcagaggataccaacagtcccttaacaaaaaaggaaataggaaatatttaaaaatacgggacagtgctcagttttgcttataataagagaaatgtaagtgaaaactrcagtgaaaattttatctgaccaataggcaaagatccaagagtttcatctcaacactgacttggcaggaatgtaggatgatatgcactttagtacattgctgtgggaacgtaaactgataggatctctgtggagtgtgacttggcagtatctaccactgcttmaaatacataaccttaggctgggcgtggtgtcttacggctctaatcccagcgcttgggaggcagaggccgggggatcacttgagctcaggagtttgagaccagcctgggcaacatggtgaatccctgtctctacagaaaacacaaaaattagccgggtatggtggcatgagcctgtagtctcagctactcggaaggttgaggtgggaggatcacttgaatccggagggttgaggctgctgtgagccaagatcactctactgcacttcagcctgggcgacagagtgagacccagtcaaaaaaaaaaagaaaaaaaaaattagctaggagtggtaatacacggcctatagtcccagctactcargaggctgaggtgggaggatcacctgagcccgggaaggtcgaggctgcagtgagctgtgattgtgccattgtgatccagcctgggcaacagagtgagaccctgtctcaaaatagtagtaacttacaccagccagttattgctgtggtgtttcctgatggtgtgctttctgttttctgccattccttgtgtttattcattggaattctgctgtgatgaagagctgctgctcctcctctgtttaagtgtgcaccgatgtttgcttgatttgccgggtcacagcttacaatccattattgtcgttcgttattttgccgcacagattgtcctagattctgccactgggagcccttctggctgggctgtgtgttctcctgacacaccccgtcctttctcgtccttctgcacaccactgggtgtcctaggctcctctgtgtgctccgcagggatctctggttcctgtttttggagagaggtattcacaaaccaagatctggctgccaggtagggtgaccagccgtcctagtttgccaggacaaaggctttccctgggacgtgggactttagagtgctgaaactggaacagcttttggactttgctctctgtagcctaagtggggggtcatcgcgcctgggccctgtcacgcgtcagtggacagagctgggaaatgtgtgtgtgtaaatgttccggtattgatttctgcatccagtctgtacacatggcaaaggttgtgagcctgtactgatgcctgtacctccagtgccgccccgcagggtttattcctgccccttccttatcagtgacttttcttcaactgtgaggaccccaactcagtagccacaatcagcttttccgcttgatcttggcacatgcgtaaatcgggctcagacctgctgactccgcaggggacacatctcctgcccgagcctggtgatggtgtgctgtcctctgaggttagttttacagtaacagtcaaagtgctattttctgaagtctcttaggttagttcttctttcagagtggtgatgtcatcgtcacagctctgcatatttgctgtttgtatttcattttgtgttcatgtgcgccctgttttgttttcacggtttctttttctttttctttttcttttctttttttttttttttcgagacagagtctcactctgtcgccaagtctggagtacagtggtgcgacctcggctcactgcaacctccacctcctgtgttcgagcagtccttccacctcggcctcccgagtagctgataactagaagtgcgccaccacgtctggctaagtaatggtttgttttttgagtatgagaaacctgaccatggttctaagagagacatacgaaaagatgtatgtggaagtgtcatgttccctcagctctgccagccctctccccttcccgctttctttgcattctctgtacatatgctggttgggggttgaattgtgtctccccacgaaagatgttgaagtcccagctctcagtacctgtgaatgtgaccatatttggaaatagggtctttgcaggtgatcaagttaagatgagttcacttgggtgggccctaatccagtatgactgtgtccttataaaatggggacatttgaacagacagacatgtgtagagggagaagggcagacgtcctgaagggaagacacagggagaagatgaccacccacaagccaagcaacgccagaggctgcagaggctggaagaggcgcaaacagaccctccctcccagcctcaggaggaaccagccctagtggcaccttgatcttggacttcttgcttccaggactgtgagagaataagtgtctgttactgtaagctaccgggtttgtgccacggggagtttaatacacacctcctgtaggtaaccaagctgtggggtttgaaggccgggtacagtggctcatacctgtcatcctagtgctttaagaggccaaagtgggagggttacttgagtccaggagttcaagaccaggctgggcaacaaagagaaaccttgtctctatttttattcttttttaaaaagaggccaggtatggtggctcacgtctgtaatcccagcactttgggaggccaaggtgggcagatcacttgaggtcaggagttggagaccagcctggccaacatggtgaaaccatgtctcttttaaaaataaaagccaggcatggtggtgcgtgcctgtaatcccagctactagggaggctgaggcaggasaatcgcctgaacccaggaggcagaggttgcagtgagctgagatcatgcccctgcactccagcctggatgacagagcgagactctgtctcaaaaaaaaaagagaaagatacgttcgcgtcctcatccctggtacttgtgagtgtgagcttatttgggtcatttcagatgtatcaggttgtgatgaggtcacactgcatgggggtggggcctaactccagtattcctggtatccgtataagaagagggaaatctggacacagccaggactcacatagagaagagcttgccatgtgacaagagacagagcctggagggtctgcaaagcatgaaacaccaaggatgccggctactgccagaagctggggagaggtgcgggatggactctccctcggcacctccagtgggaagcacccctgcccagaacctgggacctttttttttttttttgagacagagtctcgctgtctcacccagcctgaagtgcagaagtgcggtagtgtgatcttggctcactacagcctcaacatcctgggctcaagtgatcttcccacctcagcctcacaagtagctgggactacaggtgcacaccactacacctgcctagtttttgtgttttttgcagagatggagtctcactttcttgcccaggctggtcttaaacccctgggctcaagcgattctcctgccttggcctcccaaagtgctgggattayaggtgtgaggttgtgtgcctggctcagaactgtggacctttttgaaactgcctagtttgtggtgctgtgtttcagtagtcctaggaaacaaaatacacagtcacatcagtttctggtttatcctttttgtgtttcttttacacaaatggtgagaaacactgatatgctctgtgggcaggtgttggcacttggacacttccctcctgtgcccccagggctggctgtgctttggaaggaggcacagagacttcagcaccctggtttgatgtagactgttcgcgaactcctctaatgccaaataccatttaattccagaagaaattttttttttttttttaactgtacgaataaagtgaacaatgcaattacatgggcccaaataactggatgtttacatggtttggaatttgaatactttctgaattgtggtagatgtttttaaggtatctgcatagagataaagacaggctagggttggccgggcatggtggctcacgcctgtaatcccagcactttgggaggcctaggtgggtggatcacctgaggtcaatagttcgagagcagcctgaccaataaggtgaaacctcgtctctactaaaaatacaaaaattaggcatggtggctggtgcctgtagtcccagctactttggaggctgagacaggagaatcgcttgaacccggaagatggaggttgcagtgagccgagatcactgcactccagcctgggcgacagagcgagactccatctcaaaaaaaaacaaaaacaaaaggccaggtttgtgctgtttgtaagtccaggaataagcctaaagaataggcaagttttggctgggcacggtggctcatgcctgtaatcctagcactttgggaggctgaggtgggcagatcgcctgaggtcaagagttcgagaccagcctggccaacatggtgaaaccctgtctctactaaaactacaaaaattagctgggtgtggtggcaggcgcctgtaaacccagctactcgggaggctgaggcaggagaatcgcttgaacccgggaggtggaggttgcaatgagccgagattgcaccattgcactgcagcctgggcaacaagagtgagacttcatctcaaaaaaaaaaaaaaaaaaaaggcaagtttttgtaccttttaggagtatgaaagttgatatgttaatttttttttttttttgagacagaatgttgctctgtcacccagcctgtagtgcagcggcacgatctcggctcactgcaacctccacttcccaagttcaagccattcccctgcctcagtctcccgagtagctgggattacaggtgcctgccaccatgcccggctaacttttgtatttttagtacagatggggtttctccatgttgrccaggctggtctcgaactcctgacctcatgtgatccgcctacctcagcctcccaaagtgctgggtttacgggcgtgagccaccgcacccctggctgatatgctgatttttaaaaccttgattcctggatattctgttgtctttcctttctacttgttacaaatttgtgaagaacaggagaggctcccagttagatgcggttcatttaggcttagactttgacacggcgtggctggctggccacatatccttgacaccatcacgtattgcaaatctactgaccaaggcagggtcctggtatgtggtccctggggtcagtgggtgttggtgttgggtcggtccagtcctgtgttggagtgaaagtgtctggtttctgggcctgcgtcggtgaactgcgtgcggctggggacacattggctgctttcctccctcgctgggctctgccggcaactttctcagcccactggactgagcaggaagttacagaagacaagtctccttcttagttagaaggtagaacccatcgtcagctgtttttcagtttttaaagtacacaaattttttttaaaaaatctgttttggatgaaaaagcaatgggaaagaatcaacttttagaagatgagacagtttcagaatattaacatttaaatatttggatcccttttgggaggattttttttttgcttgactgtcaagagcaaagaagtgtggcccatcgggggcttctgcaggggctgcgagggtcgagacaggtttcagtttggtaggttgatgcgaggtgtcaccygtgaggcgaatgtgggaagtgctgtcagcaggcatctgccagctgggcatggtggctcacgcctgtcatcccagctctttgtaaggccaaggcgggaagatggtttcagcccaggagttcgagaccagtcttggcaacatagcaaaaccccatttctacaaaaaattttttaaaaaattatgggggcatggtggtctgtgcctgtggtcccagctactcgtgaggcggaggcaggagcattgcctgagtccaggaggttggggctgcagtgagctgtgatcgcagtgacagagcgagaccccctctgaaaagaaggcagcagcccaccccctccagtttcgcttctgcggttctgagaagacacagtatcttayactgatgacatctgtgagggctccttgccaaaaccacaccctgacactgtggcatttggtcctgtrgatttctctttcagcaacagcccgacttagagatgtccacgctagcttctgctagacacccttgatgggacgaattaccatattgtttctcgtgtcttcctaattctcattctttctgcatatttgtcttttcaggaaaaccaattctgtgtcctcggaggaccacagcccagttgggccccaggcgaaacccagcctggagcttgcaggcaggacgactgttcagcacgcagaccgccgaggacaaggaggaacccctgcactcgattatcagcagcacagagagcgtgcagggtagccttggctcgtgctttggtctgggagggctttttggttcactgctgtgcgtaaaggggcattttcagggtggaggcagtgattggtagagccaccgccttaggtgtgaaatcagaagstcttggctgtagggagtgctgcgccctccatttctgtcccagcgagggacttctgccagtgtcrggtgtgtcttgccccctctggtggccacccgtgagtttgccgtccggcacctcccctgagtggtgattcatggcacatctgctaataatcatggaagcgggaggggaaactcagcattggcccagtctgcgcaggaccgaattctggagctgtcttttcattccctctgaagtataaaaaagcagtctttggagccagtcctgaagtggctccatttctggcttttaagtgggtcgacaagagtagaatctttgaagttaaaaagagaagtgaggttttcttgttattttgatttctaactaattaatttggaaaccgcttttttgaagaatatagtccaggcacagtggctcacacttgtaatcccagcactttgggaggccgaggcaggaggattgcttgaggccaagtggtcgagaccaacctgggcaagatagaccctttctctacagaaaaaaattaaaaagttagccaggcatggtagcacacaccagtggttccaggtacttgagaggctgaggcaggagaatcggttgagcccaggaagttgaggctgcagtgagcacgatcctgccactgcatagcagcctgggcaacagagccagatcctgcctctaaaaaaaaaagaaagaacatataatctggttcttagaggcagtccagttctcgtaaccatgcacattgggaaaccaggctcagcattccctcgacatagcccgaggcatgtctggcctcagcagtgggaggatttgtcctgccctgagacctcctttctgagagactttttgttttgttttgttttgagacagggtctttctctgtcacccaggccgagtgctgtagtgcaatcatggctcactgaagcctcgacctccctggctcaagtgatcctcccacctcagccccctgagtcactgggaccacaagtgtgtgccaccaccgtcagctactttgtgtattttttgtagagatggcgggatccctctgtgttgcccaggctggtcttgagctcctgggcttaagtgattctcctgccttggcctcccaaagtgctgggattacaggcatgagccatggtgcccagccagactttgtttctgtctgcttctttctttttgttcatgatcttaaatgtgtgggaggccgaggcgggccaatcatgaggtcaggagatcgaggctatcctggctaacatggtaaaaccccgtctctactaaaactacaaaaaattagccgggcgtggtggcaggcacctgtagtcccagctactcgggaggctgaggcaagagaatggcgtgaacccgggaggcagagcttgcagtgagccgagatcgtgccactgtactccagcctgggtgacagagcgagactccgtctcaaaaaaaaaaaaaaaaaaaagtttaaaactcataaacttaagctttctttggaatgtgacgtagcgtattcttgcacaaaaatagaagttaaactttgttggttgtgtctgtgtttcattactaggttccacttccaaacatgagttccaggccgagacaaagaagcttttggacattgttgcccggtccctgtactcagaaaaagaggtgcgttccctgctaaccatgcccratgctagcaaagtttcttttcacaaagctggtttttatgccattctggagaattgccagataatatattmgctgtgagaaagcattaaactttggacaggtcctcatcttaagctaccagtgagaggagttttaccagaatctrttttggtttcctggataagtgtatccagatggttctttgggctggatcaactctgggaattaattgaattttgccaataattttaaaagttcccgaaatacaggcctggtgtggtggctcatgcctgggaactcagtgctttgggaggtcgaggcaggaggatcacttgagcccaggagtttgagaccagcctggtcaacacagcaagactccgtctctacaaaaaatttaaaaaattagccagctatgggggcactgacctgtggtcccagctactcaggaggctggggtgggaggatgacttgagcctggcagactttggggctgcagtgagccatgattgtgttactacactgacctgcacaacagagtaagaccctctctccaaaaaaaaagtcccccaaatcctagcgtgcagctctgctgaattccgtctctgtggagctttggatacgctctgaggcccctttgcctggtgggactacctgcaggtcttggcggctttggctgccggaggaagaaggttccccagtcctgtgtgtatggagcagggaggagttactgaggaaattaaaacgcatttggggccaggtgcggtgacccacacctgtaatcccggcactttaggaggccaaggtaggaggattgtgtgagtccaggagtctgagaccagcctaggcaacgtgaagagaccccatctctattaaaaaaaaccccgcaaaactcatttggggtgacaggacaaggaaaaagaaagatgaaggccaccatcgttgacatgctgattattgctggaaggcaaaggagartcctgaagaaagtttgtaaagcagcagatttcaaagctcagagggccttcyaggagctgtttccgggtttcgtactgatgagtgctgcattcctgactcccagtgacctccagcttccgcccagatcagccaccgcttcctcttcacctatgtgctcttgcggacttaatttttctatttttaattgtgtgggtttttkttttttttttttttggttttttaattttttggaacagggtctgggtctgacgcccaggctggagtgcagtggtatgatctcggctcgctgcaacctccgcctcctgagctcaagccatccttcctcctcagcctctggctgatatttgtatttttttgtagagacggagttttgccgtgttgcccaggctggtcttgaactcctgggctgaggtgatctgcctgtttcagcctcccaaagtgctgagatcacaggtgtgagccaccacacccggcctctctcactgattttaaatggaaggtctgtttgaggtcagtgtgcttttcagctcctgagggacagctgggccctgaggcctgtttttctccgggtgtggtagacctggtgtttggtggtccccactagatgagatgaagctagggaacctgtttttgtggagtaggagtgtattagtccattttcacgttgctgataaagacatacctgagactgggcaatttaccaaagaaggagctttaattggacttacacctccatgtggctggggaagtctcacagtcatggtggaaggcaaggaggaacaagtcccgtcttacatggatgacagcaggcaaagagagaatgagcaagacacaaaagcagaaaccccaaaaaactgtcagatctcatgagacttactcactaccacgagaacagtactggggaaacggcccccatgattcacttatctcccaccaggtccttcccacaacacgtgggaattatgggagtacaattcaaggtgagattttcgtggggacacagccaaaccatatcaaggagaaatggatgtttgagtgatatgccgtcatccctgtgcaggagttgggaaagaaattgttcctcgcaggcctcttttgtttgtttttttgagacagagtctctctctgtcggggctggagtgcagtggtgccatctcggctcactgcaacctccgccttgtgggttgaagcgattctcctgcctcagcctcctgagtagctgggattacaggtgtgttccatcacgcccagctaattttaatatttttagtagagactgggttttgccatgttggccatgctggtcttgagctcctgacctcaagtgatccacctgcttcagcctcccaaagtgcctggattacaagcatgagcccccaaccccagccagagggctcttcttaaagttataattaacagatggacacgtaacttcaggcttgattaaaaatcctgaaaagggccaggcaccgtggctcacgtctgtaatcccaacactttgggaggcggaggcacaacgatcacttgagcctgggagatcaagaccagcctgggcaacatagcgagaccctgtgtctataaaaattttaaaacaattagctgggtgtggtgcatgcctgtgggcccagctacttaggaggctgaggtgggaggattgcttgggtccaggaggttaaagctgcaataagccgtgattgcagcctccagcctgagtgacagagtgagactctcaaagaaatcctgaaaggaaagtcagcaccttcagtcactttgtgaccggcccagaggaactgcctttgactaaagcagaaactctttatgctttgagaattgactattctcctctaccttttaacagttattggaagtgcagctgaccagatagatcctgcaggatgagtgtccttcattgtctgtgcctcccatttctattcctgtaggtgtttatacgggagctgatctccaatgccagcgatgccttggaaaaactgcrtcacaaactggtgtctgacggccaagcactgccagaaatggagattcacttgcagaccaatgccgagaaaggcaccatcaccatccaggtacctccctcagtgtcyaggcgtgtggcaggcccggccatgcagcaaggacaggatccgccttctagtgatgtctcgggtcccagggacgtactggccgtccgtaccaccaggataactctggctataatttagtgttacagtagcactcattcattatagaaaattttggaaaagcaggtaagcagaaaagaagaaaatttgaaatcaccccatcatccagcaataactactggtaacatcttagcatatggccacacagggttttggtatatgcaggtattaacatatctaaacatatcttatttttaatgtactcttttcatatttttaactgcgttttcccctcaaaatgccgacgaagcagtgctgtggctgctgctgtagccttgtggaaattttaaggctgaaaagttaggccaaagaggatcaggtaggggccctgagagacattgcatccaaagacagctgcctcaggacctgtcatcccagggtcacggcgtcattgcgggggtgtctgtctctgtggagaggtggacagactggcctcggtgggatctgagtattcccttttagggtgctggcttgctctgaaggtcatgccacataaatgaatgcaggcacgcgtgaatgaatggacttgtgaagggatggctgttttaattaaaggaggggcttttgtgaggtgtcagctttacgcactccctcttgggtttagagaatccagactgagccccgtggtacgtgccagctgtttgtcatagcccttggtcataaggattgggtggggagtgggtttcttctctccctgcctttgctgagctggcctggctgtggaatgggccctgtgggcagggctgcagcgccctgtgctttcctcctgttttcagcacagaggttccttgcagatgattgaaaatggatgtgctggggcaaggggtcatggggacatgattcttggtctttagcagaggggccagtcctcatgtgccagtacttcctggtactaagaccatttatgttacaataatgatttttggttttgtcttttgtcttcttttttcttaaagaacagttctagatttacagaaaatttgagcaggtaatttagagctccattatatcctttgggacccagtttttctattctcaatagccgatgggagcgtcatggtccatttgtttcatcttttttccttttttttggagacagagtgtggctgtgtcgcccaggctggagtgcagtagtgtgatctcagctcactgcagcctccgcctcccaggtccaagcaactctcgtgcctcagcttcctgagtagctgggattacggatgtgtgccatgatgcccaactaatttttgtatttttagtagagatggggtttcaccacgttggccaggctgggcttgaactcctgccctcaagtgatctgcccgccttggcctcccaagtgttagattacaggcatgagccaccatacccagcccatttattacaattaattaactaatattgatagattattcttacctaaagttttagaaaaggaagctttcttgtggggtctcagaggtattatgccattccatctcatctactgatatctcagctacattgctttttgttatttttaggggattttctagggaataaaatatgcagccttaatttatcactgtctagcttgaattgatatttaacacttcattgtaagaatcttacaacagtatcattccggtggcaaaatcatctttttcttttgatgtcaaatattttatgtatatacctgttgtaaaccctcacaaattcctttttatttttgtttgagacagagtctcattttattgcctaggctggagtgcagtggtatgatctcacctcactgcagtgaggcctctgccccccggatttaagtgattctcctgcctcagccccccaagtagctgggtttacaggcacatgccaccacacccggctaatttttgtatttttagtagagatggggtttcaccatgttggtcaggctggtctcaaactcctgacctcaagtgatctgactgccttggcctcccaaagtgctgggattacaggcgggagccaccgcgcctagtctcaccatttccttttaaaatcacattgtgcgggtcgcctggcaacagatgatttctgtctacatctgaaaaatctatagtttttttttttttttagtaaatattttagaacagatttcaattttcagaaaaattttaaagatagtacagcgttgccatctactccaacacccagcttcccttatgattgaaaccttatggccgggtgcagtggctcacgcttgtaatcccagcactttgagaggccaaggtgggcggatcacctgaggtcaggagttcaagaccagcctggccagcacggtgaaaccccatctctaataaaaatacaaaaattagccagatgtggtggtgtgcacctgtaatcccagctgctcaggaggctgaggcaggagaattgcttgaacccgggaggcggaggttgtggtgagctgagatcgcgccattgcactctagcttgggcaacaagagtgaaactcgtctcaaaaaaaaaaaaaaagaaatgttagtatattacattggttacagttaatcaaccggtatggatatattattcttaacacaagtctattcaggtttccttagtttttacctcatgtcctttttctctcccagcatcccacatgacatttagttgtcctggccccttagctcctcttggctgtgacagtttctcagactttccttgtttttgatgaccgggaagatttttttttttgaaatggggttttgctcttgttgcccacgctggagtgcagtggtgygatttcagctcactgcaacctccgcctcccgggttcaagcaattctcttgccttcagtctctcgagtagctgggattacaggtatgtgccaccatgcctggctaattttgtatttttaatagagacagagtttctccatgtcggtcaggctgatcttaaactcccggcctcgtgtgatctgcctgcctcggcctcccaaagtgctgggattataggcatgagctaccgcacccagcctgacctggaaggtttttatgtttgtttagagtcaggatcttcttccgtctccaggttggggtgcattggtgctatcagggttcgctgcagccttgacctcctgggctcaagtgatctaccacatcagccccctgtagctagggccacaggcacatgccaccatgcctggctaactttaaaaaaattattttttttgccaggcatggtggctcacgcctgtaatcctagcactttgggaggccgtggcgggcagattgtctgagctcaggagttcaagaccagcctgggcaacgtggtgaaaccctgtctctgctgaaaatacaaaagaaattagctgggtgtggcagcgtgtgccggtagtcccagctactcgggaggctgaggcaggagaattgcttgaactcgggaggcggaaggtgcagtgagcggagatcacaccactgcactccagcactctagcctgcgtgacagagcgagaaatttttttttttttttttttgtagaggcagggtcttgctttgtggcccaggctggtgtcaaactcctgggctcaagcaattttcccaccttgaccttccaaagtgctgggattacagatgtgagctgttgtgtccagccctatgttttcttctagaggttttatagctttagctcttatatttagatctatgatccatttcaagttaatttttgtgtatggtgtgaggtagggcttgaggtttatgttttgtttatgggtgtacagttgtttcagtactatctgttaatagacctatcatcccccattgaattaccttggaatctttgtcaaaaatcaagtaatacactctctgtgcatctctgttcctgtgctctgtttggttctttcatccatgtgtcgatccttaaatgcccacatcgcactgtcttaattattgtagctttataggaagtcttaaaattaggtattttaaattctccaacttcgttcttcaaaatattttgaaaattttctaagttctttgtatttccatatacattttagaatcggcttgtcattttctacaaaacctgtgaggatttagactgggattgcagtgcagatcagtttgggaaaaaataaaaataaattgaaaataggagctattagttgcattttttcctttaccttggtctaacattaacctttcccttaaggactctatttaagtttctgatgtattaaacacttaaatgaaacttatatttaatgactgatatcaactagatactaattttaagtagttttttattcataattattacatgatctacaataaatgaatcaggctggattttggactattcaaaccggcacctcagaaataattgcccagaagcctcttggtgccatgtttcttgttggctgctggggcccgtgaaacatgcacacatgtgtgcactgcagtaactggtggtgatgtggttttggcacccattctgcctgtgctgcctacaatgggaaggctgacagctggccagtctccctggcctgctgcttgctgtggattatttgctgagtggcactgaccacccttgctttgccaatggagacagcactggcgcctggtgctagtgggctcccatggctcctgcaggctgtcctggagaggaagtctttagaaaggaacttcctagaaggaagttcagaaaactgtttctgagggcctttgtcccarttcatagatgtggaggcttggagtgagctcttttatttaaggtggtctgcacatcatagcagagcaagctggggctgtggctacattatgggcatgttgagcgaggatctgcagatgggagtctgactgggctttgaggaaggaggagcccatggtcagtaaggccttgtgtgttcaccagcgcgttggtctgtattgtgattcaggctgctatagccgaataccttagactgggcaatttataaacaacagaaccctattgcttacagttctagaggctgggaggtccaagagcaaggggccagcagattgggcatctggcgagggccctttgactcaggcagtgcctcttgcatcttcatacagaaggtggaaggggcaggcaagctccctcaagcctgttttctaagggccctactcccattcatgagagtggagccgtcgtgacttgatcacctccccaaggcccccctcccagtgccatccccttgggacttaggtcttaatatatggatttgggtgacactggcactcagagcagagcagctgcaacaggataggccagatagaggctccawcgcaagggctctgccttcccgcaggagaggcgtcygtgcccgctgttcccatggtggtagggtgggagtaggtgccgcgtgcagagctgcgttcccaacacctgcttcctggtstcctcagtcagatcattctgctggattgagagagccaycagaggggatcactgttccccagaaccacagccagggagaaggcgtgggggccacatcttgatggtgggagagctgtgcttttcctaattgctggtgtaatattttcttttcggaatggtttttaacaaacaaagcaactttctgctgtcccttcctgttttctctggtgaggccaagctgctatgactagaattagtcttttcgttttttctttttttttttttgagatggagtctcactctgtcacccaggctggagtgcagtggcgcaatctcagttcactgcagtctctgcctcctgggttcactgggctcaagcaattttcctgcctcagcctccgagtagctggaaccacaggtgctcgccatcatgcctggctaatttcttttttagtagagatggggttttaccatgttggccaggctggtcttgaactcctggcctcaagtgatccgcctgccttggcctcccatagtgctgggattacaggcatgaaccatcactcccggcccctagaattagtcttttctgatgagcatctggtgctacctggctgggccctgtctggccaatgtcattgacaccacttgagtccctgggactgctggtgcactcacccggctccccaggtgctgggggcttggcacttagtgcgtctctctcctcaggatactggtatcgggatgacacaggaagagctggtgtccaacctggggacgattgccagatcggggtcaaaggtaagygtggggcccccacacagcctcccccttcccctcagggtgcaaggatccctccagtaggggtggccctgggtgccagattaagtaagaacgttgtcagttgcatgccacgcagtgggtactgtgggaacacctcatgacatgacagccatccctcagtatctgggggttggtccctcagtatctaggggttggtttcaggaccccccttggatagcaaagtctgcagatgctccagtcccggattaaattggtgccgtatattgtagacacatcttcttgtatgctttagatggtctctaggttagttataatacctgatagaatgtaaatgctagatatagatataacatagttatgttttttatactactttttatcattgtgttgttttttattttttttctgagtattttcgatccttggctggttgaatctgcaaatgtggaacccgtagataggaggaccaactgtattggctcactgcaacctctgcctcccggttcaagcaactctcctgcctcagcctcccaagtagctgggattacaggcacgagccaccacgcctggccaattttttgtatctttagtagagacggggtttcaccatgttggccgggctatcctccagcctcagcctcctgaggcgtgactacaggtgcacgtcactatgcccagacccacagagcagttctgaccagaaccatcaaacccacagacgccgcatcccaagcccgttctcatcacggcgctgtgtgagaggggactgatccctctgaccctctctgcgtcaagcccacaaggctcagggaatcgactttgcagaaaagtgctgtgaggcagagcaacacatttggactcagaccaacagcctgggaacctccagcggtcgcccttttccagctctgggcaaagcacttacttcagtctcctcatctgtaagatgaaaacactaggtcgggtgcggtggctcacgcctgtaaccccagtactttgggaggccgaggcgggtggatcacgaggtcaggagatggagaccatcctggctaacacggtgaaaccccgtctctactaaaaatacaaaaattagctgggcgtggtggtggtacctgtcatcccagctactcgggagrctgaggcgggagaatcacttgaacccgggaggcagaggttgcagtgagctgagatcacgccaccgcactccagcctgcgcgacagagcgacactccatctcaaaaacaacaacaacaacaacaacaaacaaaaaacccaccctaactgtgacttgacccccacgttacgtcttttgttgtatttctctcgaggttggtctgctgtcctgtgtagcggccaccagctgcatgtggcagtttaaatgtaaatgcattcaaattaaataaaaggggacattgtgctcctcagctgcacaggccacattgcaggtgctcggcaggctgtcgcattgcacctggcagaacgttcctgttgttggagaaagttccatcggacaacgtgggccagggcagtgggcgtgtgtattttacttgactttggccttaggacctttggcagtattatagtagaaaaatgaagtgctgtgcggtgcttacagacgcatgcgcgtgatttctactctttttcccacaaagtgtagagtccaggagacttgaatatggaagccagtttggagcctctcctcactcctggccttcctatggaaggagcttattcaagggaaagagcttattcaagctgctctttccccacccccaggtgtgacccacaggcctccacctgtctgggacaggcaggactgtgagctttgggaatcwaatggaaaacacacttgtcccactgctgccagctggttgtcctagggctaatgtgtcacctctctgtgacttagctcttcacgtgtagaatggggtggaaaagtactcggtgtggctgttttcaggatgaaggggtcttagcggtgctcgcagaagagccacggtgttgggagtgtctgctctctggaggggaggctgcctyactaactggcctctgccccacaggccttcctggatgctctgcagaaccaggctgaggccagcagcaagatcatcggccagtttggagtgggtttctactcagctttcatggtggctgacagagtggaggtctattcccgctcggcagccccggggagcctgggttaccagtggctttcagatgggtgagtgacgaatgtcgcctgacaggcagctcaaagctgagctggagcccttagcatggagtttggaaagggatggactcagaaaacrtacacaggcattttctgggctttttatatgaaatctgactytcccattttggggagttagtgacttttgtggctccaggtggcctatggcacctgtctggtcccatgtggttggtcaccaccactgcgctcgggaaggcaggtccggcccgcgctgagctcctttctcagtggctgagctgcaggactggcctgtcgcctggtggacactatgcagcctcctgtgaccgaccttctgcaagagctcattctgcttcctcccagccctggcatttcctggctttgtctccccagcccacttctgcctctatagggtgaggagcctgctgggggctttttttttttttttttcctttgggacggagttttactcttgttgcctaggctggagtgcaatggcacaatcttggctcactgccacctccgcctcccaggttcaagcaattggcctgcctcagcctcctgagtagctgggactacaggcgcatgccaccacgcccagctaattttgtatttttagtagagacagggtttctccatgttggtcagactggtctcgaaccccgacctcaggtgatctgcccgtcttggcctcccaaagtgctgggattatagacgtgagccaccacgcctggctccgagggctttttagcaggtgagccgcttccagccagccgaggcgtcctccctccgtgatgccatttctgctccacagtgtgtgcactgtgctcagcttgactccccactctcccaaaactaacattcctgtttaattccatgggagcggggctcagagtaaacttaggccaaggcatcaacatggccctgccgggggattcccccctcctgtgcttcggagatggttttctgctcttcttagggggcgcctgtccccctggcctttgtttttgcccctgggcatctggcacccgatttggagctgggccagtcccccacmgtgccccagrcctgcttttggggtaagcccagaagcttcttcgaagcccagggtcggtggaggacccccgcccccccgccccccgcccgagggaaccaggagaactctgccgcctgcgacaggctcatcgttcctgatgggcatgtgatggcctgagtggtgcgctggggtcagaaatggggcatttgaggtgtgttgtgtgttgtttgggctctgcctatgaaaccctcgggaaccgctggagtcccatgcagggtatgtcccagtgtmacatccacctggcttttcctttcyttgcctgccttagttctggagtgtttgaaatcgccgaagcttcgggagttagaaccgggacaaaaatcatcatccacctgaaatccgactgcaaggagttttccagcgaggcccgggtgcgaggtgagcgggagcccgggcccaggctcactctgggatccatgtgtggcctggaggccaccaggtcagcaggcattttccctggttctacctgcacgtagggtgcacaggcagagccgtgaagggcygagccgctgcgggactgggargggggctgcccgccagggctgcgtagcatcgagctcctgctgggactgggaggaagctggcctggctgaggcggacctcctcctccttcctctgcgtggcccttggcctttagtgcacctgggggtttggcgcagtcctgtcccaggatgtgggcgtggccttccctctttgtgtcctgctggacactcagggaggccctgagtacccycaggagtcagcccagaaagccatgttccagccacaagctgacattgcagtctcgcagcagccggggcctccacagctctggttctcacgtgggctccgctgctgcccccgtgagactggggggaggacaggtgtccccactgtgccctgtttctgtacctgtgaagtgtacacagcatggaggacccttcccagcaggctggcgctcatcctggagctgctgcaaagcttgcgtttccacaagcattgtagatgcagtgtggtttttcttttgtcccttccagatgtggtaacgaagtacagcaacttcgtcagcttccccttgtacttgaatggaaggcggatgaacaccttgcaggtgagccctgagttcctctagggactggtcaaacatggagacaaatctgtacgtttcagggcagcggagaagagatgagcccaggggatgcggcccagagtcacagggcgagctgctctgtggagatgagacctgggtgtggggatgagacaggggcccagctctaccacagccctgcccctgtgcaccgggcagccggggtcaggggtcagggttcactgaggcgtaacgcccatcccagctggctcaccacatcagtgtgcagccatggtgttcagtgcagccacagagctgtgcagccaccccgcatcaattccagaacatcccatcaccccaaaaagcagccctttccccactgcccctcccccagtcccagcagccacggtctcctttctgtccattgtgctgcctgttccagacgtttctcctggatggagtcacacggcatgctgtcctcagtgactgacwtccccctcgcggctcagctgcggtgcagcgtgggtcgtcatcgctctcacggcccacactgtattcgtcagctcgcccctgctgggcagcgtcatcctctcccacaggccccctcaggtcccggctggtcctcctgacatgttgtcctgaggagctcctgccccagagccttgtgtgtctcccctgcactacccggcatagcccagcggtggggctggagaggggtctacgcctgagaccaccgccygtctgtcccaggagcctgtccagggccaggcgctgcactggctcaggcctgcacggtggtggagaagacgtgcgtggtgaacacgacgccctccccgccratctccgtttccaggccatctggatgatggaccccaaggatgtcsgtgagtggcaacatgaggagttctaccgctacgtcgcgcaggctcacgacaagccccgctacaccctgcactataagacggacgcaccgctcaacatccgcagcatcttctaygtgcccgacatggtgaggcacygtggcastcccacggccctcagggtgactctgttgtcccctgtggcatcagctctgcagatgtcacatgattaacatggcagtgtgagggcatgaaaaacataggtagtgctgggtgtggtggctcacgcctgttatcccagcactttgggaggctgaggagggtggatcacctgagcccaggagttgcagaccaggctggccaacatagtgagaccccatctctgaaaaaaaagaaaaaaagaacagatgcctctgggtgggtaaccacagaggtttcctctgtctcaggggtcacacatggcgagggaaggattgatgggcatctcagtgcaggctggggtggaggcttgtggactggggtgtgcctggggagggccctcagagcctacatcatctgctgtggatcagtggatgctgtcctgccaggcgctctgggaagggcctgtggtctgcctctccgttggcctctctgtgtgcttcctccacaccctccamctcccctggtttcctttaccacattgaagttcccgcaaatcctgccgtaaggagacctattcggggctgagagccagcccgtcctgcccccaggctcttctgtccttggctgcctggaaactctcctaatgtcctgcacagctggcatccatcttggaaagagccagccaggtgtggcctccaggggcttgttagagtctcaggccccacccagggctcctgcgtgggagcccacattttaataagatctccccgcattttaaccggatcccccccattttaaccaggtcgccccacattttaaccaggtctcccaacatttgaactagatacccgccgcattttaaccagatcccgtgatgaggtgtgggtcccggttcgggaagtaccagtgtggagcaggtgttggcaggcacgttccacgagggccagacaggagctggtcccagcgtttcgggcccggtgtctttcgtagccactaaccctgccgggtgaggaagcagcactgccctgctgccctctgagcacacagggccgggtcccatgagctgcgtagacactgaaatttgagtttcatcttcacttctcatgagatcatcctttttgaaatctttcctcaactgtttgaaagtgtaaaaaccactcttaggctacacagaggtaggcagtgagctggatctggtcggagggctctttgctgatccctgacctgtagcaaggtttggctgtgttcagtgtgttcaggggtacgtgcaaggttcactctcttgtgtcctccttaggggstgggctggggagggcggcagctgccagagaaggccttcagcccctgcagagccacagtgtggggcatcgtggggcccctgcactgggcttcaactcagagcagacgctgggggagggcgaggcgggagtgggctctggattcatcgtgtccgcccccacctcccagccagggcctgcctggggagggtcagtgctgcatgatggcgtgttctcctcacccccagaaaccgtccatgtttgatgtgagccgggagctgggctccagcgttgcactgtacagccgcaaagtcctcatccagaccaaggccacggacatcctgcccaagtggctgcgcttcatccgaggtacgctgctcagagtccgtgagcagtgcccccgtggcccagtgtcgcccgctgcatctgtgagggaccgtgctgattccattctcagcagccctctgcagcgagagcaccgccgtcggcctgcgctgcctgtgtgtcagtcgcgtttacagaccccgggagctgccccacctccctacgcacatgactgatctggggggagcactggggtgttcasattgaggtctttccatatgtagggatactgagtttcagattgatatgtgagttgtgttacgtttgagtgagattatagtttaagaaagacttcagtatttaagccttggtacacagaggtgcgaaccatccctgatagagttttgtttgtttgttttttgagacgagtcttgctctgtcacccaggctggagtgcggtggtgcaatcgtggctcactgcaacctccttaagtgattctcctgccttagcctcccgagtagctgggattacaggcgcccgccaccacacccggctaatttttgtatttttagtagagatggggtttcaccataattgccgggctggtctcgaactcctgacctcatgatccgcccacctcggcctcccaaagcgctgggattacaggcgtcagacactgtgcccagccagagttgtgatttttaacataaagcccaggctgtcattttccgagtgttaccccgaggctgtcccggccacccacagcccaggtcactgttctgggaggtggcaggacgtagaggaagctccggcagtgccgcctccctgcttccctcttagcacrcgtgctgggttgaaggccaggcctgaagacaaagggcaggttaatggggaatgttgggtggtgtggagggccgcagccccgggagaagctgactgccgtgtctcccaggtgtggtggacagtgaggasattcccctgaacctcagccgggagctgctgcaggagagcgcactcatcaggtgagcctcgggccgcggggagaggaccctgctggggacaaggcccctacytgctcctttgcccccagagggccctagccgtggcccatggagctgagagcagaggtggtcggggaagcccggcctgcacatgggggccctcaggagcctkccaggtgctggcctggcctctgaagcttgtggtccagaagaaggtgggggtggctggtcatggctgaggctggagtctggatagggggaggggccgcagagccagacctgcccacctgtgccccagggttgtgactgcagccctgcagcaggccagccctgtgtggaggggactccagtgtgctggctccaggttctccatcagtagctatcacttccccactctggccccaggctcaccaaatagtctttattcaaaacctcgcttactggctttttttcccctaatgcaagtagtatttccttactagagcacattcaagtgacctgtgctctcacctagagatgactgctgttgatggtttagggtggggtagattggcagccacatagggcaggtttcagagggagcctgtggggtgaggattcagctggaatttggagccctggaggtctctcaagagcccaccacgtgcagcatgccatggaacgggccttgttggagcccccaacgtgcctgcagtgtttctctgcccaccggtttctctccagtgttgaaatggaagcagatcctcggaaaaaggatgagtctgggtaattggtgtgtgttggggctgcgctgtgggcatggcgagaggcccacaccgagaggcactggtcctcagagattctgtcctgtgccgcgggcaggagcaggtctggggagatggtgggcagtgtggtttcctgcctggtgggtccatgcccagccctgcgaggtcacatggcctgccggtgatatcctcctgcctcaccttcagaggcagaaagccatggagatttttttcttttttcaaccaagcaagccgcagtgatgttttattggttgactgatagggtctttcttgttgtccaggttggaatgcagtggtgtgatcacagctcactgcagcctcaacctcttgggctcaagcaatccttccacctcagcctcccaagtagctgggactacaagtgtgagctaccatgcctggctaatttttttgtatttttttgtagagttgggatctcactatgttgcccaggctgatcttgaactcctgggctcaagcgatcctttggcctcagcctcccaaagtgctgggattccaggcatgagccactgcacctggccacttagatttttttttttttttttttttttttttttgagacggagtcttgctctgtcgcccaggctggagtgcagtggcgcagtctcggctcactgcaaccttcgcctcctaggttcacgccattctcctgtctcagcctcccgtctcagctgggactacaggtgcctgccaccatgcccggctgattttttatatctttagtagagacagggtttcaccgtgttagccaggatggtctcgatctcctgacttcgtgatccgcctgccttggcctcccaaagtgctgggattacgggtttgagccactgcgcccggcctgtttttgtttttcatgcaattgaattcatattgcttatactgtttccttttttctacctagtttatttgcaccacttcccatgttgttttttggaagcacttttaattgctacatcatgggacatcacagggatgtaccatagtttactgatcccgtccctcggggctgcacagctgggctgtctcagtgtttctgcagttatgacactgcagtgcatgtttatctttgttctgaaatcttttttttttttttttttttttttttttgagacggagtcttggtctgttgcccaggctggagtgcagtggcacgatctcggctcactgcaagctccgcctcccgggttcatgccattctcctgtctcagcctcccgagtagctgggatacaggcacccaccaccacgcccagctaattttttgtatatttagtagagacagggtttcactgtgttagccgggatggtcttgatctcctgaccttgtgatctgcctgcctcggcctcccaaagttctgggattacaggtgtgagccaccgcgcctggcctgttctgaaatctttacctgcagctgtatttccttaggatagaatactaggggtggggttacttggtcggaagatataactatataaaaggtattttccttgctgactaaagagatgttatataatcaatgaaaagggggcctcagtgcttgtttccccacacagccgtgctggcttctgacagcaggaccccgacttgctgccgacatraccacagggcagcagttgtgctgacctcaacaggatgcatccccgccccacagcagcgactgttctgtggtcgttagagtcgtgctctttggtgtactgaccctgtgcacttcgagtgcgcctgtgggttactggtgatctgcccaatgtttcagttcacttcagtgaagagagggcttggggctgactcccggattattattgctggtgctggagttgtccccaccttgtccatccccatcaccctgcccaggagtggccacaggaggggaggttccaggtacaatgtccctgggctggataaggcaaaggacacccactgaactgaggacacgtctggcctcatctgggaagctcacggatgaagtggaggcaggggccaggccctgtggagagggagctcctggcgtccctgcgggccgaggcggctgcgttcctctccccatcctgaatgtgtttcctgagtatttcttctccactgagaactgtgctgagyctgcataaacacgtgtttcatcctgtgaggggagccgtgagtcctcactcatagttgtggaaactgagtcacagaggggtggtcctgctcagtaagggagctgcattcctggctgtggcrggcatgctggcccactggtagtgcycraagctgcagagcaggggtcctcatcccagcttgtggttgtcaaaggttgcgttgtcagtctgagaactcatctcgatcagaaaagagtcagccgaaattagagcttttgaaagaatcacaggcttaaaagttggaagcatggtaccaagaacatgtttttcctcgaatcctgtgagaggaagttgccttctcgatgcctttggggtgcrtttccaacaaacaaggatgtccttccctttgtaattaacagatgttayaggtattttgaagctatgtaaatgtcacattcttcatgaaactctcaatacattcatttatttacttaaaatatttatgtgttggccgggcgcggtggctcacgcctgtaatcccagcactttgggaggccgaggcaggcagatcacctgaggtcaggagttcgagaccagcctagccaacatggtaaaaccccgtctctacttaaaaaatagaaaaattaggctgggcgcaatggctcactcctgtaatcccagcactttgggaggccgaggcgggtggatcacgaggtcaggagttaccagcctgccaagatggtgaaaccccatctctactaaaaacacaaaattttagccagtcgtggtggcaggcaggtgtaatcccagccactcgggaggctgaggcagagaattgcttgaacctgggaggtggagattgcagtgcgccaaaatcacgccactgcactccagcctgggcgacagagcgagactcatctcaaaaaaaaaaaaaaaaaaaaaatcagccgggtatggtggcaggtgcctgtaatcccagctacttgggaggctgaggcaggagaattgcttgaacccgggaggcagaggttgcagtgagccgagatcacgccactgcactccagcctgggggacaagagcaagattcgtcggatggaaaaaaaaaaaaaaattgatgtgttatatttatactatttataatttatttatatgggctgatttcctgttttattcaagagtttataatcttgctatcattaataaaatttttttatttttatttatttatttatttatttatttttgagatggagtcttactctgttgctcaggctggagtgcagtggcgaggtattggctcaccgaaacctctgcctcccggattcaagcgattctcctgcctcagcctttcaagtagctgggactacagtcacccaccaccatgccctggtaattttttgtatttttagtagagacgggggcttaccatgttgaccaggctggtctcaaactcctgacctctggtgatccgcccgcctcagcctcccaaagtggtgcgattacaggcaggagccaccatgccccgttgattattcttagcacggttacccatttgaccaatccccctccatgtaaccaatctaccattgccactgccctcttctgcgggtgtccctgtcacctacttgggctctgactcttcacggtgggctggtcacgcccccagcctggacacccttctctggggttcttgggctctgacacccataccaggctcttcccaaccatggccctgcatagacaccttccctgggctctgcaccgcatcctgggctactgtccccccgctcccaggcacgaaggcatgtcctgtcccattctgccctgtggctgaaggactgagtcactggggatggagtgtgggaggaaaggctctaaatgaactcgagagagtgttgttcccatgctctggattattgaaatacattgtaatttacctgcttaaaggaaagactaaatattaagaagaaaataaaaatatccctagtcccagtgataaagttgttcctaattttaggccattatgtaatgctgcagtaaatatcctgatccctaaaatcccaattttgaaaaattagagtatacatatattcagtataaatcccaaattacagtgtacatatatagtatatacagtgctgctcctaatgatggaaaattgttatgtacatgtagaatgtgcattctttgcctgtatctatagacgtactgtaatttacccacattgggatttttctgggttttctttcaacacagctaactttctcatgtcattgaggattattaaaagatgcagttttttttttttatggccatttagcattacataattttagcctatattcttgaacatgaggttgttcataattgttatattttatgtgccacagtgaaaatcctggtacataaatcttggtgtgctcacatgtttcctaaggtgcagttcctataattggaacaactggctcaaaggttggaagggttttccgggcgtgggtatcttgtctctgggggcatcggttctcctactgcctccagggggtgtctgccctccaccctgctgcctcctgtccggccactgcccagggtttctgtctttctgctcagtctttttcagtttggccaataacggtaccttgttgttttcacttctttgattcttagcggggctgaacattttttcgtaccstctggccatttgtatttcatagaggctgcttgtatgtattaaatgcatttcttttctgtaggaaactccgggacgttttacagcagaggctgatcaaattcttcattgaccagagtaaaaaagatgctgagaagtatgcaaagttttttgaagattacggcctgttcatgcgggagggcattgtgaccgccaccgagcaggaggtcaaggtataggagctgtgttccaggcctttttctgggccaccttgtccctggggctgctgaggaagctggtggaggtgtcccctgatgtggcgacggtgcagctgggtaccctggctgctgctgctgctgccaccagggtcaggaaatggaaggccaggcttctgggcctctggcaccttccaggcacatccttaccctcccaccagtgctgtgctgtgctctgaagggctcagcctcactgctgtgtgaaggtgcagcccagggagtggcaggaagagggcgtgcacacactgtctcccctcagaggatgttgggggctggggagccacagacaggtgggacaagccaaggactccratcccgtgggtggggaagtgggtggtctcagtgtctgttgagggactattcatcatgtactggatatcagtctccaaatactatgctacaggggccagtcgttcagttaatccaatagtggatggctgaaaaacgaaacatttgttccataaacattttttgtccattttttattgagatacaacttacatagcatcagattcacagaattcaccttttaacacgtaaaattcagtggcatttagtgcattcacagtgtggtgtggctgcctccactgtaaccccagaacatttcatcccaggagcccatcccgtgctggtgtcccttctccccagcagcaggaggagggtgaccacgtgtgtggggtcccaaggaggccgtgttctggttgtttgccgacttcggcagcttctgacacaggcctcttcattctcctttatcttcatttgagttaacagcacacaggtaagagtcagagacatttctaggtctttgtaggtgtgcacgtgtgacatgtcttatcaatgcagacccaccatgtgtgcaggggtggcctgggccctgctggttgggtgtccagctccttgcttttccctctttctgttttcccmctgcgtccttccagctgcagctcccatgagctctagaggtcacagctgcgttcagctgatggggaggagggcaaacccctcccctaagggcccttctccaaatcccactgaaacccactgggcaaagccagtctctgccatagccagctgtgaggagggcsgggaaccgtggacttcacccgtgtccgtgtgcccaccagagactgactctgtcactgagggcagagggaagacgctgggtccaggccgggctctgctgttgggtggggtcccctcccagggcgtggtgcgcgtagctccctggagagcccctgggccacctggggcaggaggtgcttcctaagcccccagagctcccaaaaggggcctgatgggcagagcaaggcctgctctcrgacaacccccgagtccactaccgtccctcgggtcagggccagcctggagtgccaggaggccatgggcatcggagggtttgcgcccagttagttgggcaacattgagcccatgggcctggaataagtggtgacctgccccgtcccttctaggaggacatagcaaagctgctgcgctacgagtcctcggcgctgccctccgggcagctaaccagcctctcagaatacgccagccgcatgcgggccggcacccgcaacatctactacctgtgcgcccccaaccgtcacctggcagagcactcaccctactatgaggccatgaagaagaaagacacagaggtgggtgagcggtgggtggggcgggctccgggggctgcaacctggggagggtcttgaccttctcagctctgtgctgggtgaacctgcccaagactccgggcagggctgcacagtgggtcagggtcacgggcacagaggccggaccgactgtgacggctgtttcccacttggaggtcacatgtggttttttttgtttgttttttgtttttttgagatggagtcttgctctctcgcccaggctagagtgcagtggtgcgatctcggctcactgcaacttccgcctcctgggttcaggtcattctcctgcctcagcctcctgagtagctgggactacaggtgcacaccaccacacccagcaaatttttgtatttttaatagagacggcatttcaccatgttggtctcgaactcctgacctcatgatctgcctgctttggcctcccaaagtgctgggattacaggcgtgagccactgcactcagccacatgtggatttctttatgcgtggagtgcttctgccttgaaggcagtcagagccttccttagacccaggtgtcgyagtaactgtcatgcaggcctaggaaccccaactgccccggtgttccccagtgtggcccgcttggctcccccagccctcctgccgccctcatcctttcttctgtggtggctggaggcccccggggtctgatggagctgctcttggccacctgcaggttctcttctgctttgagcagtttgatgagctcaccctgctgcaccttcgtgagtttgacaagaagaagctgatctctgtggagacggacatagtcgtggatcactacaaggaggagaagtttgaggacaggtccccaggtcggcatcccctgctctctaggcgtggggctggtttccactccccgcacgcctctcctgccccgcagcgagggcttcctttgggttttcgtcagttgacctgggctcagccacccccgagaagagccttgtgggagcaccctggtgactggaggaaggtgcctcctggtttagatatcaggggtctgtccagtgctcctgccacggtggcttctggagctggcccagcttcttgagaggctgtgtatttttttaaagccctaaccaagttgtatgggcctcaggcaacctgaagcatcctttgaggttttacttttagatgaaaagcatcttgctagcttgtgtctccatcctggtgggagaggaggtgggagctggaagcatgctgcgtggcccccatggaagccggggagttgggatgcaggcctgagctccctgtcgcctgctcttccgcagccgccgagtgcctatcagagaaggagacggaggagctcatggcctggatgagaaatgtgctggggtcgcgtgtcaccaacgtgaaggtgaggctttcccggggatggaccaccacytggccgcagtgtccctaacaggctggccagctggtggctcccagtacctggcccgttgggtgtccttccagcagcagcagaagcccttggtgtcaggtggagaccctgtgggtccctgctcggcacgtgttgctcgggagtgccgctgaggcaggaaggccgtgtctttctcccagccctgctccagagcaggtgtgaactgagaactgaaaaaccagcatcctgagtgggagctgcaatggctgaggacgtgggggttccaaacaagggacatgctaccccagccctcaggagctcacatgctcacttgggtgcttagtcgggggttttgggtgggcttcagagagctaagactccccccaccaacctgtctagctcagagtgagaaatgagcgtcccatgcatggtcacttggaggaaggggcctcatgcagggtgggctggcatggagcagaggacgatggattcgggcagctcctggaggcagcagcggggcaccagggtggtggagcccctcgggcacagtatctttgcgtggggcatcagctcagggcccacaagttagtgggtaatggggagggagcagcgctggtccaggggagtccttgagaccccgcctgctacctcgtggtctgggtgaccttcacccctggtaagatcctgccagccctctcacattgggaacctctatcaccctcaaccccgggctttgctcacaggtgaccctccgactggacacccaccctgccatggtcaccgtgctggagatgggggctgcccgccacttcctgcgcatgcagcagctggccaagacccaggaggagcgcgcacagctcctgcagcccacgctggagatcaaccccaggtgaggccacgctcctggctcttccagcctgtgggattccccagaatcctgtgtgtggtgttcttttgttgtggaatgtgacacagaagaaaagtgcgtgaggcctgtggacatgtgggtaactataaggagctgtatgcagtttaggctgcacccatgtgaaatggaacctggccagccccttaccatccccaggtgtcacctgggaggttagccacatcccagcctgtgaccatgtcctcgttttgctttatggctttgccacctgtgcgtgtcctggacatgctcagttttgcctgttttgagctttgtacgtggatcttggtgtttgytgaagtctcacgttgctcacttggcatgagggttgcccatgcagaggggctgccacaagttcattttcatagccgaataatgtccgctgcagaaacccacctcggcacagcagactgctccgttctgctctgctgggcctccggtggttcttggtcagaagttgtggagagccaggctgctctgagtattcttgtccacgtgtctggggcttgtgtgggtttctctgtggccccggtggtgggagctgcttccagggtgcaccgagaaccccccagccctgacagtggctgagccgtaagatttccctcgtttcttcctgttgttctttatatgccctttatctgttgtaaatgtcttttcacctgcctttaggtatcttttgagtttctttctttttacagtatcacttctttgcacccatgaatgtgatctatttaggtctttaacatcctttggtaccttacattctctgtagggttctggtaccatttttaaagaattattctttgatgtgtcttatggggtattttaaaatttcattttctaacttgtatatgaactaacttgtatatgaagtttcttttttgggggaaattttgaatgtagcaattttttaaaaaatgaagttacataaacawgttaccaaaaatagaaaacagcaaaaaggaaatcaaaatccatagacttaccaccccccccacaatgtagcctaagtagtattttaatttttgagacagggtctcactctgtcccccaggttggagtgcagtggggcaatctcagctcactgcaacttctacctcctggcctcaaacaatccacctgccttagcctcccgaagtgctgggattacaagtgtgggctaccacccccagccagtttttgttttgttctttagtacatgtctagtttttttcttttgtcattttacaaccataacttttaaaattatactggaggcgagggagatgcatcttcctagccatggcactcctggggaaaggctgacttggcttatggctgtcagtgcacagcagcgccagtatgcagaatgcctgtgcctctgctggagcagctcagtgaggcggacaccaggtcactttaactagttttggtgscaaactagttttgkgagatagctgcagaagtgctcgtttctgtctgttgccacttcacttttggagacagggtcttgctctgtcacctaggctggagtgtaccagtggcgccatcagagctcactgcagccttggcctcccaaagtggtgggattacaggcgagagccactgtgcccagccagcttcactttcatttgttttaaaatttggtgttctgtccacatagttcagaattcaaaactgcttacaggggaaaatttcctcctacctgtgtccccagtgcagccagcattagggcttttgtatttctgcagagattatgtgcatttgtgggcagctgcgcccgtgggcttccaagggggaacttgctgtgcagtgggtccttgccttgcttttctcccttagggtaactaggtgacctccacattagcatattaaraatgtcctttttttccagctacgtagactagaaatgtgaggatgtgcatttgaagtgtttcctctgttaggttgggtgcggtgcctcacgcctgtaatcccaacattttgggaggcctaggcgggtggatcacttgaggtcaggagttcgagacctcatctctactaaaaatacaaaaactagctgggggtggtggtgggtgcctgtaatcccagttacttgggaggctgaggcaagagaacctcyygaaaccaggaggctgcggtgagccaagatcatgccatttcactctagcttgggtgaaggagtgagagtctatctatctatctatctatctatctatctaaaaaaaaaagtgtttaaagggatgcagttaggaaatggaatggctgagtctcagcatatcatccacatgtggttttcccgactccagttgtcctctggagaggttgtacaaatttacagttccccagagccctcggttttatcagacttctaagtgaaaaattataatattcatgttaaggttaaatactacatgatgctttttcctatgcagaaaaaaatattgttctgacgtcaaatatgtcaatcattctttactttttggtttgtggttttgcttggaaaggctttccccttctgagatgatgaaacatttcttccctagaattgtgcttgtcatctttgatccctctggaatttactctggtctaaatggttttctgcatggctcccagtcatcccagtgctgctggatggagtgatctrtctcctccctcttctgtgaaatactgtcctcatcagacactcagtgtccaccctcgttacatggagttgtttgccttccccctttccagacctaaactgttttatttactagagccctataatatgtttcaacatgtgggtcttactcccttctcttttattatttatctaggaaccaaggcatgtcttcacgtactaagctccttttgtccctttagtgtatattaatcttggagtttggctaccttacagcattttctaatactgacactcctgattctcttgggttttctgggtatataatgatattatctataaatgatcattaacataccttatttaaaaaactacagacagtcttactgtgcttctttaaatatcctgataatcccaaaacatgaagggagggtcacagcacgtggtactgagctgctttttctggtgggttctgtgttgcaggcacgcgctcatcaagaagctgaatcagctgcgcgcaagcgagcctggcctggctcagctgctggtggatcaggtgagtgcagcagcttaggatgactgcagggacccaggctaccagccctgccagcctgccttcagggtggaacagcggtttcctctaaaatcctgtctttttgtttgtttgtttgttttttgagatggagtgttgctctgttgccaggctggagtgcagtggcgcgatcttggctcactacaacctctgcctcccgggttcaagcaattcccctgcctcagcctcccgagtagctgggactacaggcatgcgcctggctaattttgtattttagtagagatggggttttcaccatcttggccaggatggtctcaatctcctgacctcgtgagccaccgtgcccagccaaattctgttttaaaaacggaaaaatggccaggcgtggtggctcacgcctgtaatcccagcactttgggaggcggggggatcacctgaggttgcagtgagccgagatcgtgcctctgcactccagcctcggcaacagtgagactctgtctcaaaaaaaaaaaaatgaaaaggtgccccatgcccctcataatgggtttctcctcttgcctttcagatatacgagaacgccatgattgctgctggacttgttgaygaccctagggccatggtgggccrcttgaatgagctgcttgtcaaggccctggagcgacactgacagccagggggccagaaggactgacaccacagatgacagccccacctccttgagctttatttacctaaatttaaaggtatttcttaacccgagtgtgtgttgggctttttttctgggtcctgtggcaggatgggtcctctcttcctgcagttcaactgstgtggggaggggctgctcacttcagcatcacctccactggatagtggtcactgatggcttgggcctgcaggcaagtgggcacagggtctgggctgagcctacctgagctcctgtgtcccatcctcatgtggctgtgcaagggaggacacataccagttggtcactcaggccataggcagcctggaagttaaagggaagagccgagtcgggaacaacggcgcctyggagcagcatccctgcaaccacgatcctgatgggtgttgggaagagaaagtaggttcccctttcacacatgggcctggctcagcacccgcaggaactaaactaagagccctgggacctgccagtgcaggtctgtgggtgcccaaaactgcacaccctggtctgtgcccctcaatgtggaaaccacatgacagcctaggtgtctgcctctcctcttatccccagatgtgcttttccgaaaaaacctaaaaatcgtggctcttgttattctgttccctgtagtggatcaactgaagctcagttgggtgagtgttcaaaggctttgaggcttctgaagccvgacctatgagtcacggctgcccttggaggtgccctcagtctgccctaagcgcgaggccctgctcacctgtcataggcacagtgcgtgggtgtagctgtggtgtcagcgctgtcggrgatcagccactggaaggtggggcttgtccayaggcggatggatgaccactgggagggtctcacatagctgcagccygcattgaagtcgcccatcaacatgacgtcctaccaggaaacgctgcctgtggccctgggacatgcggaggccgctggtgcccactgcccctgggagggcctcacctccaagccccatttctcttggacatccaggtagacgtcatagagagcgtcgatctcggctactgcgtcccccggggccgcatgcagggsaacaatggcaaactccctgacctctgtggagacagccacgtcgtgtgaggcacactccctgggggcaggttcagtcaccatgtcagctggaactatgtatcatgacagtccccccggggggtggatattttccaaatgacttgaatggaaaacccaagccccagggactgggagggcagtgtgtgacacaggcattccaggttccctaggagggggtggaggccataagcgccaagccgagccccaccctggcccaggcagcacccacctgtgaaccgggagaagaacctgacaatggctggctctcggttgaaggtgtcgttcccgcagggctcgcagccatcatcgtagtagkagctgtccaccgcagacacctggtcaggcctgcgggaaggccgggcaggaggaggtgaccccaggctggaagctgccccactcctgcttcccaggaggcaggcgtcscgtcccaggcgacaggaggrcgggggagccaggcacctgctcaacccattggtscgggacccaggcgacaggagggcgggggagccaggcacctgctcaacccattggtccgggacccaggcgacaggagggcgggggagccaggcacctgctcaacccattggtccrggaccttggggtgttttcactccaccctggaccctgctctgaagcctcaggttcttgccataggacaaactaataggacaaactacttccctgctctgytggggccctcccaggtgagggaggggcttcctggctttctagaccacccaccygtacacgaacaggtagcgctccttatagctgttccgtcccagtggctcactgaccacgtagtgataggtgtctggtgcatccctggattgaagaaacaaaaggtcccagtggcgggggccataggggacccctctggctgccgatagcgaggctgtgcccaggtccccacccttggggcccaagtgaagtgaggctgtgccgtggacgagatgtcaccttcctatgaccctgccactgtcacccactgattgaggttgtccagcagcttccccacggcagtcaggtggctgtctctgacctcctggaccagggcgatgtcatagcggctcaggatctgggggcagggccacagtggtgctgagcagggctggtgccacccagggaccctacagcgccacaaagggagccacagctgatgctcgtggcattgctcggtttaaccgcagcctcatgtttctgcctgggctcctgctgccagccagggacagcacagcagggatgaggaccttggtccacagccaagagcctgttccaccrtgctgggagcagtggtgctcagtaccccacacccgacaccctgtggctccatagggctggccctgcccaccagccctagactccagagctcctctgcttttggggggaggctgccctggcctcacctgcacaatgtagctgacgagggtggcattggacatcttggtstccccaaatgtctggatgttgaaggctgcgatcttcagggacacggccccctgcagtagggccgccagtgccagcagcgcccccagcagctwcatgyccctcatcctgggagagcacagggcacagagacataacagaagtgagacgtcatccctgccacagcactccagccttctggagcccagctggcaggggctggtggagctcraggtcagggggacgcaggcgggggaaaccctttcctacaacgtccagaaagccaaacagctggcaccacgtagaggaccccgagtcactcctccatccaccagaaaacccgcccgggagggacgctggagcctccgcctcactcgctgctggaggatgagactctaagcctccctccctgctccaaaccggccagtcacccagaggcactccacctggtgctcacctgagatgatggtgatgtcctcagagatgaygagaatgctgtcaagaatctggaatatcctttgatgacaattttctccttttgctgcttaaagaaaaaaaagtagtctatgaagaaaggtctctgaagaagcacttcaaggccctggcagtgctgctgggctccggatcctgcacaggcagtgcgtgtctgggagttttaaaagttcaggcagctgtgaccttccctggggcaaatgtgagccgtcacctgagagtgcagaaaacaatggctctgtgtggctttccgcataggtgggttgctagcacgtgtttctttctgtaagcacaggtttcttgctgctgtaaaaactgcacctgataatcacgtttgcacttagttttaaaatgtctgataacaaggccaaaggttcctatcccgtgtcccttgcacgtgtggtggcccccatcttccaggatagggcagggatgggccaggtatgtgcgggagggtggggctgggctccagtctccctgtctcttgtctgggggccccaaggtcactttggacaaagaggccaaagccacatccaaagttgcaaatggagccccctggtggctgacagccatgactgctctgtggcccaggacacgcctgccttcctgattcatcgccatcaggtgcaggcaactctgcaggaggctggggagctcggaacaagcagtggtgggggcctgcagcaccagcgccgtggggccaggacaggtggggcctgcaaagcccaccccaattgccagccaagcagtggggagccttcttgaggtagacaataggctgtgtgtttaggcccaggggatcccgagtgaccaggtcacaagggcagggcagcagctaaaggccaggcctcaggtccagtaatttcttggttcttttgttttgggtttttattgtttttgagacagggtctcacactgtgttgccaaggctggagtgcagtggcacaatcatggctcattatagcctcaaccgccagggctcagataatcctccctcctcagcctcctgagtagctaagactatgggtacggcaccatgcctggctaatttttaaatttttttggtagagatggggtcttgctcttttgtccagactggtcttgaactcctggcttcaggcaatcctccggcgtagccaggaccacaggtgcatgctaccatgctcagtttttttttttttttttttttttttttttttttgaggcggaatcttgctctgctgccyagcctggagtgcagtaatactatctcggctcactgcaacctctgcttcctgggttcaagcaattcttctgcctcagcctcccgagtagctgggattacaggcacgcaccaccacacccggctaatttttgtatttttagtagagacagggtttcaccatgttggtcacactggtctcaaactcgtgaccttgtgatccgcctgcctcggcctcccaaagtgctgggattacaggcgtgagccatcgcacccagcctattttttaagtttctcacagacacaaggtctccaagtcctgagcccaagcaatcttcccgcaaatgctgggattacargtgtgagccaccgcaccccgccactcatttcttggaatctttgactttccattcgtattcatttcctgagactggtgaaactaccacaagtttggttgcttaaaataacagaaatggatcctctcaaaattccggagactggacgtctgaagtcagggagtcagtaggaccttgcgcctcctggaggctccgggcggttgggggatgctccttgccctccagtttctgcaggctgccagcaatccttggctttccttagttgtggctgcatcaccccagtctctgcctcttcttcttaagatctgtgcacctgcatttggggtcctcccagagagcagggaggatgtccttatctcaacagcctttactcacatctgcaagtccttttttgctacaaaaatcaacattcagaggttccagggctagggcacagctatcttttgagccacccctgggtcttgcccacttggaaggggctgtgctggccctccaaggacagccctgcacgtagcatctgtggtccccctgggggaggagggcctggaaggcttggcagaagtccaggcgggattcaggtatgagaactgcaggaaatgaatacaaatggggtctgcaggaggcctcaacggcaagagtcagcaggggccaaggtcgaaagtcaggaaagtgctcggtctggccagctggccatgaagcagaaggcaggcccagtggggactagaaacaggaaggtaaaccaccctccacaagactggcaccccattccataaagacacgccaacagacgcctctggctggcagcactggtgcactcatctgtccctcctattgagacggcgtctaccagatggaaacaccaccactcctcaggctgccagaggccccattgcaggcttttccaaaggtttcagcaatggttcttccctgtttttaatctctaagtctaggacagcctccagcacgtcaaaacccagcccccaagcaaggccaccggagtattcggtgtagggactagtcctctgcctttggtgtttgcctttcctggacacacatctgacagcgacccatcacggggaagggagtaaagctagagggcggccactgtcctccaccaagaaactgcctggtgcagcttccggcggggcacagggacaccaattatagctcacagagcaagtgcccaaccccctacgtgtgctcagcacgtgggacragggttcccctctggtctgtcatcccctcctggctcttgaccaaatgctgccccatctgctttcaggaactcccaggcatagtgcccctgcttcctctacctgccagaaggaaggctggaacttgggcctcgcttgtacaaatggcgagtgctgcctgctgtgtggctgccctcaggacgggctttggtgagggcagcacagccctggaggagcctggtctgacatggggccygtctgggatcactgttgggccttcaaccgtctggagcctctatgtcttcctctgatagattcccagaacaatcatttcaccttctaagaagccatcctgcccctgcagcctgtggcttgtggagtctccagcactctcacttctccctcgtggatctcttttctgtctgtgtcagtcaatgctgccatgtaacagccacctgcaaactcagtgtatacacatgcatttctctcacactgccaggtctgctggggtggctctgctgcctgggcctcgtcctggggctgggctggagagactgcagctccctgggcaccctcttcccacagtgtggaaggtggaggctcccagggcacaagcagaacacgtgccgccctaaggccaaggcggagctggctgctgtcgcttctgcccacattccatgggtgctgtcgagctgtaggtccaagccccacatcaggggagtgagtggggtacaatcctcccatgctgggccccactctggagataggcctggggaatgcccaagaaggaagcccagcccttctgggattttcacatccacagagaatgggtgctggcagccaacggcaacgaggagaaaagctgaccgccttctcagatcaggatgaggtgtttttacaccaaccccgaggatctgcagccttctcaggttaaattaaacctgtcacagacacaggaagggaaaagagcacataacaacaattatattgacatctaagccaggtcacatgctctgatttggctgaaattacaggataaaggaaaaatcctataggcaccatggctggaaacaaatggcctcaaaggaacgctggtggccgtggctttgtgcaacgacagccagtgttgtgtgacccagcgacgtgcaggccagggagggtacccttctactgatcaagagggaaagcgggaaggacgcacagctgtggtttccaacctgcacggaggcacccccatgaactcacagagcaccatcagatccttctgaattttgaaggaagcaatgatactctgctctgctcaaggccattcatggtctcaacattaacgttaccttgctttatagggtatcttccctctctctgccaggctgggttgtggcagtcactgaacaagcaattactgtgaaggtcgacgtggaaaaatgaggcaatgagggtggcggtgttctaccagattccaagttgaagaggtgctcgacaggcacacacatcccatgactaaacaaataacatgaacatttctctttatgtattacttttctagacatccactataagttgccaggacacaaatgcttattattggggtttacttatttaataaatggaactgtgggggatttctttttcttttctttttttttttttttttgaatgaccatataatctggacttactaactttaggtaacagtaagttaaaagatagaataaggtttcatattacaggaattcaaaaattgaccatataataaatgatgaagaaaactaacaataaacaggacaatgttcaaatagctcattggggccaaaagatcagcgtatatcctgcatcatctttcatgcaatgtctcagctttttttccctcaaacataaaggcagattaatacaaattagccttatttagaatattcatttacgtttccttctgaaattgatacttgagtggaagatgtattaataactcgtggtttctactgaaatttaagattccaccagatgatgctcagatttagacgatgctagagtaagacactactgggtgatgatttcaaagtatgagctgcaggtaaaatctaaaaggacatacataataacaaatgttttctaatttaaaagacatatagtaaatatccatgaattaactcacacaacctacttacaaacaaaactagaataaacaaaacttgtaggaaccaactccagttgatttcgccacttagcgggagcaagttctcaggcgggtcattttatttaaggatgacttgaaattttacaagaccaccttagctcccacatacgaaaactctttaagaattttttttttatcaactagaagttggggaaaacacaccgagaaataaaatgatacagctcctcacacatttgaaggcccatgtcatgcctaaatttctaccgatttaacttaagaagctcctcgccctgagagattcctttatcccacaacacttgactcagatggggcagagggtcccaggacactacccaggccacaagataaaaacacaacctgtctcctccggcaccactatcagggatttcttttggcttactattaaaataattattgaaccttaatcaagagtgctctcaactgagaaagtgtgaagcttctgatctgacataatgcatatgcctgagttagatttcctactttactgaatataacttcttttctatccttcatcattcaccactgcttcaacgttctgtcacaaagaaattctcagttctacaaattgctactgaaaagaataattgcaacagattaaacatatcactgtgtttcaatacataagttcatgttgacataaaataattatcagccaccttagggggatgctaggaactcaacttgttcttctgcaaaaaggcaaataaagtcaaaggatcaaggcggtattctgcctttcctatgcaaaaaggactgcccagtaacccatagctcgagaaggctctctttagataggtggactccagctaatacacgaggaaggaatgctagacctgaaagtcaccattttgccgtccctaatctcagccctgatgtagtggctgctaacatcacaaaagacagcctctgtcccttctaatccaagaccacacacagcagcacttaggagagttcttgccaaaacaatcttgaatctgatcaaacctctagatctaaatgacaacttaaagcaaatacaaggacagaggctcacgttcaacagcaccatggggacacggtacgacccagactgggaaatcgtagatggcaaaggacaggctcatcaatagatttcaaaatgaaaagaagaagagaggcagaactcataggttaaaaaaagttcacattttgagatggatgttaaatgataataaaacttgagatatatccataaacaaaatgtatggaccttagatcctataaaacatccaatcttttattcatgcaaacagacatttgtgtaacaaattatgtaagaggcaatcagggaaagcagaacactgacccataactgggaagtattaatagtaaactcttaagtttgtaatggctcttattggtccttatgttttgtttttaaagaaattattttaggaacagggtctcactacgttgtctaggctggagtgcagtggcttttctttctaggctggagtgcagtggcgcgatcttggctctgcactgcagcctgcctctggggttcacgcgagcttcgcctctggggttcacaccattctctgcaagcttcacctctggggttcatgccattctcctgcctcagcctcctgagtagctgggactacaggcgcccgccaccacgcccagctaattttttgtatttttagtagagacgggatttcaccatgttagccaggatggtctcgatctcctgaccttgtgttccgcccatctcagcctcccaaagtgctgggattacaggcgtgagccaccgcatccggccactgcagtggcttttcacaggcacaattgtagtgcactgcagcctgagctgaagggatcctcctgcctcagcctcctgccatgtgccatcacacctggttttgttttcttttgagacaggttcttgctctgttgcccatgctggaggacagtggtgccatcatggctcactgcaacctccggcctcccaagtttgagcaattctcctccctcagcctccctagtagatgggattacggatgtgcgccaccatgcctggctaagttttgtattttcagtaaagacggggttttgccatgttggccaggctggtcccaaactcctggcctcaagtgatccgcccgcctcagccttccaaagtgctaggattacaggtgtgagccactgcacccagccacacctggctaatttaaaaaaaaaaattgttcttttttggtagagatggggtggggatctcactgtgctgcccaggctgctttccaactcctgggttcaagtgattctcctgccttggcttcccaaagtgctgggattacaggtgtgagctacaacacctggccttatattttacagtcacatactattaataaaatattgaaagatgaagtggtacagtacctgggatttgcttcaaaatgccagccctgaggctgggtaatgagtacacgaagatgtgtaatactagttttgaatatgctgaaattttctggctgcgtgtggtgcctcatgcctgtaatcccagcactttggcaggccacagtgggaggactgctagagcttagaagttcaaaaccagtctaggtaacatggcaagaacctgtctctacaaaaaattaaaaagttagccaggcatggaggcacacatctgtagtcccagctactcaggaggctgaggtaggaggattgtgtgagcctggaaggtaaaagctgtaatgggccatgactgcaccactgcactccagcctgggtgacagagctactagaccttgtctcaaaaagaaaaaaaaaaaaaaaaaaaatcccatgattagttcttacaattctacaaatcaaaagcttttaaagcaatactgccagatgtgatccaacatccaaaaataaggtaaccattagttaatgttaaaaatgaaaccacacacaaaaaattaaatgcccaggtttccatcttagaaacaccgtctggtcacgcctgcttaggaaacactcccctgctgtcctctgaagcaggggctttgtctcacacttcagctgtggctgggacatctcccctcagacaggtctgatgggcatcgggcatcaggcatcataaacttgctgcagccacaatggccccagattatttccttggccttccctgctcatgtctatagtgccaccaccatccaggtgctagaatacctgagatcatcctaggccccgctccccctcagccccgcccgcaccatgcaccctgagcctgcacgtcctccagattctgcagcctccataccacccgtcatcactgcctctccctttggctgccctgcttccaggtacatgtcccagccgtccccacagctctcagaacatctcgcaaatgtgtaattagatctctttattcccctacttaaaatctgtcaccagtttctcattgtccctaacacgaaatccaatgctttccatgacctacgtgattctaagctctgagccttccgctctgcctgcagagctggggccttcttgtcattccagtttcagcttaaatgtcaccttttcagaggacatcctctccccacccaacccctacacccgccatggccccaggttcatctctgccggcccatatgactcatttgctctggtgtgtttactcaggcacctgtttaccctcgtttatggccggcttatttatggctggcttccaggaacacaagctccaggaagcggtggccaagaaagtagtggtctttcttgcccatgaaaatattactggagcagaggaggcgctccacagccagccactggacacagctgagccacaagcccacctcctacccagcagctccaggttccccgcagaccccccccagagaaaaaccttgagaacccagcacagtggacactgcagggcatccaggtggcacttggacactctgggcactgggcttgagctgacaggaagctcccagggttgcagtggctcccacagccctacaagacctatctgccctcggctggctctactcggctggctctactcggggttctttctctcctctcccttgggaggtgtttgctggccccagggacagagcatcttagaggacaaagggctactatcctgtactcaggtaaaaggccagtgtctttgccgtgacagtgttttaaccccatgtcccacaacctgagcaggatgcagtcatcacagcccagtgcactgcccttggtctgcgccccagcctggttgcgccatccctcatgaattaatttctgtttataataaagaaagtgttaacccaggatgggaaatttctcagatcaccacacatcagaatcacaaagacttacaacagctgcacagtcacgctcagcaggcagcaggcagcagaccgccccttccccaacccggcctgctatggaatgtcagcactcgccttctgccttccacgaggtgtgggcctgaaccacggcatgttggctcagcctccgccggctgccccgtccctccccacacgctcccagtgctgccgctttctgcattctgctttgaggagagatgcaaatgaaaagaagtttgtctaaaaagccactttctcaccagggaggttagcacacccgcagcctgagtccctgaggacaatgagaactcatattcccaatgaggatttaaacaaagccacaaggcgaactgcaactggactccagtgtgctgatgtttccaacaagggtcgcaatgaaaagtaatcccccaattccgaagccacctcggtctctcccaagtacaaaggccttctcagcagggccccctccctgtccaaggctagggggccacagaaaggaaaagggagggcgccctcagggtccaggaaaaggacacacagtgtaaagtgggctggttgtggtggtagttgcaagggattttctttttacttttttttttcttttaaagaaatgagacagggtctctcactctgtcacccaggctggagtgcagtggcacaatcttggctcactggagcctcccaggctcaagtgatcttcctgcctcaacctcccaagaagctgggaccgaccacaggcatgcgccaccaggcctggctaattttttgtattttttgtagagatggagttttgccatgttgcccaggctggtctcgaactcctaagcccaagtgatccgcctgccttggcctcccaaagtgctgggattacaggcgtgagccaccatgccaagccccactatgtattttctattgacctttcttctagagcactaatccttttttcagctgattccaatctgctggtaaatacacctactggattttttatttctttttttttttttgagatggagtctcgctctgtcgcccaggctggagtgcagtggcacattcatagctcactgcagcctccacctcctaggtgctagcaatactccctcctc

SEQ ID NO: 93600 - DNA, 36564 bp, Homo sapiens
tcactatgttgctcaggcccgtctggaactcctgggctcaagtgatccttccacctcagtctcccaaagtgttacatgagccagtgcacctggcttgtctgtgttttcttttgtttcctatgactttgatatgatatccatgttcttttgcatgtggatatccagttttctcagcaacatttattaaaaagactatcttttccccgttgaatggtcttggcatccttgtcaaaatcatttgaccatatatgccaggatttatttctgggctgtcaactctattccaatagtctgtatgtctgtcttcctgccagtaccacattgttgtgattactgcagtttgttagtaagttttgaaatcaggaagtgtgaatcctgaatctgtttttctttttcaacatggtgttggctatctggggtccgtggagattccatatgaatttcagcatgtattttctatttctgcaaaaaaaaaaaaaaaaaaaaaaagtcattgggattttgcttcagtttacatatgaatcagtagctcacttttgggagtattgacatcttaacaatattaagatatcttgtcttaacaatatcgtccaacccatgaaagtgtgatgtttttccttacttatatcttcattaatttctttcagcgatgttttgtagttttcattgtatgaatcttttacctccttggttaaaagtcctaggtattttattctttttaatgctattgtaagtggaattgtttttataatttccttttcaaattgttcagtgttagtatatagaaatgcaaatgatttttgtgtgctgactttgtatcctgctgctttgctgattctgttattgtaattattttttgtgtgtaatgtttaggcctagttttttacatatcatattaaatctgtgaattaattttacttttttctttccaatttggatatatatttttttcttaattgctatggctagaacttccagtactaggttaaatagtagtggtaaaggtgaatgttctcatcttagaagaaaattttttagtcattcactattgagtatgatgttcattcaatgtgcatttctgtttttttctttcttttttttttgagatggaatctcgctgtgtcgcccaggctggagtgcagtggcgcaatctcggctcattgcaaacctccgcctcccgggttcacgccattcttctgcctcaggctcccgaatagctgggactataggcgcccgccaccacgcccggctaatttttttgtatttttagtagagacggggtttcaccgtgttagccaggatggtctcgatctcctgacctcgtgatccgcccgcctcagcttcccaaagtgctgggattacaggcgtgagccaccgtgcctggctctgtttttattatttcctttaaaaacttttaggctgggcgcagtggctcacgccggtaatcccagcactttgggaagccgaggcgggcggatcacttgaggtcaggagtttgagactagcctggccaacatagtgaaaccctgtctctactaaaaatacaaacatttgccgggtgtgatggtgggcgcctgtaatcccagctacttgggaagctgaggcagaagaattgcttaaaccctggaggcggaggttgcagtgagccgagattgcgccactgcactccagcctgggcgacagagcaagactaagtctcaaaaaaaaaaaaaaaaaaaaaaattgtaataagctttctcgggtttaacaatgtaggtttttcaaatatggctttatgttgagatatttcccttgtacgtttagtttgttgaatgttttcattttgagagggtgttacattttgtcacatgcctttgctgcagcaattgagatgatgtgatatgtttcccattattccattaatgtggtatgttacattgaattttgtaggttggaccatccatgcatttcaggagtaaatcccacttgtttgtggtgtataatccttctaaaatgctactgaattcagtttgctagtatttgtagaggatttttgcatcattgtgcataagggatattagtctgtggttttattttattgaatgcctggttctgatatgagggtaatactggcctgttagaatgatttaggaagtatttcttactctccacttttttggaaaagttttgagaagggttggtactactagttgttgtttaaatgtttggtagaattaatcagtgaagccttcaggtccaggacttttcttaggagatttttgattactgattaaatctgcttactagttacaggtctcttcagcttttctgtttgtgatttagtcttggtaggggttttttaatttgtttttttgtttttaaaacagagtcttgctctgttatccaggctggagtgtagtggcacaatcttggctcactgcaacctctgcttcctgggttcaagcgattctcctgcttcagcctcccaagtagctggggctacaggcacccgccaccatgcgcggctaatttttgtatttttattttagtggagatgagattttaccatgttggccagactggtctcaaaatcctaaccgcaggtgatctgcccacctcggcctcccaaagtgctggcttgcaggcgtgagccaccacgcccagcccttgtttgttttttgttgtgtgtgtgtgtgtgtgtgtttgttgttgttttgttttttgttgtttttgttgttgttgtttttgagacggggtctcactttgttacccagactggagtgcagttgcgtgatcacagctcgctgcagcctcgacctcccaggctcaaaacgatcttcccaccttggcgccccaagtagctgggaccacaggcacacgccaccacacctggctaatttttgtacttttttgtagagacaggttttctccatgttgcccaggttggccttgaactccaaagctcagacatctgcccacctcagtctcccaaagtctgggattacgggcatgagccactgtttctggctatttctcccttcaattctgtcagttttgctttatatattttgatggtctgttattagttgtaatctgtttataattttatcttcttgctgtattgaacctttatataatgtccttttttaatcttttttttaaatttaaagtctcttttgtcttatagtaatagagccctgctctcttttggttagtgtttgcatggaatatgtttttccatcctttgactttcaatctagttgtgtctttggatctaaagtgattcttttttgtagtcccagttacttgggaggatgaggcaggaggattgcttaagcccaggagttcaaatctagcctgagcaacatagagagaccctgtctctctaaaaataaaagtaaaaataaaaaagtaagtttcttatagatggcatataattgggtaatgtagtttttttccacgttgccaatctctgtcttctgattggagagtttaatcaatttacacttagttactgatcaggaaagacttatgtcattttgctgtttcttttctatataccttataggattttatttatttatttttttagagatggagttttgctgtcacccaggctggagtgcagtggtgcaatcttggctcactgcaacctccgcctcctgagttcaagcgattctcctgcctcagcttcccaagtagctgggactacaggcgcatgccatcacacccagctaattttttgggtttttttgttggttttgtttttgagacagagtcttggtctgttgcccagactggagtgcagtggcaatcttgactcactgcaaccaacctctgcctcccagattcaaggaattttcctgcctcagcctccctagtagctgggactacaagtgccccccaccacacccagctaatttttgtatttttagtagagaaagggtttcaccatattggtcaggctggtctcgaactactaacctcaggtgatccacctgcctcggcctcccaaagtgctgagattacaggtgtgagccactgtgcccagccaccttataggtttttttgttttgttttgtttttaaattgagacggagtctcgctctgttgcccaggctggagtgcagtggcatgatctcaggtcactgcaacctctacctcccaggttcaagggatcgtcctgcctcagccccctagtagtgggattataagcacgcactaccatgcccggctaatttttgtgtttttagtagagatggggttttgccgtgttgggcaggctggtcttgaactcctgacctcaggtgatccacccacctcggcctcccaaagtgctgagattacaggcatgagccactgtacccggccatggattttaaaatctctaattacctgcattattgtcttcttttgtgtttagctggagttttgtaggttttcttttttctttttgtagtaacatgtttaactattttctcattttattttgtgtaacattgtaatttgaatttatagcagcgtaatttcagtaacatgcaaaaattctgcttctttatagcttcatctccacccctttcagttgtcacaaaattacattattatatactgtgtgtcccaaaacataaactcataattgtttaaatgcattagtctgctaaggcgtgttttatggacccgaatgtgatctatcttggtgaatgttccatgtgagctttagaggaatgtgtatcctgctgctgttggatgaagtgctctatagatgtcaattctgtctggttgcttgatggtgctgttgagttcattatgtccttactgattttctgcctgctggatctgtccactttgatagattgatgttgaagtttccaactataatagtgaattcatctgcttttccttgcagttcttagtttttgctttgaggattttgatgctctgttgttaggcgtatacacataaggtttgttacctcatcttagagaaatactcctttataattttgtaatgtcctttttctatccctgataattttccttgctctgaagtctgctctgcctgaaattagtatagccactgggactttctttttgattcctgctatgtctttttccatctctttaattttttctctcttttttttttttttaaagacgagagtttcactcttgttgcccaggctggagtgcagtagcttgatctcagctccctgcaacctccaactcctgggttcaagcaattctcctgcctcagcctcctaagtagctgagattacaggcatctgccaccatgcctgggtaatttttgtatttttagtaaagacggggttttaccatgttgtccaggctggtcttgaaatcctgacctcaggtgatccgcccgcctcagactcccaaagtgctggtattacaggagtgagcaactgtgcccagcctcatctctttaattgtaatctacctatgtttttatatttaaagtgagtttcctgggtcttcttttaacattttttgcaaggtggatttactgatgacaaattcccttaatttttgttcttctgagaaagtctttatttctgttcatttttgacccaacacatgcttgggtcttatttttgaatatattctgacattctctattacttatttgatgtatttagaacattgacatttaaagtgattattggtacagttagattaatatctgccatatttattactgttttctgttgcttttattcttcccttttctttttattttggtcttccactctttttctgctttctctggctttaattgaacattttatatgattacattttttcctctcttagcatgccaattatgcttcttattatatacttttaaaaagtcttggctgggcgcagtggcccatgcctgtaatcccagcactttgggaggccaaggtgggtggatcacctgaggtcaggagtttgagaccagccttgctaacatggtgaaaccccatctctactaaaaatacaaaaaattagccgggcgtggtggtggacgcctgtaatcccagctactcgggaggctgaggcaggagaatggcttgaacccgagaggtggaggttgcagtgagccgagatggcgccattgcactctagcctggttgacaagagcgagactccatctcaagagaaaaaaaaaaaaaaaagtctttgcccttgagtttggtatttacagttacaactaatccaattccactttcacctgatgctataccacttcatgggttgtacaagttccctctaacagagtattctcagttcatccttactgtcccttatgatattgctgtcattaatttcacttattcaaaagcgaaattattatttttattattatttttttaagaccgagtctcgctctgtcgcccaggctgaagtgcggtggctcgatctcggctcactgcaagctctggattccggattcacaccattctcctacctcagcctcccaagtagctggggctacaggtgcccaccaccacgcctggctaagtttttttgtatttttagtagaggcggggtttcaccatgttggccaggatggtctcgatctcctgacctcgtgatccgcccgtctcggcctcccaaagtgctgggattacaggcgtgaaccaccgcacctggccataagtgaaattattgacagcaatatcataagggacagtaaggatgattattgacccaatcattgaatacattgttgcgggtttgtttttgtttttgttgtcgagacagggtttttttgtttgtttgtttgttttttgagacrgagtttcgctctgtcacccaggctggagtgcagtggcgcaatctgggctcactggaagctccacctcccaggtttgcaccattctcctgcctcagcctcctgagtagctgggactacaggtgcccgccaccatgcccggctcattttttgtagttttagtagagatggggtttcactgtattagccaggctggtctcgaactcctgacctcgtgatctgcccacctcggcctcccaaagtgctgggattacaggcatgagccactgtgcctggccgagacagggtcttggtctgtcgtccaggctggaatatagtggtgcgatcatagcacaccacacccttgaactccagggctcaaatgatcctcctgcttcagcccctcaagtagctgagacgacaggtgtgcaccaccatgcctagataatttttttttttaatttctagtagagacagggtctcgctatgttgcccaggctgatcttgaactcctggtcttaagaagtcctcccgcctcagcctcccaaagtgttgggattaacaggtgtgagccattgtacccagcttttaaaaatattaataatagagtcagagtgttactatgtggcccaggctagagtgcagtggctattcacaagtgcaatcccatgactgatcagtacaggagttttgacctgcttcatttctgacctgggcttattcacccctccttaggcaacctggtggtccttaaggaggggaggtcaccattttgatgccaaacttagtgcagacactcagtccaaatagcccagaactcctggactaaagctatcctgcctcagcctcttgagtaactgggtctagaggcatgcaccaccatgcctagctgttgctgttattaccttgaacaaactgttaaaaataagttaaaaataagaaaagtagaccgggcgtggtggcttttgcctgtaatcccagcactttgggaggctgaggcagatggatcgcttgaggtcaggagttcaagaccagcctggccaacatggtgaaaccccatctctactaaaaataaaaaaattagctgtgcgtggtggcgtgtgcctataatcccagctactcaggaggctgaggcaggagaattgcttgaacctgggaggcagaggttgcagtgagccaagatcgcaccattgcaccccagcctgggtgacagagccagactctgtctcaaaaaaaaaaaaaaaaaaaaaaagtaagaaaagtaaaatattttgccttcacttatttattctctaatgctcttcctttataggtctttatttctgacctgtattattttccttctttctcaaacacttcttaatattttttgcaaggcaggtctactgatgacagattctgttaatttttattcttctgagaaagtctcttctcttttgaagggtaattttactggatacagatttttaggttaatagggttttttttttttccttacaacactataaatattccctctactgttttcccttgaataatttctcaaagaagtstgatgtaattcttatccttactcctttataggaaaggaatttatttccctgtggcttctctcaagattttctctttgtctttgattttctgtagtttattgtatgcttacatgtagttttgttctgtttttgttttttgctatttatcctacctggtattctgtgagctccccagaactgtgtttggcatctgtcatcagttttggaaaattctcagttcattattgtttcagatactttttctgctcatttctgcctgtcatcatcttctggattcccattatgcatatttatgcctttctaattgtcccacagttcttggatattctgttccatcttgttcattcttttctctctgagtttcagtttgggaagttgctmctgacattttttttcaagctcattgattctttcctttgactgtatctaatcgatgaatccatcaaaggcattcttcacttttcttagttttttttgtttctagcatttccttttgattctttgagtctttatctctgctgaaattacccatctgttttagcatatcatctactttttccattagagcccttagcatattaatcatagttgttttaaatcagagttgttagctgtgataattctaacatctctgctatttctgagtctgggtttgatgcttgctatatctcttcaaagtctgctttttaatcgtagtatgccttgtaatttttttgttgaaaaccggacttgatgtacttgttaaaaggaactgaggaggccgggcatggtggctcacgcctgtaatcccaacactttgggaggctgagcggggaggatcgcttgagcccaggagttcaagaccagcctgggcaacgtagagaccccgtctctactaaaaatagaaaaactaactgggcatggtggcacacgcccgtaatcccagctactcaggaggctgaggcacgagaattgcttgaacccgggaggtgcaggttgcagtgagccaagatcatgccacagtactccagcctgggcaacagagtgagactctgtctggggaaaaaaagaaaaaaaaacaggccaggcacagtggctcatgcctgtaatcccagcacttcgggaggccaacgcaggctgatcacttgaggtcaggagttcgagaccagcctgatcaacatggcgaaagcctgtctctactaaaaatacaaaagttagctgggcatggtggcaggcgcctgtaatcccagctacttgggaggctgaggcaggagaatcgcttgaacccaggaggcagaggttgcagtcagtagagattgagccagtgcactcctgcctgggtgacagaatgagactccatctcaaaaaaaaaagaaaagaaaaggaagtaactgaggaaaatcagcctttggtgtgagttttttagtttatctggctaggcgttaggctctgtctgctgtttgctgtaactataggtgtcagaactaaaatttcctcctgggtctgtttttccttccttgggtttccgtagagacttcttaaataaagtctgagatatgcaggtttttccgttctattctcttgttattatayaggagccctatttatgtggtgggaaggaggggaagtgtcctaagtcctgtgactaggtctcagtctttttgtgagcctgtgcccctggcctgtgacttttaccagcacttctcagtttggggtttttgcctccttaggtgaaacaggaagggagagggggctggagttaggccctttctttcctgcctgtggaaggcttaggggtgcttaagttgggtcaacctttcccttaggctgatgaggatcttataaaacctaattaagttaggctcttgtaaaatagtttcctttgaggacaggccttgttaagaacaggaagctctagacatagtccacatggctgctttccccctcccccgccagaagtatgagaggatctttctctgatcttgactgtgagagtctggtagggctcatggaggtaaagtccacattgagtctccagcagttcatgaattgctgtgtaaattttcctaccctcgtttccactcctgggctcctgctcaggtaagctccagttcaccctgttgacatgtctcctgtgtcgggggcagtcatttgccctgtaacttcagttctctgatgcagctaaaaggggttgtttgccagttcagtgttgtttcttgtaaggatggtagtgacaacttctaagctcctgacatgcctcactgaagaatgaaagtcctttgccttcattttttaatgatatttttggtagataaaaataattccagttgaccagtttttgtgagtgtgtgtgtgtgtgtgtgtgtgtgtgtgtgtgtktttttcccagtactttaaagatgttacttctttgtctttccgcttacagcagaagtatcatgtcattcttacctatatttatcagtacataatatgctttttagcttaactgcttttaagactttttaatttaacactggttttctacaacttgattatgatgtgtcttggtgcagtcttcttcaggtttattttgtttgggtttttcttttttttgaggcggagtctcgctccattgcccaggctggagtacagtggcgcaatcttggctcactgcaagctccgcctccagggttcacrccattctcctgcctcagcctcccgagtagctgggactacaggcgcccgccaccacactcagctaattttttgtattttttagtagagacggtgtttcaccgtgttagccaggatggtcttgttctcctgacctcgtgatccgcctgcctcggcctcccaaagtgctgggattacaggcgtgagccaccacgcccggcctctgtttgggttttattgactttcttggatgtgtgaattgacagttttcatcatatttgggaaattttgcttatttcttcaaatatttctgtctcctctttgtttttcttctaggacttccaattatgtgcacattagacagcttgatagtgtccaataattttttctctctgccttatttgagtagtttcaattgctatgtcttcaaattcatggatcttttctctttcagtgtttatttggtgttaatcccatccagtgcatcttttcatttcaggttttgtttttactgtctctggaagttccatttggatctttctatatcttccgtgttctcatcatgctcatgtttccctttaccttcttaaatatatgccgaactattgtccttgtctgctagttcctttatctctgtcgtttctaggtcagtttctattgactgtgtatggttataggtcatattttcctctctttcttgcatgtctgttatagcagttatcagtttattgcgtctcaactctaaatccacccttcattgccacttgtgatactggaacatttctcccttgccccatgctggtctttgtcagtggaaagcgttgagaggaaagggcatttcttggttctttgtgctttgcttacagctgtctgtgacatgagctggtatgtgggacatatagggtgctcaggcagctttcaggcaggtcccatagcaccccagctagccgcctggcagctttctggtgagttcaacagcacccccacaccaaccccccggctttccagcactcctcaagcagccttccagctcactgtgttagcgtcctcgcacgtggttcttggccctcagttctgtcctgggacagcccagtcgacgtcatcatctagtgcgtgcttttgatcacaccctctcctaggtctgaatccttcccttagttacctccctttactctaggatgttctgtggatttctcttttgttccctcttagtcaactccctgtaaatagttaataattcttatgctaaacttcccttgttkaagctaccatgtggtttctgtcccctggtgggaccctgactgataggcccggttattttttaaattggatgctgaatattgtgaatttcaaattgttggccaggcccggtgtggtggctcatgcctgtaatcccagcactttgggaggctgaggcaggtggatcatttgagctcaggagttcaagaccagcctgggcaacatagtgagaccctgtctctgcaaaaaatgaaataaattattggctggtgaattttgttgaattcctttgaataatgttgggtttgggtctggaatgcagttaagtcccttggaagcagcgatcctttagagacttctgaacttttcagtgggtccagtgctgctttagtctgcagttgacttagctctattactaagggtgatggccttctgcggagtctacccaataccccacgaattaggagatctctccacggtggcttgtgggaacacaaaatattccctgtgtgaactctggggattgttttgtttgctacttcctcaggagtctttcctgggccttctcatatagtttttctcacccaggcacagatctgttttcagctaaagactccaggagaccctctgcagatcctggctctgcctctgcagctgcctcctccccaggactctgccctgcaaatagcagcagccttggcctccctgagctctgaactctgtcttcccaactcagaaagactgcaggttccggctgagtttccctgcctgcgctgcagcctggaacccgcctcctggctgtaattggtgcagtcataggatgtgctctcttgtctcccttatcttggaatcactgtcctgcactgttttccaccaactgaaggcaaaagtatgttgtccagttttccaggtgttcagggttccctgttgctgcatcctacatgagtatataaacagagaacaaacaaaacagcctgtcaggagtttgctgaagtttcagaataggtggtgctgggtgagctgatgggcatgagtaacactccccttttccttcttttagtgaccacaatatgaatgggaacagcaagatggcaaaagcttgctgagtggtacagcgccagcctgggtagtggcctccccagcaagttgcatgtcactagcttcctgtggctgtcactcctgggcccaggcacctccgaagatcagcacctcctcatgggctcaagcgaggacaggagcccgtcacccatgagctctcaagggcagagccactgtcctgtctcgatggctccaccgtgactccagtggactttggacagtggggagcaggcccaacagggccactcggatgtggtcactctggatttgggtggatcagcaccaagctagactcatccccagcccccaggtgctgttgctgctcctgcgtgaggccccatccacagctgcagctgtggcagggtggctagtggtggccagcatggccctgctgcagctccacgctgtggggggcgtggccctgaccagcagccacccctccatgtgggccacaggggaggagcttaggaagccgccttggcaaggtgagtggacgcatttacgtagtgagaggtgagaaccagtgccgctccccagagccctgcgattcctggggaggctgaggcttgtagacgccttgcctgctctcctcctggggtgctttcctgttcacagggctgggaccttggagggagaatggaggcagagcctctgtctgcccccgctcaagggcccagcacaggcaggccctctggggagcccctcagtggctggtggggagtctggggcagggtgagggacagcatcttccaccgaccacaggcttgggcagcatctgtcctggaggccatccctgtgggaaggcctcttttgtatgactccttccctgtgaaatggcttctccatgtagttcagccccacaggtgccctcagaaaacacgaagtgctttctgcacgtgtcscggcccccagagaagaatttggttacagagaaggtgacagctcatggcttcctgagggtggggcagtgggagaagtccccaggggagcttggggcccatggcctcccacaccctgggtggggctgcccactgggaggcccacattgcctcagtgtcctgcaccctacagttcagggtgcctgggggctggaaggagagcaggggccggggaccagtggctcacagggacctggggagaactgtggaaccagccttcccagccgtcccacccaggaaaggagtgggcagagttggaagaaatacagcactgccttggccttggcctcagacccgagggtctggctatagccatggtggtggctgtgtcgtgggggctgcatcatggcactggcagtggccccaggactgtggactagtgcagactagcacagagttcctgctgggctcggggtgggagcccctcctggccgtggagacaggcccacgtcagcccctcaggatctgttgcccaacagctctcagccttttgcttggggcctctttgcgtggaatggttctgagttctctgctatctggcagcatcatcttctgagcactgctctgacagatgccttagtccacagactgccatgccctcccattaggagccatccttgggcactcctgtgtcacccgtagttactccaccatcctgccaggccatgggatgtggaggctgaagagtccaaatgggacagaagcctgtcccctccctccttcctcagagaggccttggttgggctcacactgagtaggggcaaccagcagccggagagagtggagctcttaaactgtggctccagagcagaaggccccctctgacacacctttcatccagcatgttctccgtgagcacctgccacggcccaggccctgctctcggtgctgccggctgagcccagctctcgtggggctcgcatctaacaggagagggtaactacagtgtgagtgagatgtgattcgtggtgaggaatagaggaatagaggaatgaggatgcagaggtcttctgtcctagaggatgcttggctgggcagagggaaacggccttgtgtccctgggggactgtcattgtcgggcacatctctggatgggacatctgtggctggaagctgtccttgtggccgtgctagttggaccagcctggctggttatcagtccgtgtcctcagcccctccccttttcaatgactcattccaggttccgcaggctctgcgtctggtgtggaagagctcacggggaagcactcctgcccaggacccgaggagccggccaccgttcagaaggccccagcttgaaggcctggagagccgcccagcagcacaacacagggaagcttggggaggtgagccccacttcctgctcccgcacaggctcttctccctggggcactggctgggcgggatgctgagaagctgggcatgggcggctgctgagaggcagaggagccagagagctgcaggaaatatcctggggctgggagaccaagataggggctcagggctgccgaggcggctggacctgaggggccaagacccctgagcgaaggagccagagaagagagacggacattaggcactggtctctctagccatttgctgatgaagctgcttagggcagaggagcagaaagtggctgaaaagcagagtgggatttttggcagtttcgtggagttagggaataggttggggcctgtcaggtgcagggccctaagaaatatcccaggctctcatctgggaccaaccctgcctcgccgggacaagccacagctgggctgttctttccaaagactgcagaggagcttagtgtgggtggagttcctgattcactgtctcactgctgcccaccacggagcggagtgggtgagctgtccctgtcgggggacatgtccagaccctccgcccttctgtcacgcacagtccctgacactcagttgaaggcaaccaggtacactgggaaaggggaccaggggaagaaaggtgacagacccacaggagactgagatacggtttttggacatggactttagtatgttaatcacatctgttttatttttttattttattattttatttatttatttattttgagatggagtctcgctctgtggcccaggctggagtgcagtggcgcgatctcggctcactgcaagctctgccatccgggttcacgccattctcctgcctcagcctcccagtagctgggactacaggcgcccgccatcatgcccggctaatttttttgtatttttagtagagatggggtttcaccgtgttagccaggatgtgatttgcctgcctcggcctcccaaagtgctggcattataggcgtcagccaccgtgcccggccaagcacagctattttaaataatagagataagatgatggattgtttcatagaattggaattcataaaaaatataatggaagttctaaaacagaaaagcacaataactgaaatttaaaattcagccaggtgcagtagctcacacctgtaatcccagcactttgggaagctgaggtgaagagtttgagaccagcctgggcaacacagcaagaccttgtctctactaaaaattttttaaaattaggccgggtgcagtggctsacacctgtaatcgcagcaccttgggaggccaaggcaggcagaccacttgaggtcaggggtccaagaccagcctggccaacatggtaaaaccttctctctactaaaaatacaaaaattagccaggtgtggtggcgggtacctgtaatcccagctactcaggatgctgaggcaggataatcgcttgaatctgggaggcagaggttgcagtgagccaagattgcacccctgcactccagcctgggcaacagagtgacactgggtctcaaaaacataaagattttacaaaattagccrgggatggtggcacatgcctgtggtcccagctacttgagagactgaggagggagtattgctagcacctaggaggtggaggctgcagtgagctatgaatgtgccactgcactccagcctgggcgacagagcgagactccatctcaaaaaaaaaaaaagaaataaaaaatccagtaggtgtatttaccagcagattggaatcagctgaaaaaaggattagtgctctagaagaaaggtcaatagaaaatacatagtggggcttggcatggtggctcacgcctgtaatcccagcactttgggaggccaaggcaggcggatcacttgggcttaggagttcgagaccagcctgggcaacatggcaaaactccatctctacaaaaaatacaaaaaattagccaggcctggtggcgcatgcctgtggtcggtcccagcttcttgggaggttgaggcaggaagatcacttgagcctgggaggctccagtgagccaagattgtgccactgcactccagcctgggtgacagagtgagagaccctgtctcatttctttaaaagaaaaaaaaaagtaaaaagaaaatcccttgcaactaccaccacaaccagcccactttacactgtgtgtccttttcctggaccctgagggcgccctcccttttcctttctgtggccccctagccttggacagggagggggccctgctgagaaggcctttgtacttgggagagaccgaggtggcttcggaattgggggattacttttcattgcracccttgttggaaacatcagcacactggagtccagttgcagttcgccttgtggctttgtttaaatcctcattgggaatatgagttctcattgtcctcagggactcaggctgcgggtgtgctaacctccctggtgagaaagtggctttttagacaaacttcttttcatttgcatctctcctcaaagcagaatgcagaaagcggcagcactgggagcgtgtggggagggacggggcagccggcggaggctgagccaacatgccgtggttcaggcccacacctcgtggaaggcagaaggcgagtgctgacattccatagcaggccgggttggggaaggggcggtctgctgcctgctgcctgctgagcgtgactgtgcagctgttgtaagtctttgtgattctgatgtgtggtgatctgagaaatttcccatcctgggttaacactttctttattataaacagaaattaattcatgagggatggcgcaaccaggctggggcgcagaccaagggcagtgcactgggctgtgatgactgcatcctgctcaggttgtgggacatggggttaaaacactgtcacggcaaagacactggccttttacctgagtacaggatagtagccctttgtcctctaagatgctctgtccctggggccagcaaacacctcccaagggagaggagagaaagaaccccgagtagagccagccgagtagagccagccgagggcagataggtcttgtagggctgtgggagccactgcaaccctgggagcttcctgtcagctcaagcccagtgcccagagtgtccaagtgccacctggatgccctgcagtgtccactgtgctgggttctcaaggtttttctctggggggggtctgcggggaacctggagctgctgggtaggaggtgggcttgtggctcagctgtgtccagtggctggctgtggagcgcctcctctgctccagtaatattttcatgggcaagaaagaccactactttcttggccaccgcttcctggagcttgtgttcctggaagccagccataaataagccggccataaacgagggtaaacaggtgcctgagtaaacacaccagagcaaatgagtcatatgggccggcagagatgaacctggggccatggcgggtgtaggggttgggtggggagaggatgtcctctgaaaaggtgacatttaagctgaaactggaatgacaagaaggccccagctctgcaggcagagcggaaggctcagagcttagaatcacgtaggtcatggaaagcattggatttcgtgttagggacaatgagaaactggtgacagattttaagtaggggaataaagagatctaattacacatttgcgagatgttctgagagctgtggggacggctgggacatgtacctggaagcagggcagccaaagggagaggcagtgatgacgggtggtatggaggctgcagaatctggaggacgtgcaggctcagggtgcatggtgcgggcggggctgagggggagcggggcctaggatgatctcaggtattctagcacctggatggtggtggcactatagacatgagcagggaaggccaaggaaataatctggggccattgtggctgcagcaagtttatgatgcctgatgcccgatgcccatcagacctgtctgaggggagatgtcccagccacagctgaagtgtgagacaaagcccctgcttcagaggacagcaggggagtgtttcctaagcaggcgtgaccagacggtgtttctaagatggaaacctgggcatttaattttttgtgtgtggtttcatttttaacattaactaatggttaccttatttttggatgttggatcacatctggcagtattgctttaaaagcttttgatttgtagaattgtaagaactaatcatgggattttttttttttttttttttctttttgagacaaggtctagtagctctgtcacccaggctggagtgcagtggtgcagtcatggcccattacagcttttaccttccaggctcacacaatcctcctacctcagcctcctgagtagctgggactacagatgtgtgcctccatgcctggctaactttttaattttttgtagagacaggttcttgccatgttacctagactggttttgaacttctaagctctagcagtcctcccactgtggcctgccaaagtgctgggattacaggcatgaggcaccacacgcagccagaaaatttcagcatattcaaaactagtattacacatcttcgtgtactcattacccagcctcagggctggcattttgaagcaaatcccaggtactgtaccacttcatctttcaatattttattaatagtatgtgactgtaaaatataaggccaggtgttgtagctcacacctgtaatcccagcactttgggaagccaaggcaggagaatcacttgaacccaggagttggaaagcagcctgggcagcacagtgagatccccaccccatctctaccaaaaaagaacaatttttttttttaaattagccaggtgtggctgggtgcagtggctcacacctgtaatcctagcactttggaaggctgaggcgggcggatcacttgaggccaggagtttgggaccagcctggccaacatggcaaaaccccgtctttactgaaaatacaaaacttagccaggcatggtggcgcacatccgtaatcccatctactagggaggctgagggaggagaattgctcaaacttgggaggccggaggttgcagtgagccatgatggcaccactgtcctccagcatgggcaacagagcaagaacctgtctcaaaagaaaacaaaaccaggtgtgatggcacatggcaggaggctgaggcaggaggatcccttcagctcaggctgcagtgcactacaattgtgcctgtgaaaagccactgcagtggccggatgcggtggctcacgcctgtaatcccagcactttgggaggctgagatgggcggaacacaaggtcaggagatcgagaccatcctggctaacatggtgaaatcccgtctctactaaaaatacaaaaaattagctgggcgtggtggcgggcgcctgtagtcccagctactcaggaggctgaggcaggagaatggcatgaaccccagaggtgaagcttgcagagaatggtgtgaaccccagaggcgaagctcgcgtgaaccccagaggcaggctgcagtgcagagccaagatcgcgccactgcactccagcctagaaagaaaagccactgcactccagcctagacaacgtagtgagaccctgttcctaaaataatttctttaaaaacaaaacataaggaccaataagagccattacaaacttaagagtttactattaatacttcccagttatgggtcagtgttctgctttccctgattgcctcttacataatttgttacacaaatgtctgtttgcatgaataaaagattggatgttttataggatctaaggtccatacattttgtttatggatatatctcaagttttattatcatttaacatccatctcaaaatgtgaactttttttaacctatgagttctgcctctcttcttcttttcattttgaaatctattgatgagcctgtcctttgccatctacgatttcccagtctgggtcgtaccgtgtccccatggtgctgttgaacgtgagcctctgtccttgtatttgctttaagttgtcatttagatctagaggtttgatcagattcaagattgttttggcaagaactctcctaagtgctgctgtgtgtggtcttggattagaagggacagaggctgtcttttgtgatgttagcagccactacatcagggctgagattagggacggcaaaatggtgactttcaggtctagcattccttcctcgtgtattagctggagtccacctatctaaagagagccttctcgagctatgggttactgggcagtcctttttgcataggaaaggcagaataccgccttgatcctttgactttatttgcctttttgcagaagaacaagttgagttcctagcatccccctaaggtggctgataattattttatgtcaacatgaacttatgtattgaaacacagtgatatgtttaatctgttgcaattwttcttttcagtagcaatttgtagaactgagaatttctttgtgacagaacgttgaagcagtggtgaatgatgaaggatagaaaagaagttatattcagtaaagtaggaaatctaactcaggcatatgcattatgtcagatcagaagcttcacactttctcagttgagagcactcttgattaaggttcaataattattttaatagtaagccaaaagaaatccctgatagtggtgccggaggagacaggttgtgtttttatcttgtggcctgggtagtgtcctgggaccctctgccccatctgagtcaagtgttgtgggataaaggaatctctcagggcgaggakcttcttaagttaaatcggtagaaatttaggcatgacatgggccttcaaatgtgtgaggagctgtatcattttatttctcggtgtgttttccccaacttctagttgataaaaaaaaaattcttaaagagttttcgtatgtgggagctaaggtggtcttgtaaaatttcaagtcatccttaaataaaatgacccgcctgagaacttgctcccgctaagtggcgaaatcaactggagttggttcctacaagttttgtttattctagttttgtttgtaagtaggttgtgtgagttaattcatggatatttactatatgtcttttaaattagaaaacatttgttattatgtatgtccttttagattttacctgcagctcatactttgaaatcatcacccagtagtgtcttactctagcatcgtctaaatctgagcatcatctggtggaatcttaaatttcagtagaaaccacgagttattaatacatcttccactcaagtatcaatttcagaaggaaacgtaaatgaatattctaaataaggctaatttgtattaatctgcctttatgtttgagggaaaaaaagctgagacattgcatgaaagatgatgcaggatatacgctgatcttttggccccaatgagctatttgaacattgtcctgtttattgttagttttcttcatcatttattatatggtcaatttttgaattcctgtaatatgaaaccttattctatcttttaacttactgttacctaaagttagtaagtccagattatatggtcattcaaaaaaaaaaaaaaaaagaaaagaaaaagaaatcccccacagttccatttattaaataagtaaaccccaataataagcatttgtgtcctggcaacttatagtggatgtctagaaaagtaatacataaagagaaatgttcatgttatttgtttagtcatgggatgtgtgtgcctgtcgagcacctcttcaacttggaatctggtagaacaccgccaccctcattgcctcatttttccacgtcgaccttcacagtaattgcttgttcagtgactgccacaacccagcctggcagagagagggaagataccctataaagcaaggtaacgttaatgttgagaccatgaatggccttgagcagagcagagtatcattgcttccttcaaaattcagaaggatctgatggtgctctgtgagttcatgggggtgcctccgtgcaggttggaaaccacagctgtgcgtccttcccgctttccctcttgatcagtagaagggtaccctccctggcctgcacgtcgctgggtcacacaacactggctgtcgttgcacaaagccacggccaccagcgttcctttgaggccatttgtttccagccatggtgcctataggatttttcctttatcctgtaatttcagccaaatcagagcatgtgacctggcttagatgtcaatataattgttgttatgtgctcttttcccttcctgtgtctgtgacaggtttaatttaacctgagaaggctgcagatcctcggggttggtgtaaaaacacctcatcctgatctgagaaggcggtcagcttttctcctcgttgccgttggctgccagcacccattctctgtggatgtgaaaatcccagaagggctgggcttccttcttgggcattccccaggcctatctccagagtggggcccagcatgggaggattgtaccccactcactcccctgatgtggggcttggacctacagctcgacagcacccatggaatgtgggcagaagcgacagcagccagctccgccttggccttagggcggcacgtgttctgcttgtgccctgggagcctccaccttccacactgtgggaagagggtgcccagggagctgcagtctctccagcccagccccaggacgaggcccaggcagcagagccaccccagcagacctggcagtgtgagagaaatgcatgtgtatacactgagtttgcaggtggctgttacatggcagcattgactgacacagacagaaaagagatccacgagggagaagtgagagtgctggagactccacaagccacaggctgcaggggcaggatggcttcttagaaggtgaaatgattgttctgggaatctatcagaggaagacatagaggctccagacggttgaaggcccaacagtgatcccagacrggccccatgtcagaccaggctcctccagggctgtgctgccctcaccaaagcccgtcctgagggcagccacacagcaggcagcactcgccatttgtacaagcgaggcccaagttccagccttccttctggcaggtagaggaagcaggggcactatgcctgggagttcctgaaagcagatggggcagcatttggtcaagagccaggaggggatgacagaccagaggggaaccctygtcccacgtgctgagcacacgtagggggttgggcacttgctctgtgagctataattggtgtccctgtgccccgccggaagctgcaccaggcagtttcttggtggaggacagtggccgccctctagctttactcccttccccgtgatgggtcgctgtcagatgtgtgtccaggaaaggcaaacaccaaaggcagaggactagtccctacaccgaatactccggtggccttgcttgggggctgggttttgacgtgctggaggctgtcctagacttagagattaaaaacagggaagaaccattgctgaaacctttggaaaagcctgcaatggggcctctggcagcctgaggagtggtggtgtttccatctggtagacgccgtctcaataggagggacagatgagtgcaccagtgctgccagccagaggcgtctgttggcgtgtctttatggaatggggtgccagtcttgtggagggtggtttaccttcctgtttctagtccccactgggcctgccttctgcttcatggccagctggccagaccgagcactttcctgactttcgaccttggcccctgctgactcttgccgttgaggcctcctgcagaccccatttgtattcatttcctgcagttctcatacctgaatcccgcctggacttctgccaagccttccaggccctcctcccccagggggaccacagatgctacgtgcagggctgtccttggagggccagcacagccccttccaagtgggcaagacccaggggtggctcaaaagatagctgtgccctagccctggaacctctgaatgttgatttttgtagcaaaaaaggacttgcagatgtgagtaaaggctgttgagataaggacatcctccctgctctctgggaggaccccaaatgcaggtgcacagatcttaagaagaagaggcagagactggggtgatgcagccacaactaaggaaagccaaggattgctggcagcctgcagaaactggagggcaaggagcatcccccaaccgcccggagcctccaggaggcgcaaggtcctactgactccctgacttcagacgtccagtctccggaattttgagaggatccatttctgttattttaagcaaccaaacttgtggtagtttcaccagtctcaggaaatgaatacgaatggaaagtcaaagattccaagaaatgagtggcggggtgcggtggctcacacytgtaatcccagcatttgcgggaagattgcttgggctcaggacttggagaccttgtgtctgtgagaaacttaaaaaataggctgggtgcgatggctcacgcctgtaatcccagcactttgggaggccgaggcaggcggatcacaaggtcacgagtttgagaccagtgtgaccaacatggtgaaaccctgtctctactaaaaatacaaaaattagccgggtgtggtggtgcgtgcctgtaatcccagctactcgggaggctgaggcagaagaattgcttgaacccaggaagcagaggttgcagtgagccgagatagtattactgcactccaggctrggcagcagagcaagattccgcctcaaaaaaaaaaaaaaaaaaaaaaaaaaaaaaaaactgagcatggtagcatgcacctgtggtcctggctacgccggaggattgcctgaagccaggagttcaagaccagtctggacaaaagagcaagaccccatctctaccaaaaaaatttaaaaattagccaggcatggtgccgtacccatagtcttagctactcaggaggctgaggagggaggattatctgagccctggcggttgaggctataatgagccatgattgtgccactgcactccagccttggcaacacagtgtgagaccctgtctcaaaaacaataaaaacccaaaacaaaagaaccaagaaattactggacctgaggcctggcctttagctgctgccctgcccttgtgacctggtcactcgggatcccctgggcctaaacacacagcctattgtctacctcaagaaggctccccactgcttggctggcaattggggtgggctttgcaggccccacctgtcctggccccacggcgctggtgctgcaggcccccaccactgcttgttccgagctccccagcctcctgcagagttgcctgcacctgatggcgatgaatcaggaaggcaggcgtgtcctgggccacagagcagtcatggctgtcagccaccagggggctccatttgcaactttggatgtggctttggcctctttgtccaaagtgaccttggggcccccagacaagagacagggagactggagcccagccccaccctcccgcacatacctggcccatccctgccctatcctggaagatgggggccaccacacgtgcaagggacacgggataggaacctttggccttgttatcagacattttaaaactaagtgcaaacgtgattatcaggtgcagtttttacagcagcaagaaacctgtgcttacagaaagaaacacgtgctagcaacccacctatgcggaaagccacacagagccattgttttctgcactctcaggtgacggctcacatttgccccagggaaggtcacagctgcctgaacttttaaaactcccagacacgcactgcctgtgcaggatccggagcccagcagcactgccagggccttgaagtgcttcttcagagacctttcttcatagactacttttttttctttaagcagcaaaaggagaaaattgtcatcaaaggatattccagattcttgacagcattctcrtcatctctgaggacatcaccatcatctcaggtgagcaccaggtggagtgcctctgggtgactggccggtttggagcagggagggaggcttagagtctcatcctccagcagcgagtgaggcggaggctccagcgtccctcccgggcgggttttctggtggatggaggagtgactcggggtcctctacgtggtgccagctgtttggctttctggacgttgtaggaaagggtttcccccgcctgcgtccccctgacctygagctccaccagcccctgccagctgggctccagaaggctggagtgctgtggcagggatgacgtctcacttctgttatgtctctgtgccctgtgctctcccaggatgagggrcatgwagctgctgggggcgctgctggcactggcggccctactgcagggggccgtgtccctgaagatcgcagccttcaacatccagacatttggggasaccaagatgtccaatgccaccctcgtcagctacattgtgcaggtgaggccagggcagcctccccccaaaagcagaggagctctggagtctagggctggtgggcagggccagccctatggagccacagggtgtcgggtgtggggtactgagcaccactgctcccagcayggtggaacaggctcttggctgtggaccaaggtcctcatccctgctgtgctgtccctggctggcagcaggagcccaggcagaaacatgaggctgcggttaaaccgagcaatgccacgagcatcagctgtggctccctttgtggcgctgtagggtccctgggtggcaccagccctgctcagcaccactgtggccctgcccccagatcctgagccgctatgacatcgccctggtccaggaggtcagagacagccacctgactgccgtggggaagctgctggacaacctcaatcagtgggtgacagtggcagggtcataggaaggtgacatctcgtccacggcacagcctcacttcacttgggccccaagggtggggacctgggcacagcctcgctatcggcagccagaggggtcccctatggcccccgccactgggaccttttgtttcttcaatccagggatgcaccagacacctatcactacgtggtcagtgagccactgggacggaacagctataaggagcgctacctgttcgtgtacrggtgggtggtctagaaagccaggaagcccctccctcacctgggagggccccarcagagcagggaagtagtttgtcctattagtttgtcctatggcaagaacctgaggcttcagagcagggtccagggtggagtgaaaacaccccaaggtccyggaccaatgggttgagcaggtgcctggctcccccgccctcctgtcgcctgggtcccggaccaatgggttgagcaggtgcctggctcccccgccctcctgtcgcctgggtcccgsaccaatgggttgagcaggtgcctggctcccccgycctcctgtcgcctgggacgsgacgcctgcctcctgggaagcaggagtggggcagcttccagcctggggtcacctcctcctgcccggccttcccgcaggcctgaccaggtgtctgcggtggacagctmctactacgatgatggctgcgagccctgcgggaacgacaccttcaaccgagagccagccattgtcaggttcttctcccggttcacaggtgggtgctgcctgggccagggtggggctcggcttggcgcttatggcctccaccccctcctagggaacctggaatgcctgtgtcacacactgccctcccagtccctggggcttgggttttccattcaagtcatttggaaaatatccaccccccggggggactgtcatgatacatagttccagctgacatggtgactgaacctgcccccagggagtgtgcctcacacgacgtggctgtctccacagaggtcagggagtttgccattgttsccctgcatgcggccccgggggacgcagtagccgagatcgacgctctctatgacgtctacctggatgtccaagagaaatggggcttggaggtgaggccctcccaggggcagtgggcaccagcggcctccgcatgtcccagggccacaggcagcgtttcctggtaggacgtcatgttgatgggcgacttcaatgcrggctgcagctatgtgagaccctcccagtggtcatccatccgcctrtggacaagccccaccttccagtggctgatcyccgacagcgctgacaccacagctacacccacgcactgtgcctatgacaggtgagcagggcctcgcgcttagggcagactgagggcacctccaagggcagccgtgactcataggtcbggcttcagaagcctcaaagcctttgaacactcacccaactgagcttcagttgatccactacagggaacagaataacaagagccacgatttttaggttttttcggaaaagcacatctggggataagaggagaggcagacacctaggctgtcatgtggtttccacattgaggggcacagaccagggtgtgcagttttgggcacccacagacctgcactggcaggtcccagggctcttagtttagttcctgcgggtgctgagccaggcccatgtgtgaaaggggaacctactttctcttcccaacacccatcaggatcgtggttgcagggatgctgctccraggcgccgttgttcccgactcggctcttccctttaacttccaggctgcctatggcctgagtgaccaactggtatgtgtcctcccttgcacagccacatgaggatgggacacaggagctcaggtaggctcagcccagaccctgtgcccacttgcctgcaggcccaagccatcagtgaccactatccagtggaggtgatgctgaagtgagcagcccctccccacascagttgaactgcaggaagagaggacccatcctgccacaggacccagaaaaaaagcccaacacacactcgggttaagaaatacctttaaatttaggtaaataaagctcaaggaggtggggctgtcatctgtggtgtcagtccttctggccccctggctgtcagtgtcgctccagggccttgacaagcagctcattcaagyggcccaccatggccctagggtcrtcaacaagtccagcagcaatcatggcgttctcgtatatctgaaaggcaagaggagaaacccattatgaggggcatggggcaccttttcatttttttttttttgagacagagtctcactgttgccgaggctggagtgcagaggcacgatctcggctcactgcaacctcaggtgatccccccgcctcccaaagtgctgggattacaggcgtgagccaccacgcctggccatttttccgtttttaaaacagaatttggctgggcacggtggctcacgaggtcaggagattgagaccatcctggccaagatggtgaaaaccccatctctactaaaatacaaaattagccaggcgcatgcctgtagtcccagctactcgggaggctgaggcaggggaattgcttgaacccgggaggcagaggttgtagtgagccaagatcgcgccactgcactccagcctggcaacagagcaacactccatctcaaaaaacaaacaaacaaacaaaaagacaggattttagaggaaaccgctgttccaccctgaaggcaggctggcagggctggtagcctgggtccctgcagtcatcctaagctgctgcactcacctgatccaccagcagctgagccaggccaggctcgcttgcgcgcagctgattcagcttcttgatgagcgcgtgcctgcaacacagaacccaccagaaaaagcagctcagtaccacgtgctgtgaccctcccttcatgttttgggattatcaggatatttaaagaagcacagtaagactgtctgtagttttttaaataaggtatgttaatgatcatttatagataatatcattatatacccagaaaacccaagagaatcaggagtgtcagtattagaaaatgctgtaaggtagccaaactccaagattaatatacactaaagggacaaaaggagcttagtacgtgaagacatgccttggttcctagataaataataaaagagaagggagtaagacccacatgttgaaacatattatagggctctagtaaataaaacagtttaggtctggaaagggggaaggcaaacaactccatgtaacgagggtggacactgagtgtctgatgaggacagtatttcacagaagagggaggagacagatcactccatccagcagcactgggatgactgggagccatgcagaaaaccatttagaccagagtaaattccagagggatcaaagatgacaagcacaattctagggaagaaatgtttcatcatctcagaaggggaaagcctttccaagcaaaaccacaaaccaaaaagtaaagaatgattgacatatttgacgtcagaacaatatttttttctgcataggaaaaagcatcatgtagtatttaaccttaacatgaatattataatttttcacttagaagtctgataaaaccgagggctctggggaactgtaaatttgtacaacctctccagaggacaactggagtcgggaaaaccacatgtggatgatatgctgagactcagccattccatttcctaactgcatccctttaaacacttttttttttagatagatagatagatagatagatagatagactctcactccttcacccaagctagagtgaaatggcatgatcttggctcaccgcagcctcctggtttcaagaggttctcttgcctcagcctcccaagtaactgggattacaggcacccaccaccacccccagctagtttttgtatttttagtagagatgaggtctcgaactcctgacctcaagtgatccacccgcctaggcctcccaaaatgttgggattacaggcgtgaggcaccgcacccaacctaacagaggaaacacttcaaatgcacatcctcacatttctagtctacgtagctggaaaaaaaggacattyttaatatgctaatgtggaggtcacctagttaccctaagggagaaaagcaaggcaaggacccactgcacagcaagttcccccttggaagcccacgggcgcagctgcccacaaatgcacataatctctgcagaaatacaaaagccctaatgctggctgcactggggacacaggtaggaggaaattttcccctgtaagcagttttgaattctgaactatgtggacagaacaccaaattttaaaacaaatgaaagtgaagctggctgggcacagtggctctcgcctgtaatcccaccactttgggaggccaaggctgcagtgagctctgatggcgccactggtacactccagcctaggtgacagagcaagaccctgtctccaaaagtgaagtggcaacagacagaaacgagcacttctgcagctatctcacaaaactagtttgscaccaaaactagttaaagtgacctggtgtccgcctcactgagctgctccagcagaggcacaggcattctgcatactggcgctgctgtgcactgacagccataagccaagtcagcctttccccaggagtgccatggctaggaagatgcatctccctcgcctccagtataattttaaaagttatggttgtaaaatgacaaaagaaaaaaactagacatgtactaaagaacaaaacaaaaactggctgggggtggtagcccacacttgtaatcccagcacttcgggaggctaaggcaggtggattgtttgaggccaggaggtagaagttgcagtgagctgagattgccccactgcactccaacctgggggacagagtgagaccctgtctcaaaaattaaaatactacttaggctacattgtggggggggtggtaagtctatggattttgatttcctttttgctgttttctatttttggtaacwtgtttatgtaacttcattttttaaaaaattgctacattcaaaatttcccccaaaaaagaaacttcatatacaagttagttcatatacaagttagaaaatgaaattttaaaataccccataagacacatcaaagaataattctttaaaaatggtaccagaaccctacagagaatgtaaggtaccaaaggatgttaaagacctaaatagatcacattcatgggtgcaaagaagtgatactgtaaaaagaaagaaactcaaaagatacctaaaggcaggtgaaaagacatttacaacagataaagggcatataaagaacaacaggaagaaacgagggaaatcttacggctcagccactgtcagggctggggggttctcggtgcaccctggaagcagctcccaccaccggggccacagagaaacccacacaagccccagacacgtggacaagaatactcagagcagcctggctctccacaacttctgaccaagaaccaccggaggcccagcagagcagaacggagcagtctgctgtgccgaggtgggtttctgcagcggacattattcggctatgaaaatgaacttgtggcagcccctctgcatgggcaaccctcatgccaagtgagcaacgtgagacttcagcaaacaccaagatccacgtacaaagctcaaaacaggcaaaactgagcatgtccaggacacgcacaggtggcaaagccataaagcaaaacgaggacatggtcacaggctgggatgtggctaacctcccaggtgacacctggggatggtaaggggctggccaggttccatttcacatgggtgcagcctaaactgcatacagctccttatagttacccacatgtccacaggcctcacgcacttttcttctgtgtcacattccacaacaaaagaacaccacacacaggattctggggaatcccacaggctggaagagccaggagcgtggcctcacctggggttgatctccagcgtgggctgcaggagctgtgcgcgctcctcctgggtcttggccagctgctgcatgcgcaggaagtggcgggcagcccccatctccagcacggtgaccatggcagggtgggtgtccagtcggagggtcacctgtgagcaaagcccggggttgagggtgatagaggttcccaatgtgagagggctggcaggatcttaccaggggtgaaggtcacccagaccacgaggtagcaggcggggtctcaaggactcccctggaccagcgctgctccctccccattacccactaacttgtgggccctgagctgatgccccacgcaaagatactgtgcccgaggggctccaccaccctggtgccccgctgctgcctccaggagctgcccgaatccatcgtcctctgctccatgccagcccaccctgcatgaggccccttcctccaagtgaccatgcatgggacgctcatttctcactctgagctagacaggttggtggggggagtcttagctctctgaagcccacccaaaacccccgactaagcacccaagtgagcatgtgagctcctgagggctggggtagcatgtcccttgtttggaacccccacgtcctcagccattgcagctcccactcaggatgctggtttttcagttctcagttcacacctgctctggagcagggctgggagaaagacacggccttcctgcctcagcggcactcccgagcaacacgtgccgagcagggacccacagggtctccacctgacaccaagggcttctgctgctgctggaaggacacccaacgggccaggtactgggagccaccagctggccagcctgttagggacactgcggccaagtggtggtccatccccgggaaagcctcaccttcacgttggtgacacgcgaccccagcacatttctcatccaggccatgagctcctccgtctccttctctgataggcactcggcggctgcggaagagcaggcgacagggagctcaggcctgcatcccaactccccggcttccatgggggccacgcagcatgcttccagctcccacctcctctcccaccaggatggagacacaagctagcaagatgcttttcatctaaaagtaaaacctcaaaggatgcttcaggttgcctgaggcccatacaacttggttagggctttaaaaaaatacacagcctctcaagaagctgggccagctccagaagccaccgtggcaggagcactggacagacccctgatatctaaaccaggaggcaccttcctccagtcaccagggtgctcccacaaggctcttctcgggggtggctgagcccaggtcaactgacgaaaacccaaaggaagccctcgctgcggggcaggagaggcgtgcggggagtggaaaccagccccacgcctagagagcaggggatgccgacctggggacctgtcctcaaacttctcctccttgtagtgatccacgactatgtccgtctccacagagatcagcttcttcttgtcaaactcacgaaggtgcagcagggtgagctcatcaaactgctcaaagcagaagagaacctgcaggtggccaagagcagctccatcagaccccgggggcctccagccaccacagaagaaaggatgagggcggcaggagggctgggggagccaagcgggccacactggggaacaccggggcagttggggttcctaggcctgcatgacagttactacgacacctgggtctaaggaaggctctgactgccttcaaggcagaagcactccacgcataaagaaatccacatgtggctgagtgcagtggctcacgcctgtaatcccagcactttgggaggccaaagcaggcagatcatgaggtcaggagttcgagaccaacatggtgaaatgccgtctctattaaaaatacaaaaatttgctgggtgtggtggtgtgcacctgtagtcccagctactcaggaggctgaggcaggagaatgacctgaacccaggaggcggaagttgcagtgagccgagatcgcaccactgcactctagcctgggcgagagagcaagactccatctcaaaaaaacaaaaaacaaacaaaaaaaaccaca

SEQ ID NO: 93601 - DNA, 164786 bp, Homo sapiens
acctgtaatcccagcactttgggaggcggagacaggtggatcacttgaagtcaggagtttgagaccagcctggccaacatggtgaaaccttgtctctactaaaaatacaaaaattagctgggtgtgtgggcgcatgcctatattcccagctacttggagactgaggcaggagaatttcttgaaacctttttttttttttttttttgaggtggagtctctgtcgcccaggctggagtgcagtggcgagatctcggctcattgcaagctccgcctcctggttgaacccattaaaaaaaaataaaaatatattaatataactcccatatgcagtcattcaatgaatttgtattggcctctaaactgggcatggctggatgtagaatctatggatgtggctagatggaatacacctggttatggaggcacctgcaggtattttggtgatcttctccaaaggatcttttgctttgctgagacgcctgatcttcctgtcaatgtgaaggtagctgctggaggcttgtgaacagcagtcaatggtagagaaaaaatgtgggtaaaggccaagcgtgtggctcacatctataatcccagcactttgggaggccgaggcaggaggatcacttgaggtcaggagttcaagaccagcctggccaacatggtgaaaccctgcctctactaaaaatacaaaaattagctgggtgtggtggcatatgctcatagtctcagctacttgggaggctgaggcaggacaattgcctgaacctgggaaatggaagttgcagtgagctgagatcatgctactacactctagcctgggtgacagagtgagactccatctcaaaaaaaaaaaaaaaaaaaaaaaaaaaaagcaggtacgttcctacaaactcaccctcatcagttgaaagagaaaaagactcaaagcttgtaactgcagttttggacgcatgatcaggcaatagcagggaatcccatcttccagcagatggttctccaagattgtggtccacctgacaaatgaaatcacgtaggcactgccgagtcctcaggggccggtgtgatgagaatggctacaactcaatcattatgcaacttatctcaaagcctgtcatggttgccacccagtctgacctctgatatcctggagccaaggtcctcacccatcatgtgaatttgcatgtgagggagggtgaggaggagacactgaggcaggcaaggcattctgcaagcttttgcagagttttcatggacacattctgattcccactgtgtccaggtgggagttctgtacacatcacagatggaaaaaagaaactctctgtggatttggcagcaccctggattggatgtttgaagaaagctattgcatctgccccgtatcttctgtgaatcgggtacctttatgcttctgggaggtcaagaagaacccagaaccctccagtgacttccctttgggtcttggcattatgagaagatggttaacctcctttatagaactctccttcacatccaatccttcagaaagcctaattgatcccatcttcttaacccaacccctcccctggacatcgttcctaagccccttaaagaaacagatggcggctgggcacggtggctcacgcctgtaatcccagcacttttgggaggccaaggcatgtgaatcatgaggtcaggagttcgagaccagcctggccaatatggtgaaaccctgtctctactaaaaatacaaaaatcagctgggcatggtggtaatcccagctccactggaggctgaggtaggagaattgcttgaaccccgggaggcaaaggttgcagtgatccgagatcgcaccattgcactctagtctgggtgacaaagcgagactccgtctcaaaaaaaaaaaaaaaagaaaagaaaagatacggatggcatatccttgtacctccagggcctgacacacacagccccagtgctggcaccacagccccagtcccccggggttgatggcatgattcactccctgacctggagactggggaggcttgtcagcttataggtttccacagcaggcaatgtggccgaattgcttccagagaagtagggaggtgagtatgatcattacttgtgtctaaaaatccgacgtgactaacttacaaacacataagttaccacaaatgatttagggaggaggaaagaagtgcagacaggcaagctttcagatcgtttcaggaaaccaggaagcrgggagcacagtgttgcagccagcaagggaagacggaagctatgagtcctggctctgagggcctcccatccagttgggctgatggatgagacaggtacagtctgtgctgggccatcgtgaggcttgcagagggtagtgccagggtcacacaaggcgtcatggcctcagaattctgagacctggttttccatctgaactcatcacccttagtgggagacctagggtgcgtttctcttcaatcctgggtttcacctctctaaacaagggacaatagtatctacctcagagggttgtggcaatgaccaaatgtgtcacaggtgaaaatgtccagtagtttctggcatttatgacgtgttcggtcaatgttagttcactattgttatcccatttactaagcgaatgcatgtgacacaccatgcgtttctgaacctcgtatgtgagagtgcctggcatagaattgatgttcattaaaggtttattttttaaatttttagataaacttattttgaaatagttttagacttgaagagttgcagaaatactagcgagtttccctgtatcctacatccagcttcccctaattttttttyccccaagatggagtcttgctctgttgcccaggctggagtgcagtggcatgatctcggttcactgcaaactccgtctcctgaattcaagtgattcttgtgcctcagcctcctgagtagctgggattacaggcgcacaccaccatgcccaactaatttctgtatttttagtagagacgggggtttcaccatgctggccaggctggtcttgaactcctaacctcaggtggtctgtctgcctcagcctcccaaagtgctgggattacaggtgtgagccactgcacagggcccagcttcccctaaaaatgttaacgtcttacctaaccatagtaagaggatcagaaccaggaaattgcagatcttatgtgaattttgcccgctctcctgctactgtcctttcctgttccatgttcccaaccagcatcccatgttccatttagttgttgtatctatccccttagggacgattcctagattgtgacagtttctcagtctttgtctttcatgacccaaagtgtccaaggacacttttgatgggtactggttaatcactttgtagaacaggtctcaatctgggtttgtctggtgttttcttgcgattggattgagattacacacttctgcaggaataccaccacaatatgttgcttttagttttttcctcctttattgtggtaaaatacactcaacataacatttaccatttaaaccactttattttattttattattattttttgagatggagtttcactcttgttgcccaggctggagtgcaatggtgcgaactcagctcaccacaacctccgcctcccgggttcaagcaattctcctgcctcggcctctcgagtagctgggattacaggcatgtgccaccacgtccggctaatttttgtatttttagtagagatggggtttctccgtgttggtcaggctggtctcgaactcccgacctcaggtgatccgcccacctcggcctcccaaagtgctgggattacaggcgtgagccaccgctcccggcctaaaccactttaaagtgtatgattcaagggcagtatgtagattcatcctgttggatcatttctagactttttcatcatcctaaaacgaaaccccaagctgcttatcttcctcccctagcacctggcaacctccaatctgtgtcgcctctacggatttgccaattcgagacatttcatctggatggaatcatacgctatgtggccttttttgtttggcttctttcactagcataacgtttcccgggttcctccacactgcagcatgcatcggtgctccattcctttttgtagccgaataatattccattgcatggacagatcacattttacttttattttctaattcaacagtgagacctggtgtgggccccggcgctgggcctgggaggcgagggaggggatggaagagagccccgtgactggcaggaggcactgtggagtgtggggagaaggggtcgggatctgcatgctagagagaataggattttatttacacgtggcaatgtttatggaggccaatgcacaactgccattatgggacgcggactcctttgaaagtctcatttgtgtaaaaggaaaagcagtagttcatgaggagggggagaagggctcaaggacagcaaggtaaactacccctggggcrggggaacgtggtcgtcggtgggcccagctttggaggctaggcccgtgaaggtcgccccgtgagcaggtccagggcaggccgagtgccccggggcccgcattcattgcttacagagcaaggggagcctcccgggagggaaatccaacggttggaaacttcgatttatcccaaaggcgtgccgagtgggaaggcaacattttgatttcccaaacgttgcggccagcggcttcttccacggcaggcgccttcaggtctctccgcagggtcgggaccccgggcggcgcgcggcctctgggacgccgagggaggccgggcccacagcgcccggagcgcggacagcggccacagcccgccgcctagaagcggcgccgcccggggcggrgggcggagccgagcgcgcgccccgccccgccccgccccgccccgcagccccagcccagcgcgcgcaccaaggcggggcggcgcgcgggcccgtgcgcgtgtccggggccaggaggcggtggcggcgagcgcgggccgcgcgtgcgcgctgcggctgggcgaggggcggcgcgggcgcgcgtctgtcagtgacagcgggcggggcaggggccggagatggtggcggcggcagctcttccgacatgaggcagcggccgcgggggacacggcggcgggcgcggcggcggccgcatctctagctcggggaggcggcccccggcgtgggcgcgggcgggcgggcgtcccggccggcgtcgcgggagcccggctctgcggcagcgtctgcaccgccgcccggcgaggggcccgcgtccgtggttccacgcgctcggtcccgggacagctgcggccgcggcgggagcggcggcgcactcggggggaagcaggccccactagacgggccgcgccgacgggctccgcgcactcgcagcccggggcgcccccacccccagcgcccgccgccgcgggcagggccggcccggagcgcggggggcggccggggagcgcgagccgggggcgcccgccgaagctcgctgctccgggtcggggtccgggcccggggccggccgcgcgccgcctttgacgcatcggagcgcggctcctgcaggatggagggctccgcgccgccagcggagttgtttgtgcgcaggcggctcgcggggctgggagcgctcaaggtctgaacttccctccggagccgcagctggaggaggcgagcgcgcgaggaggagaagccgcgcggcgcggaggccaccctcggggcgagaggcgcggaaggcgagcgagcaaagcggtcccggagccacggcggccacgcggcggggacccccgggcgttctaggtccgtcccgagcggttctcgtgcgcctcgaaggtgggggcggtgggggcggtgggagcaccgctgagccgggaaccacaggaacagatggtgcctgtccaggtcgcgtgctggagccgccccttaggacaggagcaggtcccgggcctctaggcrtgcatgcctaggtgggagcgccgctaactctccccgttttgctggcaggtactggtgaccccggccggggcaggccccgggactcgacaacatggcttccccrccccaccagcagctgctgcatcaccacagcaccgaggtgagctgcgactccagcggggacagcaacagcgtgcgcgtcaagatcaaccccaagcagctgtcctccaacagccaccccaagcactgcaaatacagcatmtcctctagctgcagcagmtctggggactccgggggcgtcccccggcgagtgggcggcggaggccggmtgcgcaggcagaagaagctgccccagctgttcgagagggcctccagccgctggtgggaccccaagttcgactcggtgaacctggaggaggcctgcctggagcgctgcttcccgcagacccagcgccggttccggtatgcgctcttctacatcggcttcgcctgccttctgtggagcatctattttgcggtccacatgagatccagactgatcgtcatggtcgcccccgcgctgtgcttcytcctggtgtgtgtgggcttctttctgtttacyttcaccaagctgtacgcccggcattacgcgtggacctcgctggctctcaccctgctggtgttcgccctgaccctggctgcgcagttccaggtcttgacgcctgtctcaggacgcggcgacagctccaaccttacggccacagcccggcccacagatacttgcttatctcaagtggggagcttctccatgtgcatcgaagtgctctttttgctctatrccgtcatgcacttacctttgtacctgagtttgtgtctgggggtggcctactctgtccttttcgagacctttggctaccatttccgggatgaagcctgcttcccctcgcccggagccggggccctgcactgggagctgctgagcagggggctgctccacggctgcatccacgccatcggggtccacctgttcgtcatgtcccaggtgaggtccaggagcaccttcctcaaggtggggcaatccattatgcacgggaaggacctggaagtggaaaaagccctcaaagagaggatgattcattccgtgatgccaagaatcatagccgatgacttaatgaagcagggagatgaggagagtgagaattctgtcaagagrcatgccacctcgagccccaagaacagraagaaaaagtcttccatccaaaaagctcctatagccttccgcccttttaagatgcagcagatcgaagaagtcagtattttatttgcagatatcgtgggcttcaccaagatgagtgccaacaagtctgcccacgccctggtgggtctcctgaacgatctgttcggtcgcttcgaccgcctgtgtgaggagaccaagtgtgagaaaatcagcaccctgggagactgttactactgcgtggcgggctgtcccgagccccgggccgaccatgcctactgctgcatcgagatgggcctgggcatgatcaaggccatcgagcagttctgccaggagaagaaggagatggtgaacatgagagtcggggtgcacacgggcaccgtcctttgcggcatcctgggcatgaggaggtttaaatttgacgtgtggtccaacgatgtgaacctggccaatctcatggagcagctgggagtggccggcaaagttcacatttctgaggccaccgcaaaatacttagatgaccggtacgaaatggaagatgggaaagttattgaacggctgggccagagcgtggttgctgaccagttgaaaggtatgtgcactgctttacctcggcatcccccctccctgatcctgattgtattaaattaaaaaaaaaagcttccagcctcagtgtctgcagacagctcaggtatctcagaatgccttaccatggggggatctcagggtcagtgtgacttttctttcagcgggtcaaatatcacagatctgttcacactgcagaaagggacgctgtgcagagatgacctagacgcgacctttagaaggaaggagaactttgaacgtgcataaccactggttggctgaaatgtgggggcacgtccggtgaatgtaagggtatggagcccttcagcattcagcactgtttagcacttaaggaaattgcctttgcattcatttggtcaccctgaagtcccatccaaatgtttctctctgccctttttgcgaaaacgtggagaataaaatctttctcctctctaggcctcactttgcttatcctcaaaatagggataggaagtcggcgcagtcctgcaggtctctggagaattagacggagttacttacctctgagtacacactgtcttttatctaggtcttttttttttttaaaaaaaagtttgcattttcagctttcagccatcatttgtttaaggatattttattatcatagtatttgccttaagtgaagagcttcatattgagcttctccagccaccaggtgatttggaagggagaaacgtacctgccggagagctggtattcccctccctcatcctctcaggtttggatctggtgcctggtccctggtttgaagctccttactgctattcttgatgtttttactgggctgcttgttttttctaatataggacaaaagtctttgagatctggaaaatgatattaaaataagtaggacgaaaaagaaagattttaagtaatctgctacatttcttcccccacttcctcctttttaaacagtccttatgttttactaaaatcttcaggattgaggggaacatctrttgtggaagtatgtagagaaaataacactgattttttttaaaagcctgcttttgtgaagctgtattgtattttgtggtccccacacactgcatacttaaacagttaaaagcctcaggaaagggaatcctcggaagaagtaattaatagttccaatcagagatggcagaagtaatagtttcaatcagagacggcagaagtaatagtgtcagtcagagacgtccagtggttgaggtagggcctgcataggtcgttggtgtgagatcatcctatgtgtccagttggcattctctttctctggcttgtgatctgagctcctgtatcttttatgtatttgttctctggcaagggaacatcatctttcttctgatttttctttattttactaactttgctgttgaagattttatggatgtagacgaaaactattttcacccgagaattcccctaacctagagcactttaaggactatgttaacaaggtcagaaactacactttctgttcacttgaaagatgctgccgtgatgagtgtctttccgtttagggcggtggcactcgctcttgagtctgaaggtstcagtggacggggctgtgggtgtaaccccctgcttgccaccttggcatttttagggcccaggtgttgtgagctctgtccttggagactgtgggacggtggagctgggcggcagtacgttaaattaaatatgttggcccasaggacaatgagaacgttttgtaagctgtactttgtatgctgtattactcgaatttcaaaaatgaagagggtgtaattattaaatatgtttggaaattgccaagtcattgaatacctattttgtgaatttatgagtagttttatttttaagtttgtagatcaggggtctcagacacagagccaaaaaaaaaaaatgctagagtgagtttgtgtttttttttttttaaacctcaaatagtgtaaatttggtaarttaacttttcttgacatttgtgtacattgtatatttataaaagttttagtactgtagggagtagggaagatagaaggcttagcttagctgctgattttttaaaagtgatattctttcctttagctctttctctgagaccacgattttgttttcttgagctcattttacaaacctttgtggataggactccaggaatagagtatgtctacacaacttcctggcccttttggaaactgtccttacaaagctaaattgagatgacagcacagtttgtagaagaccctttcacacacatagttaagcttatctacatgtaagatcgattttagcctctgcctttgggctggtggcagatgttttctctatacaatattgggtattacgggaggctgaggcaggagaattgtttgaacccgggaagagaaggttgtagtgagccgaggctgcgccactgcacaccagcctgggcgacagagcaactctgtcttaaaaaacaacaacaacaaaaacaaaaaaaaccccaatactgggtgtattagcctttccctcttacccccttttctgatcccagggttaaaaagcagccagtagcggccctgcaggaatgggcatccatagaatgagaaggggcttctagaactagcctgggagcacagaaggaagctcctctcattcaaatttatccgaacaggctttgcagaagggtagtttcatgatttctgcacattccttcactctgaaatctgtgtcgtgcccctggcactgactgtgcmcctggcactgtggatgtggagcaggatccgtgatcgtggagcaggatccgtgatcgtgaggtaggaggtgggactcgactccagaggcggggttcagatgccagaccgaattgaggactagctgatacagggatggggcagaagcagcgttctgcaaggcacgcccaccagtgtgccttgttagtttactgtcgccatggccacacccggagttactgcctctttccatggccgtgacctgacaacccaaaagccaccacccttttcctagaagtgtctgcctaagcctacctttactctacaggaaattaaaagtaggtataaggtaaggctgggcgcagtggctcatgcctgtaatcccagcactttgggaggccaaggcgggtggatcacctgtggtcatgagttggagaccagtgtggccaatatagtgaaaccccgtctctactaaaaatacaaaaattagcctggtgtggtggtgcgcgcctgtaatcccaggtgctcgggaggctgaggcagaagaatcgcttgaacccaggaggtggaggttgcagtgagctgtgatcatgtccactgcactccagcctgggcgacagcctaggcgagactgcgtctcaaaaaaaaaaaaaaaaaaaaaaaaaagtaggtataagtatgattgcaaaactgccctgagctgctactttccgcctttgggaaagcccagctctgcaggagcagtcatggagccgtataacactgcctgcctcttcaataaaggtgttttctttcctgccaccggctcacccttgaattatttcctgggcaaagccaagaaccctcttgggctcggccccactttggggcgcgtctgacctgcgttaatagttcccaacctccgtgagctcacagttaaaaatgttgtggagtatgttcgggagtggggagcgctttagagggggctcctgctggagctgggtcctgagatcaggctgtggctctccaggtggacagaagagcaccagggcagagcggagaggtgggtatggctgggccctgtgcttctctgtgggggcggacgattgttagttgttcatcaggacaaggaaggccatgggtagcgtgggaaggagtttgcatttgaccccataggtgtcagggaaccactcaacagggggcttaggtgatctgacttgcagttttagaaagttcactctttcagagctagtgagtgtgggttggaaagagattaatgaggtgtcgagtaaatcccaggtaggggtgatggtggcccaatccaaagttacagtagcagtgatggaggtgatgggatctgagtggcattaggaagagcagcttgatgggactgcaagccagatttaaacaaacgactggcaggaggggaagggcttgaccatgtgaatgggaaatggcattttaagtttctggaagtgacttggcgacaatgtggagtcaggaatgggtgaggggcctttgaagttgctatggtatgaatggagaatgcaggatggacttgcagagtacagaggcccggaacccctggcttgcttactcattcagcaaatcatttactccgtgccaggcacggttctgggttctggcaatacagccgtaaacaaaacagacaacaattcctgctcttgtaataggggacaagaatttttaagtcaataatataggaggatcgctggagcccacgaggtcgaggttgcagagagccgtgattgcaccactgcattccagcctgggcgacagagtgagaccctgtctctaagaaacaaaaaccaggccttcaaataggggagatctaatagaggggacaacaggggagtcaaaccataaataagtaaaatagaaaaagtgttttgtgaacaaacataaagcaggaaggggatacagcagatggggtgtacgagtgtgagaaatcttatctagggtggccagtcactgggagaaggttgcaggaatttttagcatactgctaggattttggaaataatctaaaaagtgaggggccaggcatggtggctcatgcctgtaatctcaacactttgggaggccgaggtaggcggatcacctgaggtcaggagtttgagaccagcctggccaacgtggtgaaaccccatatttactaaaaatacaaaaattaaccaggtgtggtggcaggtacctgtaatcccagctactcgggatgctgaggcaggagaattgcttgaacctgggagacggaggttgcagtgagccaagattgcaccattgcactccagcctgggcgacaagaatgagaccctgtctcaaaaaaaaaaaaaaaaagtgtgagggacagttattaaagatatggagaaatgggccgggcgtggtggctcatgcctgtaatcccagcactttgggagaccgaggtgggcagatcaggaggtcaggagtttgagaccagcctgaccaacatggtgaaaccctgtctctactgaaaatgcaaaaattggctgggtgtggtcgcaggcgcctttagtcccagccacttgggaagctgaggcaggagaatcgttcgaacccaggaggtggagtttgcagtgagccgagatcgtgccattgcactccagcctgggcgatagggcgagactttgtcgccaaaaaaaaaaaaaaaaaaaaaaaaaaatgaagaaacggtctgattaaggtgagggaccttccacagcatttgggatgaaaccgctaggcctgagggaaccgtggctgttgtattctgccttgggccacaagcaaaaaatggtgagacgtgttatctcgagctgttggcttttcctgtcatagatacagggtcacaaagacagaaaatgaaactgttagaaaatatctacaggcatcttcttttcccgtgtaaatattaggaagacagaatgaagatgctcctccgctctcatccacacccatggtcatatctctgaagaggggaataccagggagtgatcacattgtcagatgcagaaattaaaaaagcttttttccccagccaaactttatgcttgtggagcaacttggggaggagacccgctggtatgcatttgggcagattgtcacctgttggccacctctgtgatcgagacctttgccttagaggagttcctatgtagaccctgtctggtgggccgacagaccgacagtggacggaggcattctgtatgcgttagcctctgcaaacaaacacctgtctcatgccggaaatctgggcgccccattaaccctgagcacgggcctgccagctgacagaaccctagccaggtgttggtttggggttcagttgcatgctcaggtgttccccttycttcccccgttagcttgtccccacctaagcctgcaacccttgccactgggatgctaacccgttagcagagctcagtctccttgcttggaaattctgtgttgacctgcactgcattcttttttttttttttttgagacagagtctggctgtgtcacccaggctggaatgccatggcgtgatctcagcttactgcaacctctgcctcccaggttcaagcggttctcctgcctcagcctcccaaatagctgggattacaggtgtgcgccaccacgcccggctaatttttgtatttttagtagagatggggtttcaccatgtaggccaggccggtcttgaactcctgacctcaggtgatccaccagcctcagcctcccaaagggctgggattacaggcgtgagccaccacgcccagccttgacctgcattcttgagcaggatctgttatgcacgtggaaatacagcctctcagatagcaaatggcagagatgagatgaggcacacagttcccctccacagctggggtgggagacagaaaacagcagtagagtygacactcaagctgcccccagtgaccatttgttcaggctctttgagacctggcttacagtgacaaggacacagctgttaattctgaagacaagctttcgagtagaagtaacctctggtaaagcaagagaaggttaaggtttgctgaattgccaatgggatgaagaaggaagggagggctgtcttttcaggtagaatgcctaaggaagggaaacatggagaaggaacaattagagcaagtcaagaagtttcaagatttttgtcttctggccagcttggtkagatagtaattatgtttctgcatattggtcagcgttgcctatgtactttgctgtggaatagtaatcttggaaaaaaaccaaccaaccaacccacattaatctgtccatgtctgggcacagagtgtgcagaagcctgcgtgggccgtaagtctcgtctttgtcttggttggtgattttagtattggtgtttttgctggaattccaaaactgtaagagtgtaatcattcaccattagaattctgcaggtcccctcctgactctggactagctgagcttaggggcctgtcatccatctggccctgggcatatcatttgtactttgcctgtgacacacctcaagaccttttccaacaggaactagcatccctggagggaattttgtgaagagatgagagtttttgaaacaggaagggaactggcaagggaagtggccrggcaccggtgctgccgcggaacagaagggaagggactgggctgcatcagagggtggatgtggggccgccatccgtggtgtgggccaagggtagggtggtcctcccctgggaagactgcagacagcagtgatattcttgtagtcttgtggatgtacccagtgaaccacaccagccaagccaacccgtggctaaattttagtcaacttcagcgaagaagactgccccttgtaaaacttgtctgctcttggaaatcaggttttttgtctcattttccccagcctttgctagcattgcacttgtaaaaaattcctggcatcctttctgcggagttaagtgggaaggctcaatgttctgggataggtgggaacatcaaacccgctagaggctgctggtggcagtggaggcagaatgagttgtagcagtagtggtggcagtagtgtgacctagagggcagaagctgggaaacagggtgaaatgctgggccccgacagtcagggatagctgcacctagcttatatgccttcctctaatccagtagaaattgttgtttctgtaggttttttttcttttctttttgagacagggtcttcctctgttgcccaggctggagtacagtgtgcagtcacagttcactgcagcctcgacctcctgcactcagatgatccttccatgtcagcctcttcagtagctaggacacaggcgcatgccaccacatccaactaattttttttttttttttttttgagacggagtctcactcttgcccaggctggagagcagtggtgtgatcttaacttactgcaacctctgcctcctgggtgcaaggaattctcgtgtctcagtctcccgtgtggctgggattacagatgcatgccaccatgcccggccaatttttttttttttgtatttttagtagaaatggtgtttgaccatgttggccaggctggtgtcaaaatcttggcctcaagtgatctgcccgcctcagcctctcaaagtgctgggrttataggtgtgagccaccatgcccggcctaattttaaaaattatttgtagagatgacgtctccctatgtttcccaggcttatgtgcattatttatataggttgtctattgatatttacagtattagaaattgaaacaaactgagaagcttaaaaatcttttctaaatttatttcaaaatagtaattcatttcacccattgcatgttaatgtaagtaacatttttataaaagtaactatattttgtaaaatgaaaaaatttgatgagaagggtggcactgccatacatttttgcaaatctctttaatgtctggattaataaacggttgaagttttttgttttttttttggtggattttttccctcttgttgcccacattggagtgcagtggcacgatctcggcttactgcaacctctgcctcctgggttcaagcgattctcctgcctcagcctctcgagtagctgggattacaggcacgcaccaccacacccggctaattttttgtatttttagtagaaacagggtttcagcatgttagccactgcgcccgacccacggctgaggttytttgagtgataaaatgtacacaacagaaatctaccgtgttaaaacacttttaagtgtgttcgctgaattttcttaaccgctttggcattcaatttgttgcaatatgttgaaaaatgtgtagaaaatctggctttagttggaagagcattttcatagcctttttatgtgattctggatatttttctttgattctgtagaaacattcaacaagtgagtagtagtttctttttctttttctgagatggggtcctactctgtcacccaggctggagtgcagtggtgctaccatagctcactccagccttgacctcctgkgctcaagtgatccttctgccttggcctaccaagtagctgggactacaggcatgcaccaccacaccccgctgattttttattttgagtggtagtttcttaaatgttagttgcaatatggaatctgaaattttattatctttttttgtacactattatattaaatgctgttgggtttttacccaggtgtgattttataacgtcatgcactagtcatttggaaaatattggtctcttgaatgatgcagctcttccacatgttgacgtcagtaaagtctaatagtctgaagatgttgagttcatcacagtggctgatgtaagttttccaaaactctacttgaaaactggaattttttatcattggcggcaaatactgtcagttattttccttgaagcgacagactcattcatattcccaggaatggtctgcccgtactcaagcctgaacgaccgtggtttgtctgtaggtcacgtgtaaataatgtgctaccaaaaaggtggccagttcagcttgcaatccaaacagctgcacagctgcttttctccaggaccgctgtgctttgatgggcagcagcgtcgtcgtaggcgtgcttctcatttcatcactcagactattcagaagacacctactcaagcttgcgatttaaccaatcattcatgttgacagcttcatctgggacattcttttttttcttttttctgtttttgtgacagagtctcgctctgtcgcccgggctggagtgcagtggtgtgatcttggctcactgcaacctccgcctcctgggttcaagtgattctcctgcctcagcctcccaagtagctgggatttacagatgtgtgccaccacgcccggctaatttttgtctttatggtagagacggggtttcgccatattggccaggctggtcttgaactcctgacctcaggtgatctccctacctcggcctcacaaaatgctgggattacaggcgtgagccactatgcccggcccatcagggacattcttaagtgaagctgtctgcctttcctttcgtaagtgtggggtagtgaaggacaagctgagggctagtgcagtttggtttccctgcatcgggacctgctcaggcactagcagtttcacccatggcttcttctgcactgtcactgcaartgtcaacactgaagaaggcaaatgctgtcttagtgtcattgtgcaaatagtttagactccacagatgccttgcaaaggcctcaaggacctctagggatctgcggatcacactttgagtactgcttcgctagctgggctgcaagatgggaagactgagggttttgtatgtgccacccaaacacgcattctcatgtgtgtgaaacaacgccaattggagttgtcacacccattacatrttgcctgtggaaatagcaagtgaccttagttcatacattgaccttttcttacaaaatccttaaaaatcttttgtgattctggtaaatctttgttgctcatgttcaaagtgtgtgataaagaccatcaacttcgagctggccatggctcgtgcctgtaataccagcgctttgggaggccgaggtgggtggatcacctgaggtcaagagttggagaccagcctggccaacacggtgaagctccgtctctcctaaaaatactataattagccaggcgtggtggtgggcacctgtaatcccagctactcaggaggttgaggcaggagaatcacttgaacctgggaggcggaggctgcagtgagccgagatggcaccactgcattccagcctgggcgacagagcgagactctgcctcaaaaaacaaacacatggctgggygcagtgagtcacgcctgtaatcccagtactttgggaggccgaggcgggcggatcacctgaggtcgggagttcgagaccagcctgaccaacatggagaaaccccgtctctactaaaaacacaaaattagccaggcatggtggcacatgcctgtggtcccagctactcgggcggctgaggtaggagaattgcttgaatccaggaggcggaggttgcggtgagctgagatcatgccactgctctctagcctgggcaacaagagcgaaactccatctcaaaaacaaacaaacaaacaaagaaacaaccatcaactttgtttctgtaaattttttttggaagggctcacccttgaatggttgggtgcttggattttgatttctgatacattcgggcttaattctsggttgtatggtttcctaactgtgggactttgggcaagctacctaggggcgctgcaatttataggaatgatggtgtctctgtcagagggtcgttgggagaatcaactgggataatgcaagaaaagcacktatttgcatagtgactcgatggtggacagccattccatcaataactaacgctccccgctggctgagtcacatttcgtattgcactaaagggtgtttctttcttcctgcgctcaatctggcgcacatcttgtgtcgttcagtaccgaaacctagaacacactagggactgtgattgtgtcagtttctcgtamtaaaaagggcaagtgtccaaaatacaaaatactgatagctcgccctggttaaactctagctgccgaacttggcagcctctttactgaaaaccctcgggggttcagcaggctcgttcctaggctgcttcagttccccagagcctggaggttcttaagatgatgggcccctcgatggttgaggaattataagcagatcttcagctgtgcaactccagctattggccgtggtttgaactagagtggtttttttcaactgtactgtatcctactgtaaactcatttgtttattcattaaatattgaatgggttcctaccattggcaaggcgaggactaggttctggagatagaggggtggcccctgccctcttggggcatgacgcctagaaagggaagtagacagtgatcaaatartctgtacaggccaggtgcagtggtcatgtctataatcccagcactttggaaggccaaggtaggaggatcgcttgagtccaggagctcgagaccagtctgggcaacatagtgagaccctgtctctaaaaataataaataattagccgtgcatggtggcatgtgcctgtattccaagctacttggcagactgagatgggaggatcgtttgagcccaggtggtcgaggctgcagtgagctgtgattgcaccactgtactcagcctgggtgacagagcaagactctgtctcaaaaaaaaaaaaaaaaaatcacctgaacaaatattgtactagacttcctgactgtattacagatagggttgagatgatctctattttatagatgagaagactgaagcacagagaggttaggtaacttgtgatgatcacacagccagaaagggatactaaatggtggagccagtatttaaacccaaaggctgtattagaaaacactagtacccatctcacagaattgctgcgaggattaaatgagaaaatacaagttcttagaaaagttcttggcacataatacctgtcagtagagaagagctagtgttactgaaagttggaataattttcttagcagtggcagcaacagccaaaacaacgatacctgtctttagctctctgcatttaccctgctgtcatgtaccctgccctcacgtatcctgctgtctcagccactgtgaaatcctaggatcctgggagccgtgtgtgtttagatgcttttatttgcttggttctttccctttctataccatttacagactgagtttgtttttttcttttctttttttttttttttttgagacaagagtctcactcctttgcccaggttggagtgcagtggcataatctcggctcactgtagcttccacctgtatcagaccattctaacactgctataaagttgctacctgaggccaggtgcatggctcacgcytgtaatcccagcactttcggaggctgaggcgggcggatcacttgagctcaggagttcgagaccagcctgtccgacatggcaaaaccccstgtctactaaaaatacaaaaaattagccaggcgtggtggcatacgcctctaatttcagctacttgggaggctgaggcaggagaatcgctggaacctagaaggtggaggttgcagtgagcccagatcgcgccactgtactccagcctgggcaacagagtgagaccccatctcagaaacaaacaaacaaaaaagatgctacctgagactgagtaatttataaagaaagcaggtttaattggcacagttctgcatggctggggaggcgtcaggaaacttacaatcatggcagaagatgaaggagaaacaaggcgcatcttaaatggtgtcaggagagagagagagtgagagagagagcatgcgaagggggaactgccacttttaaaccatcaggtctcgtgagaactccctcactctcacgagaacagcatgggggaaaccacccccatgatctagtcccctcccaccaggtccctccctcgacacatggggattacaattcaagatgagatttgggtggggacacagagctaaactatatcaacctcccagggtcaagtgctcctcgtacctcagcctccctgtgactgcacatgtgcaccaccacgcccagctgattttttcaaatttttgagagagacagggtcttgccatgttgcctaggctggtctcaaactcctgggctcaagccatcctcctgccttggcctcccgaagtgttgggattacaggcgtgagccaaggcacccagctgagwtggtttcttaacgtcctccaaaggtgatttttttcaagaatcaatataaactcttggattttagcttatttgatgtatttcattccattacagatacatgatttttgatgctcagattgtcccatttggggcccatgggagcccctttaagttggctgctgagtcctcttcatgcaaccccagtggtctttgataactttcatacccttttagtaacctttttaaagagttgagaaattataggtattaaaatctcattaattctgtttgtctgatatgtttattcagagagactgagctaaagtttaccctcatcttttttgaaaagaaaatgaatagtatatgcatgtttctatgaggaaataatgccacccaagaaacggtttgtgcatcttcgagttccttggaagctttaatttgcattcctacaattgagagcaatrtagaatttctttctgtatcttcccactaatgcctgttgaggggcaggtgtctgtgaatgtaggtaaatcgtgataaaaaaacaataaaaaggccgggcgtggtggttcacgtctgtaatcccagcactttgggaagctgaggcgggtgkatcacttgaggtcaggagtttgagaccagcctggccaacatggkgaaaccctgtctgtactggaaatacaaaaattagcygggtgtcgtggcgcacacctgtaatcccagctactcgggaaactgaggcaggagaattgtttcaacctgggaggcagaggttgcagtgagctgagatcacaccactgcactccagcctgggtgacacggtgagaactctgtctccaaaaacaaaacaaagcaaaacaaaacaaaaccaaaacaataaaaaaaaatcccaaaccaaaatgtagatgacctgtttgcagactgaggagtcctgcagcaaactccatcccccaggacagctgcggaatgttctagaaggcccaactctaggaaatcccttagtaggagccttgctctcaacagtgcctcctggaacgatgggccggccactctcttttccatcttgcatcatatgtatttgacttattttgtttataayctgtttccacgccactggaatgtatcttaagagcaggaattttccatgttttacttcctgctgtgttcctagtgctgggaatatagccaggcatataatacatgcctgataatattggctgaatgaatgaatgaataaatgaatgaatattacaggccagacacagtggctcatgcctgtaatcccagcactttggaaggccgaggcgggyggatcacctgaggtcgggagtttgagaccaacctggccaacatrgtgaaaccccatctctactaaaaatayaaaaattagccgggcttggtggcgtgcacctgtagtcccagctactcgggaaattgagacaggagaatcacttgaacccgggaggcagaggttgctgagattgcaccactacattccagcctgggtgacagagtgagattctgtctcaaaaaaaaaaaccaaaaacmaaaacaaaacaaaacaaaaaatcccaaaccaaaacgtagatgacatgtttgcagactgaggagtcctcccccagcccagcawaccccatccctcaggaccgctgtggaacattccagaaggcccaactccaggaattcccttagtaggagccttgctttcaacagtgcctcctggagctatgggccagccactctcttttccagcttgcatcatatgtatttgacttaattttgtttataatctgtttccacgccastggaatgcatcttaagagcaggaattttccatgttttacttcctgctgtgttcctagcgctgggaatatagccaggcatataatatatgtgtgataatatttgctgataaatgaatgaataaataagtaaatataagcctggtatggtggctcatgcctgtaatcccagcactttgggaggccaaggcaggcagatcagctgaggtcaggagttcaagaacagcctggccaacgtggagaaatgccatctctaytaaaaatacaaaaatcagctgggcatggtggtgggcacctgtaatcccagctactcgggaagctgaggcaggagaatctcttgaacccaggagatggaggttgctgagattgcgcccctgcactccagcctggatgacagagcaagactctgtcttaaaaaaaaaaaaaaaaaawawatatatatatatatatatatatgtacatatgtatttatacatatatatagtgtgtgtgtgtgtrtatatatatatatatatatatatatatatatatgtaactccacatgtgagtaccctgttatgtgtgaaaccacaccccaaacatctacacagarcaagcctccaggtagaggaaaggcagtaaccgctttgctggaatgactgagtggttcattaaatagaggctccggagggtcttgataggctctagcaaaggtggtggccgagagggctgaccagcgcatggtgcctgggaatgtgaatgggcccaggggcgccagagtgtggacagcttgggactgtgggctccgaggtgctgcgctgagggcgtggggcgcagggcagaaacacagaggactgagtgcttaggggaggcccaggaaatgtggggttgaacggcctagttctggcaattgtttttaagctttgtaagatggagatttcaagaagtatatttatcttaataatattgtagctcctggtaattcttatttgattaccatttatacacatggaaaaccagcatgcctgtttctggcaaagctccagggtagtctttgtgcataatttccaggatttttatgtaatgctattaaaatctgttcttttttttttcccccttccaaagcggggaaaaagcagcttttgaatcatttattttcgtgtttgagttgtttgggaaatattaactacattttctaacactctagcctggagaaaggaagaaaccccacatgcgtgtgatttatttccttgtgtatggatattaaatgcaatataccattaaggctatgacactttaagtgaaagtgttyattgcatgttgattcagttagttcgtaccctattgtgttactatttaaagtgtggattgcatcgcattctggaacttcataaatgagttctttttcccataaggaaaggccactgcttctgatgttcattaatgtgatttttgtgtgtgtgaatgagctgcctaaaaactgggtgtggtgagggtggtttctgaaagggaagcacttttatagcatgatcttatttgaaaatttaatttgtttttgtaaattagcttttggtcttaatacatttcctccactaacaagcacttttgggcaaataatttaatctctctggttctgcttttttcatattggtaaaatataaagtttgagatagatatgcttaaaatctccaccattgtctaagtatagctgagattctcacgtgattgggacatagtgctcattcttaatttgaaaagtgtttttttctttgtcctcttgtttcaactacgaactctcatttagacacatttagcatagggaagctccgatttatagagccactaaattgcagggcgtgtgtgagatttgtaacttcataaaagattctttacttcctttaaatataaatacgtaagattgagttctagaagtataatttacacatggtttcctgaggatcacgtttcctgaataaagcagggtatcgttagaggaaccccatttgatttttttttttttttttttttttgagatagagtcttgctctgtcacccagggtagagtgcagtggcgtgatctcagctcactgcaaactccgcctcctgggttcaagtgagtcttgtgcctcagcctctcgagtagctgggactatagtcatgcaacatcatgcccgtctaatttttgtgtattttgtagagatggggtttcatcatgttgcccaggctggtcttgaactcctgagctcaagcaatccagctgccttggcctcctaaagtgctgtgattacaggcgtgacccatggtgcctggtctgggaatcctgtttgattttgaaagtctgagaaacacttttgaaatggcttsgasaaaatgtgaagtgaataattattatttttttaatgtgcttcagttcccatgtgaacattattttagagagagattggaaggttagttgccagtaaaatgaatttcactgtgttggcaagtttttcactcgtaggactgagtgaatcctggactgacagtgttcttaccgatgattctgttgaggaaggacttgcttgctcttgttgctcttgacggtgagcttctggatctactggccctatattgagtgtgcaaggggacgtgttagtcctctagttgtcccccacattaatgcatctggaaagtgtctaccttagatgttgtaattagaaattagagggctgggcgcggtggctcacgcctgtaatcgcagcactttgggaggctgaggcatgtggatcacctgagatcaggagttcgagatcagcctggccaacgtggcgaaaccctgtctctactaaaaatacaaaaattagccgggcatggtggtgcgcacctgtaatcccagttactcagaggctgagacaggagaatcgcttgaacctggtaagtagaggttgcagtgagctgagattgcgccattgcactccagcctaggtgacagagactgtctcaaaaaaaaaaaaaaaaaattaaatgtcatcaacattgaaaggaaactcttggattttgtcaaagatttataaaaagttttgaatgattttatttttttcattcagaagcataatttccctcttaaaatccctgatgtggatcatttggttccctgtcatttccattttctttgttcagagtgtctcttctggatctcctgagtttctgtgtgtgtkttcttcctttttgctcaaatgatgagcacacatgaaagcttttcctcctttgcctgggtgaggcggtgttccaggtgtgatctgcagtgcctgattattatattgtattaatctcctcaattttattttctggcttgtctgcatttttccttttctttcttctcccttttttttttcttattagagatgggggtcttgctgtgttgcggggcctcgagcgatcgtcccactttggcctcccaaagtgctaggattacgggcgtgagccacagcgcctggcctccttttctttatagtaatttgaatgtggtgattttaatcctccatggttttcttatccttcctcaacaaacagcaaagaggctgctggaaagccacrtgacatttgctgtgatttgcacggctgatgggaaaacactacttggttctgaaggacagggttgtcattggatacctttgccctctgacccgagtgagaatctcacctggacaaagacccgagttgtgaaatcacacagagaaagtgtgattccgaacctgctgctgtcctgtgcttcctgaggacaagtgagtgactgactccgtgtgccaggaactgcaggaggttaaaaactttcagaactaccatgcaaataagaaatttcaaaggacttttctctaacacacatttcatagtgaacgtctcagctggattaacataattaacgctgtgttctttctggctcctgaaagaaattgtgattaggaacactttcagggctgatgagtctaaggtatcaactttgtcccttctgccacttgaagttcaaatggaaatgtttgctttcatagctccagtcatgatgttactgtatttagtagctattaagtttccaattccatagactcctgggagaagttccagttcgcactaaggcttctgttgcatttagcaccactgcctatggtgtgtggagctttcctgaacaagtaatagcagcaaggttcttagcttagtaataattttaagctattctttgattttttaaacaattaattaattaattattttgagacagcgtctggctctgtcgcccaggctggagtgcagtgacgtgatctcagctcattgcagcctccgcctcctgggctcaagtgatattctccagcttcagcctcctgagtagctgggactgcaggcgcatgccaacacgactgactaatttttgtattttttgtagagacaaaaatactttttttatgtagagacaaaaaaaaagttgaatgataaaatcttttattacttaataatatactttgattgagatttagccatttcattttcactagtgtccagacgttytcctgaaaggcgtgattccatgagatttaatactgaattataatttgatgtaaatgttttatataatcagttgtttgtttttaaacagtagcctcttttctaggcctgctctaggttgattaaatattaagttttctgatcagccagatccttaatagagagcttcggggacagcaaatggttgaatatgaaaccaacctcatttgccatgttgttagatataaatgtcagtgatagcactttctggatggttgagttttctgaagagcagaggattttctcttttartcaatcagataattttctgttttaaccaattcaaacatttgattttatgtttctgaaatagataaagcactttcataaaaatggactgtgccaaataagaggtaattttcttgatgactcagttatttttgcctcktatttggcttttactaatatagcaatttctctataaaaataggaatctttgcttttttaaaaaaactgagatcattctgtttttccagttcttacattttaaaaaataatttttttggcttcttttgctatccatgtatgtagctgttggtgtgctttcctgtatcacatttgctcctggtttttacttcgttacattaaaaaaccaaaccaacaagtaattaagctcgttcagcctgcagatatcgtttgatggaaagggctaaggagtcagcctttgtgcaggtttttagttgtcagctatagtctgagtaagtgaggttgctaggtacaggcgttcaggatgtgtaagatgttattacagttatttttagtgtattattaagggggaggaggagaaagagaaatttgaatcaaatttgtgtcttattaaataggacacgttttccataagaccaaaagggcatttcttttgcttatgtactagaaatagaaaatggaaattagatattagattgtataatcgaaagwcaattagaattaatgaacaattctataactagttatactgtaagctaaaatgtgaatgttaaattagggaagtattgatttttatgaaaatttaccagaatttcaggaaaggactttgcttactttcccaagaaacgtctggtaggagtcactgtagaaatttggtgtgttctgtacaacactgcccaggaggaactggccacatttcttcctacttggttcttttgtttgtttgttttttgagacagggtcttgctctgttgcctagaccggagtgcagtggcacgatctcagctcactgcaacctccgtttcctggattcaggcaattctcgtgcctcagcctcccaagtaccggtgattacaggcacccgccaccacacctgtctaattttttgtatttttagtagagacagggtttcaccatgttggccaggctggccttgtactcctggcttcagatgatctgcccgcctcggcctcccggagtgctgggattacaggcgtgagccacagtacccagcctgctttatttttaattgaagctaaattcacataacttaatgatttttaaggtgaacagttcagtggcatatcgcacattcacagtgttgtgcaaccatcccctgggtctaattccgaagcgttttcatcacccctagaaggaaaccctacacccactaagcagccacttcccagctcccaagccctagcacctggcagccgctgtgctgcactttgcatctgcaggatttaccgagtctgggcgtttcttatacttggartcgtaggatacgtggctttgtgtgtctggattctctcgctcagcatgtttccaaggttcattcatgttgtggcatggagtagtacctcctttttgttatgggtgcataaaattccattgtatggataaaccacattttgtttttccattcttccattgatggacattagggttgtttctgcctcttggctattgtggatggtgctgctgggaacactcgtgtacacgtttttgtttgagtatctgttttctcagttctttggggcacatacctgggcatggagttgctgggtcacgcggtaactctgtttaactttttgacaaacctctgccacttttaaaatgaggaacttgggctgggtgcagtggctcacgcctgtaatcccaacactttgggaggctgaggcaggaggatcacttgaggtcaggagttcgagaccagcctggccaayagggtgaaaccccgtgtctactaaaaatagaaaaatcagctgcrcatcatggcgcgtgcttataatcccagctactcgggaggctgaggcaggagaatcgcttgaacctggaaggcagaggttgcagtgagccgaggtcatgccactgcgctccagcctgggtgacagagtgagactctgtctcaaaaaataataaaataaaataaaataataaaataggaacttatatgaagaccctgtaaaaagttacctgtggcagtccgatgttttggaaaacatctgaaagcttaggtcaatttggtcatagatgtggctggccattatgtttcttgattgaaataattactttgttcactaccattcggaatagttttgtgattaggataaaaattataatgtagatataagagcctagagactctttttatatgaatgcataagttttggctgttcccttcaaattggcatgaggcttggcaacactggaattgtgtgttagataaacagttggtatctagggcaagcttgaaaaaaaagtagtatttaaacattgaccaaaaaaaaaaaatctcaacaactctaggaacttccttgttcaaatgaatccacaccgtctaaatacagcgtgataaaattaggcttccctctggtttccgtggggtcgagtgagccctgagcgtctcgtgcccagccaggactctgcctgytggctggcttcggagcacagggaggtgggacggtttccacggccagcagtgttcccacagcacttccttaatatagaacgtttttaaaagcagcgttggccacagaaaaagctcaactcccaaacactgtcatcagttcatagttcatttttattttgttttcatgttgttaaaacaagaaatagcatgtaaacatgtctgcattaccgaacatcagtagtgtttaggatagaagaggaacacattgagtttctaagtagaaaaaaaatctkttcatccttaaaggcaaaggaaggggcaaggtccctccttgaacaactgggtgaggttggacgcctccagctgtatttgmtaagttgggcttggaagtatccatagggcgtggggggcctgctccagggctgacctcagctggagtcccctccaagtcaggggtatcgctcggcacacatttgtatgagttcacctgaaaagtgcccttgttgggggagcttggaatggcctgtagggcagctgggtcacagtggctgcyggggatgcctgccaagctgttaagcagccctcgggcccacggagtcccagcaagtgtggtttactgtttgttaggatgtaattcaagcctgtgggtaggtaaaactacccaggattaaggggggttggcttttccagggaacaaaaggatcccaccagggagaggactgttctgggaagtgccctggtcccctgtggccaggcttgatttgctctctctttggaagccaccttggcacgcaggcactggtggaaaattttggagtacctgctggaggttgaagatgtgagcacgaagaaaccatggtcttgtctcgggagcctcccagactttcccctttacggctggtgagaacgtgaaatggtwcacttgctgcagaagacagtctggcaggtccccaaaaggttaagcacggagctaccgtagggcccagccatgccactcctgggtttgtgcctaagaggtgaaaaacacacatccacacaaaaacttataggaatgttcatagcaacattatccmcaattgccaaaaagtggaaacagcccaaatgcctgtctgctgatgaacacataaacaaaacaagtaacacatcaacaaaacgtagcacctctgtaggatagcatacgattcagccttaaaaaggaatggagttctgatacatgtgacaacgtggacgaatactgaaaacatgcccagtgaaaaaagccagaccacaaaggccacgtttcgatcgcttgagcccaggagttcgagaccagcctgggcaacatgtcaaaatcctgtcaactcaaaaattagccaggcatggtggcatgcacctgtggtcccagcccctcgggaggctgaggcgggaggatcacctgagcccaggaggtggaggttgcagtgagctgagattgcctgggtgacagagcaawctctgtctcaaaacaaaacaaaacaaaaacccaaatgccacgttttatatgattccatttctaggaactctagaactacaggcaaatccatacacacaaagtagattagtgatggccagggctggggaaactgaagggaaatgggaggtgaccgccgatgggtatggatggggtttcctttcggggtgatgaaaatgttctcgaatgggctatggtgatggttgcacaactctgtgtgcgaaacctccctgaattataaactataaacgagagaattacacagtatatgaattctctctatataaagctgttatgaaaagcgaacctaccagaccaacattaacaattagagtatattgtagtacaagacagttgtagattggcaagataagattggacatagagattttgtagattgtggagcggagagggatgaggtggacggtgctgttacagcctcttaggagggacagagatcctgaggtgatcaccgagcttcaggatcttgttcataattttgagattaagaatcttggtttggaatcccatgcctgtcatcccagcacttcgggaggccaaggtgggcagatcgcttgagctcaggagttcaagaccagcctggttcacatggtgaaatcctgtcgctgcaaaatgcaaaaactagatgggaatggtggcacgtgcctgtagtcccaactactctggaggctgaggtgggagggtcgcttgagcctgggaagttgaggctacagtgagctgagatcatgctgctgcactccagcctgggcagcacagcaagaccctatctaaaacaaagacaaaaacaaaccagaatcttcatttccatcagtcttcagaactgtgtgagtttaggagttgtgattcatgctgaccatgagaccgatgtataaagcaggtgccagtgtattaagttactttggggaatatgatgtacttttccagtggctggaatattaatatctacttcccaaggcagttcctccatgagatcaaggtatctgtgaggcctcattaatagtaacaagttagccgggcatggtggcacatacctgtagtctcagctactggggaggttgaggcaggagcattgcttgagctcacactgctgcacaccagcctgggtgacagagtgagactctgtcgcaaaaaaacaaaaaaaaagaagaagaaaggaagaaagaaacgaaagaaagggagaaagagagggagagagcgagagagacagaaacaaagagaaacaaaraaaagagaaagaaggaaggaaggaagagagagagagaaagaaagaaaataaatagtaacaggattgcttcaggactgtagtatcygagcaaatagtaacaggattgcttcaggactgtagtatccgagcaaatagtaacaggattgcttcaggactgtagtatctgagcaaaggatctgatttgatccagcacatcccacgagggactgagtgtttatgcccacagactcagtgccctccctgaactgtgcagagtaaactctgccaaactcttagctgttgttgttsttctttttttttttttttttttatctttttgagatggaatctcgctctgttgcccaggctggagtgcagcaatgtgatcatagctcactacagcatccacctcttgggttcaaacaattctcatgtctcggcctcccaagaagctgggattacaggcatgtgccaccacatgtggctaattttttgtatttttaatagagacagggttttgctgtgttggccaggctggtctcgaactcctggtctcaaccagtctgcctgcctcagcctcccaaagtgctgggatgacagacgtgagccaccgygcccggccttccttgttcttaaagaaggagatgttacagaacaaacgaatctccatacaaaacaaaacctcaccataaaagaggaaactccctgcttcatgaggggtgcaggtaaatgtagaaacgctcaccaagaaagccagagtggatttcacattaatagaatgcaggtaaaagacataacttgttgggatgtagggcgcagtatcagaatggaatagggttcaggtgagctcctaggatggcaggatttgaagaaggagcagcaccttgattaggggagaatgaagaagctttggagggctgggcgtggtggctcacgcctgtaattccagcactctgggaggcctaggtgggcggatcacctgaggtcaggggtttgagatcagcttgggaaacatggtgaaaccccatctctactaaaaatacaaaaattagccgggcgtggtggcgcatgcctgtaattccagctactagagaggctgaggcaggaggatcgtttgaacccaggaggcagaggttgcagtgagccaagatcatgccattgcacttcagcctgggtgacagagtaagaccctgtcttaaaaaaattaataaaaataaaaaacacagtccaatttttttgagctaattatggaagtattaatggataaaatctacattttgtactggtgctgagagtgagctgtcccctaagtagattatgtttcatgattctgtgtcaactttctctgggctgatgggccctctttggacactgacgtctcctcacgtccatgatccctcctgggtccgtgccagctgcgcgtgtcatcagagcggagcgtgcgcttgtccttcatcrcaggcctgggtgatgtgtggctgacatgcgtcacatgggataggctctccgatctcagggctcgggctgccacccctgccacgtagtacatggcatgtggctgattctccacttgcttgcaatggaccctctgtggaaggcaccggagaggcggtttccctgtctcttctcctcctgtgttgccctcctccccctcgatagatgtgacctcccttccagctttgtgccagtgtctggcagcacttgattttttttctcctygtccttcatctgttttcaktgcgtcgccaccttccccacccccaagcagcatccttctgccccttggtgctctccgcgcggccgtctgcctacctgtgagtacgctgaccagggctggttgactgcctacacattagcggagtctttctcattttttagggcacagtagatactcagcgagtgttgttttttttttaataattatgcaataaatgaatggatgtccgcacaccaccctgaacaccagcacccactggtyatccctggacacgcatgggtggaaggaccacactggttgtccctggaagagtagctcactctcgagcctgcaccgatgtcatctgagtcaaaacacagacgtctgggcyccaccctagagagtctggctcagcgggtccagggtggggcaagaatgtgcattcctgcaagttcccaggtgatactgaggcggctgctggggggataccatttcaagaagcactgcttggaggcaacgcagacctctccctcttcgacgaggtcctgttcacttccatgtaaccagtcagggttggaatcccacatggagttcccctcctttggtgaccctctgctrcagctcttgggagcctcccctttagatgagttcctccctgctctgaccaggagttgctttttctataccacctcagctgatggtgttcacacacacattcatttaacacacatttacggagggctcctgggggctgggtgcacacacttggtgcggctctcttttggaacctggtgccttctctctctccttcatttttgaggcagagtcttgctctgtcgcccaggctggagtgcagtggtgcgatctcggctcatggcaatctcygcgtcccaggcttaagtgattcttccacctcagcytcccaagtagctgggattataggtatgcgccaccatgccccgctaatttttgtatttttagtagagacagggtttggccatgttggccaggctggtctcgaactcctgacctcaagcgatctgcccaccttgacctcccaaagtgctgggattacaggcgtgagccactgcgtccagcttccagtgtcctccctttcagcctctgggtgttgccagccagtgccaccactcagcactgtttatacctaaggcaccaatgggtaaatggagagacaggcgtctgaagacttttaaaaatgtgtactttatttggctgtagctaaaccagttagaaggccgggagttgaagttgatatgagtatcataaatgcgcaagttaagtagttacttaagaagtcacaggaatatgggtcgttccttgttgggtttctgataactagcaggcggctcagtttggctatgttaataacagaaacacagagattgccactgattctatcacatttcctgtttgtttgtttttgtttttgtttttgagacagtctcactctgtcatccaggctggagtgcagtggtgcaatcatggctcactgaagcctcgaccacccaggctcaagtgatccttccacctcagcctcctgagtagctggagctagaggtgtgcaccacctaatttttaaactttctgaattttttgtagagatggggtctcactgtgttgtccagtctggtttcaatctcctggcctcaagcaatacccccaccttggcctcccagagtgttgagattacaggtgtgagccaccgtgcccagccaacatttcattttttaaaaaatgctttattgaggctgggcccggtggctcatgcctgtaaacccagcactttgggaggctgaggcaggcagatcacttgaggtcaggagttcgagaccagcctggccaacatggtaaaaccctgtctctactaaaaatataaaaattagctgggcgtggtggtgggtgcctgtaatcccagctacttgggaggctgaggcaggagaatcacttgaacccaggaggcggaggttgctgtgagccgagattgtgccactgcattccagcctgggtgacagggtgagaccctgtgtcaaaaacaaaaacaaaacaaaacaaacaaaagaaagctttattgagatgtaattcacctgtcacccagcctgggtgacagggtgagaccctgtgtcaaaaagaaaaacacaaaacaaacaaaagaaagctttattgagatgtaattcacatgtcacacaattcagcagtttaagtgtacagttcctatactttgacatccatcactacagacaatttggggacgttttcttcactcgacagagaagcccggcacacccgagctgccacccccagtgctcccagcccctggcagcccctaagctgctttctgtctctttgcatttgcctgttctggacatttcataaaaatggaatcacatcatatgtggcccttcatgactggcttctctcactgagcctaatgttttctgggttcacccatggtgtagcatgtattagtgctttcttccttttcatggctgaataatattccattgcgttttgtttatctttgttgattatccattcctcagttgatggatatttgggttgtttcactttttgactatgatgaatagtgtttctatgaatgttggcagacacgttttcctgtggacatatgttttcatttctcttgggtatgtacctaggagtggaattgctgggtcatatggtaactctgtttaactttttgaggaatgtctggagtttgttttaaagtggctatgccattttctcttcccaccagagtgtgtgcgggccctgatttccccacgtctccataaacacttgctgctgttcgtcttttttattatagccacactagtggaaagacacttttgtatcccacacaaacagaaaacttatgtataggtgatttttctaaaaaaaagactttatgttttgataaaataagcatgttatattggttaagatggtttttgttgtgagttaacgaaaacctaactaaaattacctaaaacaaacaaacaaaaaaacgcatttactatctcatgtaacaagaagtatggcagttccagggttgattaattcagaggtgtgatgacatttccagkaccccaggtgcttttcatctttgctctctgctgtctttgccaygtgggagatgtcttcccttrtggcacaaagtggctgcagccattccgaatgacacagtgatatctagtaaagaagaggggcttttccaatcctgcatgtcttattttactrgcatggaaactaagcagacatctctcagctccctttggccaaggcggggccatgtgccacatcctccttagttactggaaaggggagggaagccccattggggtgaacttaccctgctccagctacttactgcgggtgggctgtrtgtgcgcatgcatggtgtgtgtgcgtgtgcgtccatgcgtgggtgtgcatgtgtgtgcgtgcgtgcatgcgtgggtgtgcatatatgtgtgcatgcmtgcatgggtgtgcatgggtgtgcatatatgtgtgcgtgcatgcgtgggtgtgcctgcatgtgtgtgtgcgtgcttgcatgggtgtgcctgtgtgcatgcatgcatgtgtgtgtgtgcgtgtgtgcatctccttcctaagcaggtagaagggagataccccaagcagaatcaggcttctgctggtaaggaaggtaggtgtgtgggaacggggaggacatgaagaaagaaaatgattcttagggatgcaatgcattagtggctgtgactttagttaaaacatagaattttgtttgttttttttcttttgagacagggtcctgttctgttgccctggctggtgtgcagtggcaatagtggctcactgtagccttgatctcctgggctctagccatcctcctgcctcagcctcttgagtatctgggaatacagtcgtgtaccaccatgcctggctaattttcaattttttttttgtagagacagggtctcgctatgttgccgaggctggtctttaactcctggtgtcaagtgacactcttgcctcagtctcccaaagtgctgggattacaggtgtgagccactgcccaaccttcatgcagcattttaaaaaatgaaaatgtagctgcttgttctaggagaaacttgtgaaattggatcatttaaccaactctgcctgtgcgtgacttgccttcagttctccagcttggcctcaatccctttttcttgctgcttggaacccacatcaccaccagtgacctcacaaggcagtgcccctccgcacccctcccttctccaagactcccycgccgycccctttcttgctcttacccacacgccactgcagacacmgcgccctcctcccctgctgcccccctcttgctcttacccacacgcccctgcagacacagcaccctccccccacccaccgttacaccctctcttgcttttacccacacgcccctgcagacacagcgccctcctcccctcctgcaccctgggggctccccgcatgtgctgtgatgttgaacatgtgggtgtcaggatgaaaggaagaaatctagatttgatgtggtgggaggtaaaagcactctcgaaggctttcgagctgggctrtgactgtcaggatgaatgtggttttaatatgtggaagagatttatttctttaatagtcacctgttaagagtcttagatatcactgatgtgtcttgttaagaarccttataacaaacgtatttcttaaacttacatctggagctctgcaaagcattagctgttctgcaggaatgacagagggtctcctgtgcggccagctcctctggagtcagggagccatggagccactgctggttctgaggatggtgacagcaggaggtggagatggcttcatgatctgctgtgagcaacgtgcaacyttctccctgctgttaagtgactagaattcccaggtgccgcctgctgattagttccagtttgtgttccacgagagcagatgtgtgtgaggtgcagggaatgccccgctgcgggagatggttttctcctgccaccgtccctccccaggccacaccatccacacacatgagcacgctcgtcttcctttctcataaagcacagacctagaaatatttctcggtttaaaaatagtgttttccctacctcgagtcaaggttcagttctcatctctctaattttagttccttgtttttatgaactttgaaatgttttccttaaccagaaaacagaaaaaagcaatcccagagacaagggaaatttcttgctccatttccctgtagtaaaggcatttctatgtgagattttctktttatcctgagcaggttatcagaaaccaaaattttgaattaggagtttaaagaagaggcaagggggaaaaagtgctctctacgggaccttggttgccatgtggaatgtttttggagcataaaattgatatttttacaaaaaaaaaaaaaacgaaaaaaatgtttctggtagaggcctggagaacgccgtcatgattctgaaggtgtatatattttttattgtttctgtcaaactaattttatataagacattaatggaaaggtcaaaacacataattctctgaagcctattagaaaaatttcttccgttgggctgggaacggtgggtcatgcctgaaatcccagcactttgggaggttgaggcgggaggatcactcttgaggccaagagtttgagactagcctggccaacgtggcaaaaccccatytctatcaaaaaatgtatatatatatacaaaaattaatcgggtgtggtggcgcacgcctgtagtctcagctactcgggaggctaaggcaggagaatcacttgagcctgggagatggaggttgcagtgaaccaagagcatgccactgcactagagcctgggcaacagagcaagactgtctcaaaaaaaaagtaaagaaaagaaaaattacctctgttaacttctttaaattcttaggtacargtggtaatttttttctttgttaaaattgatgttggtcattttgtgtttsagttttctgttgctatttcatggggattttcctgtgcatctacataatatagtatttctttgaattaatatgccatagtttaatcatttcctgtttgagctttttagattgcttgaaggtttttctttcctttgtaaatactgcagctttaaggaatgtgtgacttttgaagctctctgtttwggcagatggcaaagggggtgaccatcttatttttattaattttttattataaaagtraaacatgtttttggtgttttagaaaagacagataagcaaaaagaagattaaaaaaacatttaccaactagagatagccattttgaatgtttcaacatgaggtttttagactttttcagtgcatatacgatatatatcaaatatttattcaaaatcaaatatatatcaatgcatataaatatatatagatataatggtgtcatatgaaacaccattaacaccattaaacaccattaacaccattaaacaccattaacaccattaaacaccattcatggatcatgaatacctttccacttaaatctgtatgtacatctttgtttattttattttattttatttttttgagacagagtcttgctctgtcatccaggctgaagtgcaggggcatgatctcggctcactgcaacctctgcctcccgggttcaagagattctcctgcctcagactccccagtagctgggactacaggcgtccgccaccacacccagctaatttttgtatttttagtagagacggggtttcaacatgttggccaggatggtctccaactcctgasctcaggtgatccacccaccttggcctcccaaagtgctgggattacatgcgtgagccaccatgcctggccaagtctgtacatacatctgtatcatcattttaaatgacttagattttattctggggatgtactataatttattcaggaaatatctcttgttggaaatgtagattgtttccagctttgaatcattgtatatcacaatatgaaactgttaataatccagccatccctcacatcaggatgcattgtataatttaatggtatgtcatagtttaattggcagcactttgcattatattttaatagaacaaaaagtaatgaaacatcatcattggcatcttagactcgatgaaatataatattgtcaattataacagtgtgatgaatatccttatttgccrttgtctttgcccacgataattagtagtggggccaaatctctttttcatatgtgtgttgcccttttgtatttcttcatgagttgcttgtgaattggttgtsttttccttaytgatttgtgaaagttctttatttatgtaagtatcttaaatctttgtcttccatatatgttgtaaaatgcctcccattttctaatttgtctttcaatcgtgatatttcttgatatgtggaaatttaaaatctttatgttggtcttatctatcaatcattgtttatggtttctacctttagtatcatggttagaaaagccttcyccmcctgagractatgtaaaatattaacctatattttcttctaatacttttatggttttttttttttttttttttctttttttgagacagggtctcactctaggcaggctggagtgcagtggygtgatctcactgcagctttgacctcctaggcttaggtgatcttcccacctcagcctcccaagtagctgggactacaggtgtacaccaccacacctggctaatttttaagtattttgtagagatggaggtctcattatattgcccagtctggtctcaaacttctgagttcaagcaatcctcccaccttggcctcccaaagtgttgggataacaagcatgaaccattgtgcctggactggatataccaccattttaaaaaatcagtttatcagttgatgaatatttgagttgcttgcagttcttggctattatgaatagagttgctgtgaacattcacaagtcttccgtggatgtatatttttatttgtttcggttaaatgcataggagtggagtgactgggttgtatgatgagtgtgtttaactttataagaaactatgaagctgaacatgttatttttctttgtaactggacacttaattgaatgcttattgtgtctgaatttttttttttttttctgaagcagagtctcactttattgcccaggctggagtgcagtggcaccatcttggctcactaccacctctgcctcctgggttcaagcaattytgccgaagactcccaagtactaggattacaggtgtgcaccaccacgcctggctaatttcttttgtatttttagtagagatggcgttttgccatgctggccaggctggtctcaaactcctgacctcaagtaatccacccacctcagccttccaaagtgttgggattacaggtgtgagtcaccgcgcctggcctgtgtctgatttttaaaaatcagatagccttagatttttcttggcagaaaatcatataaatttaaaatcccctccttttcagtttttatatctcattttaaaaaattggactgaaaggtaaaggccaaaaatatgcctattctctgcttaggagttacagtaacttttgatgtgtgtgtgtgcatatacctgtgtgcgtgtgtgtgggtgttttcccgctgtaagaaaagaaggcatgatgtaatgtgcaggaaataatcataataaagagaatgctggcgtacttcttgagtgctcattgttgctaaattggtcatttactcctaaaggacgttggggaagggtgtgtttgatctctctacagccagaaagaccacctgaaaaccctcctgggcctcgtgaatctgctcatctctccagatgtcacaggaagtgtcctcggrgggggacaaggctgtgctgttccatgcaggcatggtctcaggctgttcccaattgtgagtgagttttgaacaaaactgtaacttccctgtatagggcttacagttggcctcatcttacaccctgtagtccagtgagtccgcatgctagctgtggaaagcgtgtacagaaaggaggctgattcttttttttttttttttgagacgaagtctcaaccttgtcccccaggctggaatgcaatggcgtgatctcggctcactgcaacgtccacctctgaggttcaagcgattctccttcttcagycccctgagtagctgggattacaggtgcctgccaccatgcccggctaatttttgtatttttagtagagacggggtttcaccatgttggccaagctggtctcggactcctcacctcaggtgatcctcctcccttggcctcccaaagtgctgggattacaggcgtgagccaccgcccccagccaggaggctgattcttaattattgatgcactgcagcctgggcaacagagcaagaccttgtctaaaaaaaaaattattgatgccatttggttctctttgaaactaattaatggctccttaatttgtcagtgcatcttctagcgatcacagwtgctgtttgggtgctcttgtcagtttttggtaaccatttctggtattttcttttcaaatccccagcctcactttgtgctggttatcacaagatccacttagaccttagaggygagagcttgggaatatttcatctgcaagaaaaatcattcgtctgtctttgtgtgggacgagttaggttatgtaagctgatggaacaygaaacagaaaactggagcctttttctttgggcacacaaaaatgcaaaaatctaaatctcttattttgttgaatttttaagtggaaggagttgtagatttgccaccatcagtcctggagctgacttgaatttttcttttaggctcttgttagcttttctaacagagatgtcacagattagcaactaggcataaacctgagaaattgggcactaattttgttttgcatttttgttttgtaagayrggggtcttgctgtgttgcacaggctgcagtacagtggctgttcacaggtgtgatggtagcgcactgcagcctcgaactcgtgggctcaagtgatcctcccacctcagcctcccaagtagctgggaccacaggcatgtgctacgccacccagctgttattttgcatttgctctgtcatcacgttgtgcttttgtgcctgccttttctcctcattaactagatatctgtcacttaaagaaataacagcgatgcatttcaggataatagaacccctatgaactcttccagacttaaaatttatctgtttctccaaaaaacactgcctgcatttttcccaaataagccagatactctcattagccaggtatctgtgcaggttggacccctgcccaccttacaagatccagtagcatctccgttggaaagcttttcctgagccctcccgcctggcccccccgctgccccagccgccattccttgccaggtctctttttacctccttttgcgttaatgggtctttggagttgtgtctccccttcactgagctctccaggacacattttgcaacatttttgtgtccctggtgtatggtgtttagcagacgctcagtatttacatgttgacagattgcacacatgggaccgggtacatttcttgccagtacatccagttttcccttacctcttctgctgtaaattaatgttcctctggggtttaaaaaattaatttagtggttaatttagtaagagattaaaattaggcactggccaggcacggtggctcatgcctgtaatcccagcactttgggaggctgatgtggacagatcaccagaggtcaggagttcgagactagcctggccaacatggcaaaaccccatctctactaaaaatacaaaaattatctgggcgtggtggcacatgcctgtaatcccagctacttgggaggctgggacaggagaattgcttgaacccgggaggcggaggttgcagtgagccaagatggtgccactgcactccatatatatatagtaacaggtctcaccttgtcacccaggctggagtggagtggcatgatcacagctcactgtagcctcagcttcctgggctgaagtgatcctcctacctcagcttcctgagtagctgggactacaggcatgcaccaccatagctggctaatttttctatttttttgtggagacggggtctcaccatgttgcccaggctggccttgaactcctgggctcaagcgatcctcctgcctcagcctctcaaaagtattgggattacaggtgtgagccactatacccggccataaagtagtacttaaaagtgtaacaactttcaataaatctttgtgagattcagaacaaccttttgaattgtctatgtaaagaaataccgaactgcttttttttcccctcgatcactttttaaccttccactttgtagacaatttgctagtgtgttttctatttttttttttttttttttttgccactgggtattgccctgtcatccagactggggtacaatggcatgatcgtagctcactgaagcctcgacctcctgggctcaagcgacccacccgcctctgtcgcccaagtagctgggaatataggcrtacaccaccatgcccggctaattgtttttttaatttaaattttgtttttttttttttgcggaggcagatcctcactatgttgcccagcgtggtcttgaactcctggcctcaagtgctcctcccacctctacctcccaaagtgctgggattacaggcatgagccactgtgcccagccagatttttgtcatgattctatttttatctcttctatcgatttatttcttatatattttttctcacttattttaagtsattgcccgaaatttacaaagtacattttttatcagtmtgcctccaaatattataccatttattatataagaacctcgtaagaattcttcataactgtaagttactacaaggttctatgagaaccttgtaaatgtttatgatgctaatagtgtcataataatgtattttatatatattataaacctcataacatgttatttttacagaaaattaccttttagagcaatgmygtttgatgaaacttcctgcaatgatggaaatgttttatatctagactatacaatatggtagctactatccatgtgtgaccattgagtacctgaaaacaactgaattttaaataaactagtttaatttaagtaatttaaatttaagcggctgccatatagacagtgtagttttagaacaatggaagattttcaaaatacttttgaaaattattttgaaaatctttcttctttttaggccacttcaggaactcttcgtttctttgtgtagatctataggtttctgtctcatctcccgactgaaaaacttcctttaacattttttatgctacaggtcttctgggaataaatgatctcagcctttgtctgtctgaaaaagtttttatttccctcccattagaaaatgtttttaggccgggcacaatggctcatgcctgttattcccagcactttgggaagccgaggtaggtggatcayctgcagtcaggagttcaagaccagcctggccaacatggcaaaaccctgtctctactaaaaatacaaaaattagctggatatggtggtgagagcctgtcatcccagctacttgggaggctgaggcaggagagtcatttgaacccaggaggtggaggttgcagtgagctgagatcgcgccattgcattccagtctgggcaactgagtgagacttytgtctcaaaaaaaaaaaaaagtttttaaagagggctgggtgcggtgactcatgcttgtaattccagcactttgggaggctgaggagagttgatcacytgaggccaggagttggagacctgcctggctgacaaggcgaaaccccgtctctaccaaaaattagctgggcatggtggcgcatgcctgtagttccagctacttgggaggccgaggcaggagaattacttgaacccaggaggcggaggttgcagagagctgagatcacgtcactgcattccagcctgggcaatagagtgagactctttctgaaaaaaaagaaaatgtttaaagaaaaatttcataccaaggagatccaagagacactcatttttaagagtcggttttttcttttttttggttttgtttgtttcttttttttttttttttttcttttaggatatgaaggtttgtgttgaaaaattttttttgcaacttattcttttagtactttaaagatatcayaccactgccttctggcttttgttgttttggtgagaagtctgctataattcttttctttgttcctctgaatgtaatatgtttcccaattcccactgtcaccccggcagcttttaagattttctctttatttttagttttcgacaatttggacatgatgttgttttggtatttctcttttttggagtcctctaaacttcttggatctgtgctttgatgtcttttattatgtttaaaaaattattggccattatctcttcaaatatttccttctatcctttctttcttcttcaagcattttcttttttcttagaaacatttaataggggcttatgcacagaagctatgtctgttctcaagcttctgttcattagtctgtgaactggggctgcagcgagaagagacagtggatccctgcaccattatcccctggtcccagggcttgtataccgtagggaaggggtgattcagagggatgtgtaggtcagtgtgagtacaataacwtcaaagttgtttgacctaaggtcaggctttatggtaagttcttggtcttacacgaggaacagcgcataagctggaaatctcagagggtttcctgsaamwggggttaatcagaagccacatggcggagtagcatccacgatggagctacttcagcctccacagtccactcttgtaatccagctcttgtaatctcacatgycctcttcttccttcatggtccctgagcctttaaggagggtgcttgatactgtatagctttagcagcagtgccttggtcatggaaaacagatcsggcccagtgggattccaaacaagggagattcacaggcttttaaatcgtcttcagtcttcagaatgcagtggctttggttctgtcagaataggcaaaacaatgtgagatatataacatcgatcactcggatagtagaattctgtgcacacagagattgcaatagaaagagaatcgcctgtaatcccagctactcaggaggctgaggcgcragaatcscttgaacccgggaggtggaggttgcagggagccgagaccgcaccaccgcactcccgcctggatgacagtgagactctgtctcaaaaaccaaacaaaaaaacccagaattcgtgggccagaacaacaatgaaaaaagaacgtattctgttaagaagccaactaaaatgcatcatgatgaaaattaaaactcggttcttctttagagacttgttgcagccaggaaatggttcaggattagcccaaattgtaggcagataataaaaactcacaaacaatggttaaggctagaatctaaatttttctttctccagtttccccatttctaccagggataaattatatatataatagtaagaccaatttatttgcaaaacaaattttagttgctttatacttggcctgaagatttgcatcaaatgtagcaagaattgtgatccaccatacggaccctttttaagttggctttgcaggaacctttataaggaattttggatttgactttttaaaagcctcaatgccagatattgatctgttttcaacttttttgattttttttttttttttttttttttttttttttttggagactgagtttcgcttttgttgcccaggctggagtgcaagtagcaccatctttgctcactgcaacctccgcttcccgggttcaattgattctcccgcctcagcctcccgagtagctaggattacagacatggatcaccatgggtggctgatttttgtatttttaggagagatgggatattaccatattggccaggctggcctcgaactcctggcctcaagtgatctgcccacctgggcctcccaaagtgccgggattacaggtgtgagccaccacgcctggctactacttggttactttgtaaccccgcctctttgatgggtcaagaaaagttgtggttatattatttatcttggtttttattattattattattttattttttgagacggagactctctctgttgccaagactggagtgcagtggtctgatcatggctcactgaagccttgaccttctgggctcaaagtaatcytcccatctcagactcctgagtagctaggactacatgcatgcatcatcacacccagctcatttttatgtrtttttgtgtgtagatggggtcttatgttactcaggctggtctggaactcctggggtcaagtagtcctcctgcctcggcctcccaaagtgataggattacaggtgtgagccactgcacttcgcttttttctttttaaagagaaaggatctctctatgttgcccaggctggacttgaactcctggactcaagcgatcctcctgccttggtcttcgaaagcastgggattacaggtgtgagccaccaggcccagccagttttaatttctgttaggtggaatgacattccaggtttctaaaaataacttctacttggttatttttcaaaagttttgttgagttcagtaattatataaggtttataacataatattatttgaaactttcatccacatcctattctttactggtagagaaaagccacatataagaaatacatgtgtgtttgtcttttataaatatatgttacccagttttccagttactagctgcaagttttttttccaggtcataatttggagaaaaatatatgcgtgaaaattataacgataaagcttattttctatacaacaaacagtgagtgatatggaaatgtatgtccttactagtaattttaaaagtacaaaagagaatgccttaaaagtacacacacacacacacacacacacatacacacacatacatatttttttgagacagagtctcactctgttgycgaggctggagtgcagtagcgcaatcttaactcactgcaacctttgcctcccgggttcaagcaattcttgtgcctcaccctcctgagtggctgggattacaggcatgtgccaccacgcctggctaatttttttgtacttttagtagagacagggtttcaccatcttgggcagactggtctcaaactcctgccctcaagtgatccacctgcctcagcctcccaaagtgctgggattacaagtgtgagccaccatgcctggccgcattatatactttttaaggcagagaaaattttctaaaacttgatgggtggcctgttgttgctggttcacttcttctaaagaacagaagtaagaactgtaacactgtccgaatcctgggagagtcgccttagaagatggtcctgtagatacaagagaataatttactcaatgatacgaatataattgagaatagcaaaaattgaacagcagccaaattggtgatgagtgaggtaactctggtaagtcaccctgatagaatatattccatttattcattgttcatagaatatattctatttattcgttgttcttccaacctttgttgaagccccactctgtcagactcggcaccaagtgtctgagatgccttcgctcattacatcttcacggctcccccgagaagtagatgttactttcattatctgcattttacaaccaaggaaccgggatattaaattacttctctaggtcatgcagctagtgtgcggtgggctaaatgtacaatccccctaataataataataataataataataataataataacttacaacaacagcatattgaaataagaataaaaatttgaaaaatctctttgattcgtaaagatgaaaaaattgattctagttgttggtggtgagaggaaagggaacgcaggccctctgaaacactgttggtgggactacgaattgcagaaacctttttgaggacattttgcatatcttcagaatttcacatgtcatgccatttgaccaagtcctttcacttttagggatttaccctatggcaatatttgcacaagtacaaaaatgtatgtatgagaatcttggttactgtctttcttgtaatagcagaaagtgggaaatcacttgaacatctattaggtggaaattatggtctgtccttatggtggaatagttgtaaccatttgtaagaatgagatagatctgcgtgtacccatatgtgcaaaagagccaccgtgaattgtttttttttttttttgagatggagtctcgctttgtcactcatgctggagtgcagtggctcgatcttggctcactgcaagctccgcctcctgggttcacaccattctcctgcctcagcctcctgagtagctgggactacaggcgcccgccaccatgcccagctaatttttttttgtatttttagtagagacggggtttcaccgtgttagccaggatggtctcgatctcctgacctcatgatccgctcatctaggcctcccaaagtgccgggattacaggtgtgagccaccgtgcccggccatgaactgtgaattgaaaaaagcaagcaactgtaccatatgtaaaacatgatctcattttccataaaatagcgtgtttaataatgtgggtctagagagataataatacatgcattgaaggatatatacaaatttatatatagcgcgtgttctttacagtgggattagaggaacttgtactaatattttttttgctttgttttttttttgcaacagatatgattttattattagaaaaaccagatttaaaaaaagccattatatgagttttcctasttggcaaaaattcattatatgagttatcctagttggcaaaaaaggcacttaagtgaggaaaggagatgcaaaatcatccwtgactgtaaaggggtgcaggtgggatatgagcttgtctgggtatgagaatatcatgttctatgcattttttatttcctaaactgcttaaattataaatcattaatggtaattattaaaagactttgttttccctacaattagaaaaacttatttgaagacctcaaatcccaaaagtgaaagaggaaaaaaaaaattattgccacggtttttcccttaacccatttaattaaagaattaattaaattctatgttgcagtttttcaccaaaagtgcaacatagagttagttcagtcaccacaaaaagattcagagattggattttgctgacttagtgaagctactaagatacaaattcacaaagtaaatgtttgcacacattagctacagtggcaaagtgtttgggaggttgcagtccacctcccggtgagggagatccatccttttggtcagcaaatgccctgaattgaccctctcccgagggtcagctgcaggctgtgctgatctcggaacttctctgggggtccagttctgtttaggacagaccataaaatacatctctctggggtgggtagagctaccccagtacttaccctggaaatggactcagctgtccctggagggtgactcagttgaggcagaattgtcttaatttggtaactctcctaatttgaagcagaagtcctgggtttgacccagacccatcttggtctggagtggagttgtggtgtgtctaatgctgccagatcatgttcactgttagaagcctggggaagggaaggaacttgctcagccaactcagaagcaggcatagcgcaagagggaggattttaagaattagtattttactatccttgtgagctggtgttattgacaaacattatttcaatctgtttaacgattttaagaattagtattttactacccttgtgagctggtgttgtttctaaatattatttcaatctgtttaacaattccattttttaaaaaccctgcactttgggcaggagttcgtatttctaatttaggatgaattttttctcatctccccccattctgtgattctaattttttttaagttatttcagttcttaaaactctttcatagagctgggcatcagccgcaattttctctaaatctgtctcagatgagcacttgcagtctaattgtataaaagatcaggaaatttagtattgaagttgcacttgctttgatgtaatgatgaatgtttccttcatctgaagagcatttgaaatttatggaaaagtaaatctttttgaattatatgtaaatgaaaacgttgggatgaaccaggttatgtttaactgggcagttttgaaattctaatwgctcctacaagcgggaatcttttaaagctaattttgtgatatgaattgtttattattctaaagaataatattcacttttttttcatggatctcatgtaaatgttactggacaatatgacccatctctttaaaaagtgaaattgttagtgggaagctgtggctcacacttataattccagcactttgggaggctgaggcgggaggatcacctgagcccaggcatttgagaccagcctgggcaacagcgagacctcatttctacaaataataaaaacattagctgggtgtggtgacatgcatctttggtccaagctactctggaggctgaggtaggaggattgtttgaacctgagaggtggagcctgcagtgagccctgatcgtgcccctgcactccagcctgggcaacagagtgagacctccatctctaaataaataggtaaaggtaaaatcactgctcagtcactagagagaggagagagaaaagtaaatatactcaaggagtgggaaaagctttgaagtggcatatcaaaatgagaaaaataagtgttttttagagagaaaagatttgtggagaattatatattagaactatttaagacttcttaaaacttcacgattatatggttttgtaaggtttttggggattttcataatgagatgtagatggaacgtccccattgcccatcatagactattcaggcaagttcatacccattcctagaatggagaaccgtctcctctgcggtgaagaagcgcccctgttccttaagaggcagcagcaggaggtggaaaacaacatcccgcttgctaaagtcatgggccttagtccaggcgcggaggctcacgcctgtaatcccagcactttgggaggccaaggcgggcagatcacctgaggtcaggagttcgagaccagcctgtccaacatggtgagacccagtctctactaaaaatacaaaactgagccgggtgtggcagtgggcgcctgtaatcccaggactttgggaggccgaggcgggcagatcacctgaggtcaggagttcgagatcagcctggccaacatggcgaaaccccgcctctactaaaaatacaaaaattagccaggtgtggtggctcatgcctgtaatcccagctgttcrggaggctgaggcagaattgcttaaatccgggaggtggaggttgcagtgagccaaaatagcgccattgccctgcagcctgggtgacagagtgagactccgtctcaataaataaataaatacataaaaataaagccatgggcctcgatgggaggctgtacattgacgtgcgacattcgacttctgccattatttcagatttcrcacctgcccttctggcaacatggtgttgctgtgaggatcttgagaggagatgaatgatgctttccaagtagtaagtattattccattagggaaaataggaataaaattggaaagcatcaagtatttgaaaggaaacgaaaacagggcttactttccctttcggccagcgttagaagggtgcagtttggaattgaaagtgaaaggagcatgcacgtgttcggggcaggttgcggggagagtgaagatcattttaaagaccctggtgctttgatcttagagcaccactcatttgtactcagttcagatctaagtgaattactgtgcaaacgacatgacgagagaggggcattttccaatagtagcttctggtctggcacatgagccagttagagattgacacacgcagtcatgtagctgctataaattgaagcctggtgatggacgtactacaggcatggctgcagcgaatgcctatgacctttcacttctcctccctctgtcactctgtgtattcgctctctccattttcctccctcacctattcaccagccatgaatcaggagtggactgggcaaggatcagcctgtagggaaatgatgtgggccgagggtaaagagtgaggaataattaaggcagcccttgaattagttgtacatttttttcttttgtgtagtcttcttttttttttgtaagcaaacaaaaaccacgttgctggccaaatgtagtggctcatgcctgtgatcccagcactttgggaggtccaggtgggaggattgcttgagtycaggagtttgagaccagcctgggcaacatggtgagaccctgtctctataaacaaataaattaaaaaaattagctgggcatagtggtacccacctggagtcccagctaatggggagactgaggtgggaggattgcttgagcccaggaaactgaggctgcagtgagctctgattgtgccattgtactccagcccgagtgacagagtgagaccctgtctctcaaaaacaaaaaacaacactttattatggatgatttcaaacataaacaaaagtgaagagagtagtataatcaactctcaggtacacgttacccagcttcagttacccactcataacctttcttgttaatttctacaaaaagcttgctgggtcttgttgaatctgttgatcaatttgggaagaaatgccatcttaacaatactgagtccttcaatscaagaacctggtatctccttacatttatttagatattatttaatgtatcaacaaagttttgtaattttaacttactaattttgatgctattacaaatggaattatttcttaattttgtttttggattgttcattgctggtatacacaaaacagttgatttcctgatattgattttgtatcttatgaacatgttaaacttgcttattagttctagtagttttttgtagactcctgaagattttctatatatagagctagtgaatatgaagagttttacttgttttccaatctgtgtcttttaaatttctttttcctgccttattgttctggatagcacctccagtacaatgttgagtagaaatggtgagagtagacatccttgttttgtttctgaacaaagaaccaacttttggtttcatcagttttctctattactttccctaattcattgatttctggtctagtatttattattgccttccttctgctttttttgggatttagtttactctcctttttatagtttcttaaggtggaaactcaggtttgtgttttttttttttgagacatgatctcgccccgtggcccaggctggagtgcagtggtgcgatactggctcactgcagcttccaccttccaggctcaagagattctctcacctcagccccccaaggagctgaggctacaggtgtgtaccattgggccagctaatttttatttttattttttgtagacacagggtctcactatattaccaaggctcttcttcaactcctgggcttgagcgatcgtcccagcttggccttccaaagtgttgagattasaggtgtgagccactgttccctgctgatgctcagtttattaacttgagacttttcttttttttttcctgatacaggcttttaacattataaatttctccctaagtacttctcatagctgcatcctaaattttgatctgctgtgtttttcttttcatccagtttgaagtatttttaaacttcccttgtgatttcttctttgacctttgaatcctttakatatgttttctaatttctaagtagttggggagtccacaaatttatttctgttcttgatttttaaaaatttcattttggtagagaacatgctttatatgattttaattcttttaaatttattgatacttgttttatgacctagcccatgattcattctagacaatgcgatatgtacacttgaaaagaatatatattctatttgttgttgcttgacatggtctacagatgttagttacgtcaggttggttgacaatgctgttcaaagtctgtatatccttgctgattttctgtttaactattatgtcaattattgagagtgggatattgaagtctccaaacattattgtgaattgcctatttctccctttggttcagtcagtgtttgctttattgtattttgtgctctgctattaagtgcttatgtatttatgtttttatatattcctcatgagttgacccttttattgttacaaaatttctttttctcttataacttttttgtcttaaagtttattcagtctgtgggatttttttgtgtttttgtttgtttgttttgagacagggtatcactctgtcacccaggctggagtgcagtggcacaatcatagctcactataaccttgaattcctgtactcaagcaatccacctgccacagcctcccatacttactttgatattattatagccactgcaactttcttatggttttgtttgcatagtacatttttctccatctgcatctcttgcagacagcacatggttagaacttctaaaaaatttaatctgacagtcttcaccttttattggagtgtttaatccatttacatttaatgcaattattgatatgcttggattacatctaacattttgctatgttttctctgtctcacatctttttgttctgtttctccttactgttttcttttgtgttaaatagatattttctagtgttctgttttcatctgtttggtgaggtttttaatattttttggttatatttttagtggttactctaaggattgcaatatgcatctcatcacagtctactttttaaagatctatatatagcttttaaaaagtagagatggggttttgccatgttgcccaggctggtttcaaactcctggattcaagtgatccttccatctcagcctcccaaagtgctgggattacaggcatgagccactgtgcctagagctcacagtctactgtagattaatgctaattcattttcaataaaatatagaaactttgttccattaaatgtctatgtctatctacctcctctgtggtattatgtcatgtatatgatatctttgtatgtcataagcccagtagtaaaagtctgtagttattgttatatgtacttgtcttttaaatcagttaagtgtaaaaaagagactatttataaatctgctgtatatttgcctatgtaattagtattactagcattctttatttcttcatgtggattcaggatataatctggtgtttttttctttcatcttgaagggcttcctttagtatttcttgtaagtagggtctgccagtaacaaattttctgtctttgtttatctaggaatatctttatttctacttgttagttttggggtatggttttgatggatatggaattcttgattggaagtttttctttcagtgctttgaatatgtcattttactgttttctggtctctgttaatttctaacgtgaagtcagctgttaatcttatggtagtgctccttttcatgaagaaccattttgtcttcatgcagtcaagattttctctttgtttttggcttccagcagtttggctatgatgtgtcatggtggctcactttattgagttggagttttttgagcttactttgagtttgttggatgtgaacattaattttttaaaatcaaatgtgagaagtttatgccattagtttttcaaaaawttttttctgcttccttttgcttcgttttcttttgaaacttcctttatatatatgttggcatgcttgatggtatccctgtgtttctgaggttctttttatttttctttatgcttttttatttcttcttcagattggataattttaagttcactgattctttcttctcccatgtcaactctgttgttgagcccctctagtgaacttttcattacagttattatacttttgaactctagaatttctgtttggtttctttttataatttctgtctctttattagtattctctatttgatgagtcattgttacatactttcctttagttctttaaacatgaattccttcagttccattcttacagtagtttcttataactttgaaatctttgttaagtccaatatctgggcccccttagagtttccagttatgactcttgcctgagtataattcacaatactttatgtttctttgcatgtcttatattttatttttttaagctctgtattttagttaatacgttgtagcaactctggattatgatcacctttggcaaaaygcaggtttgttgtttatttctttttgtttgtgacttgcctggattaattctgtgaagtctgtctctgtagcagctgctgatgatcctgctcattttttttttcttatttttaaaatgtgtttaagcctggctttgcaggggttaacccaggtcagcatagcttagtggtcaggcaatgattattcagaggtgtgctgaaacaccttgagctactaatgcttttcacagtttgcggtggatatgtgtgtacgtttagggacatgttcagaattcaggcatatattatacgagcctgtcttggtttttcctttttgccaggccttttctggcctcctttgtgcgtggggtaggcctcactttagccaaggatgagtggataaccagggccctcttcagtctttcctgcctgtgtgcagccttccagagcacgaagaatgtgtgggacttcagggactttaccactgcccgtgatagctcccttattctctgtatcttccggctaggtttttggctggtctcctgatctgttggttgccacaaccrgcattgcaggctcagggtggctgagatgttgaccttctgtacatttcctgttgtttacaggaaatcaccgtggtttatgtcagtgcctttgggcatgtgctctcctccaaatcaagtcaacccctccagcagtggagccaccaattttcacagctcrtcccaccctggtagatgtagcagcatgggtgagctgaggggaaggaggggagcccctcaagccaaagcatcacagaacaccaccgctctaactcaagatttggtcatttttcttcttcattttattttttaattcttgagatgaggccttcctctgtcactcaagctggcgtgcagtggcacaatcatagttcactgtaacctcaagctcccaggctcaagagattttcccacctcagcctcctgagtggctgagactacaggtgtgcatcaccacgccaggctgacttttttgtttttcgttgagacggggtcttgatatgttgcccaggctggtctctgactcccagcctcaagcaatcctcctgcctcggcctcccaaagtgctacaattgcaggtgggagccaccatgcccagctgcgtagtttttcttgaataaacrtttttcaattttttgtatgtctttggttgatttccaaccctgtggtggttgtttttgacmgacttgtctagttttgttgttactttttgaggagaggttttgccaagcttctcacttcattattccagaagttcttcccctctccccaggtcatctttttggttttttcttctaactttctttccttctttttttttctttttttttttttttgcgatggattctcgctgtgtcgcccaggctggagtgcagtggcatgatctcggctcactgcagcctctgccttccaggttctagcacttctcctgcctcagcctcccaggttgctgggattacaggcacccgccaccagctaatttttgtattttttagtagagatggagtttcatcatgttggccaggctggtctcgaactcctgacctcaggtgatctgcccacctcggcctcccagagtgctgggattaaaggcgtgagccatcgtgcacggccggtttttcttccaactttctaagtactataagcttgttgtaaaatttggcaatatagaaatgtataaaatggaaatgaaaatctttactaatcccatcccttaaagatagccactgttaataagttagtgacttgctttccaagctttaatcatctttctttaatcatcatatttttgattatatcctcttaccaaarttcctttacccctcaccacaaaggtttctaattcagagacttcctttagctcccttgattcaaggagataaagttaattagcaatcaggagatgaggagccctttcctggcaaggacagaattctaagacggagggatttttagctcctcggtggactcagttccgctgcaccttttgcagcatcttgcctgctgggtctcctctctgcagttttcttgttccctggccttttatcctcctgatcacacataccttcccaggttctccaggaaagtagtggatcagtcacttccccctgcaacgtcattgtaggcatgattacatcttggagtgttctctcaacaagagtcagtgtagcatggggttccgggcctgagmtctggtgtcacattgcttggagttcaaatttcaattcttcttcttttttttttttttttcttggagacaagagtttctctgtttcccaggctggagtgcagtggggcgatcttggctcactgcaacctctgcctcccaggttcaagtgattctcctgcctcagcctcctgagtagctggtactacaggtgcacgccaccatgcctggctaatttttgtatttttagtagagacgggggttttaccgtgttggccagggtggttttgaacccctgacctcaagtgatcttgccaccttggcctcccaaagtgttgggattacaggcatgagccactgcgcccagcctcaactctctttttttttttttttagacagagtctcactctgtcactcaggctggagtgcagtggcacgatctcggctcactgcaacctccacctcctgggttcaagcgattcttctgcctcgacctcccaagtagctgggattacaggtgcccaccaccacgcctggctaatttttgtatttttagtagagrtggggtttcactatgttggccaggctggtctcgaactcttgacctgaagcgatctgcccaccttggcctcccaaagtgctgggattactcaactctccttcttagagtcctttgtgaccttgggttccctgggccttggttttctcatctctgaagtggggctgggagcaactcttgsagcactgggttggaacgtgctggccacagtgctcacacatcgagaacacgccgtaaatgctccccgggcctccgcttcctggtgtcgtcatccttattcagaatgaacaagaaatcactccttcagagtaatgtttcagacagaggagagagctttgtgggggccctctggcgtgctcacagaagctttggtattcgtcaaccactgtaggagccaagcatttcctacagaatgcagggagcagggctggcggggagatagtgcgtgaaaagagaggctggtgttgggaaagaaacagagacagaacggtggccggcggacaaacgacaataagccaggatgatggtgtcactgcagccgggtgcggagtttctttctggggtgatgaaagtgttctaggttgatggtggtgatggttgcacagccctgtgtgaatatgctagacaccactgaattgtaccctggaaacagatgaattgtacggtatgtgaattatatctcaataaagctgttattaaaaaaaagatggacagtcccagctactcaggaagctgaggcaggagtattgcttgaggccaggggttggaggctgcagtgagccgagattgcaccacggcactccagcctaggcaacagaaccagacgcttctctttaaacaaaaacctaaayaattgtagatttttttaaaatgaggctttttgttttttttatgccaaaacccttcatagacatgaaataacagaagagtaagattggcgggggtgggggggggtttcatcagtacaggttacctgaaagaactgagttgttggtctgacctctgctaggactcgccatgtgtcatggcaggcctggcacctgaaggagagctttagcaatttgcactcacatcatcctggacctcagcctgggtgatggtcactgtcttgagacagcttcagaacaggcaacctgggtgtggccgccttgtcaaccagagataataaaaacacaggtaaacctctgcacctccatcgtcaykcygaattataacaacagcacatatttgttgaagtcttactatgcactaggcacagtgctgagtgcccatgatgcagaggggaatttgagagtgtcagtcatttctgccccttcggatcacgcactgctttccagtgttcccaggagaccagttttgaggttagaattctgcttcttacagtgaggactgattctgactcctaggaggacgaaagccccttttaaatttactttggctgggtgtggtggctcacggctgtaatcccagcactctgggaggccgaggtgggtggatcacttgaggtcagcattttcagaccagcctggccaacatggtgaaacaccatctctactaaaaatacaaaaattacctaagtgtggtggtgcacgcctatcgtcccagctacttgggaggctgaggcaggagaatccctggagcccgggagcggaggttacagtgagctgagattgcatcactgcactccagcctggatgacagagtgagactcgtctcaaaaacaaaacaaaacacaacaaaacattactttgaagccacagcattttgcacaggtaggaaaactgstgggcctggagatcttctataaatatgttgagagctgatgttgaagagattattgaagaatcctgatgtcacagaattttctatagacaacctccttgcggggagggcgcagctttcgggttctgtatcgcacaacaccggctgggagctccctgcatgtgtgtttccagcactgcctgtctatgggagctaaggaagtggcttcaaaaccgcttgccagagacgcgcagtcacccagtcgttgcagcgcttgtacttgtgggagctgtcttgcaggctcaggcatctttgataaggaattcctcatacttagaagtggcacctttgttctgctggggaattgttcccaaaaggtatctttttttttttttgaaacggatcctcgctctgtcgcccacgctggagtgcagtggcaccatstcggctcactgcaagctctgccttctgggttcatgccgttctcctgcctcagcctcccaagtagctgggactacaggcgcccggcgccacgcctggctaatttttttgtatttttagtagagacggggtttcaccgtgttagccgggatggtctcgatctcctgacctcgtgatccccccaccccggcctcccaaagtgctgggattgtaggtgtgagccaccgcgtctggcctttttttttttcctttttgagacagagtcttgctctgctgcccaggctggagtacaatggcctgatcttgactcactgcaacctctacctcctgggttcaagcaattctcctgtctcagcctcccgagtagctgggattataggtgtgtgccactatgcccagctaattttttgtatgtttagtagagacagggtttcaccatgttggccaggttggtcttgaactcctgacctcaagtgatctgctcgcctcagcctcccaaagtactgggattacaggtgtaagccaccacgcctgaccccaaaagacatctaaaaaggctttttcacttgtgaaatctgctgaatagagctggcttcctgaggcctgggggcccttcccggtgtggaagaatggctctgctgttggctaccacagtgctggggcctgtactcccacctcctctgcctctgtctgccttgtgtgcctccccttccgcgggggccctgctctctgcctctttctgaccttccagagtttttgaggtgtgagtgtgttgttgaatttcatttacataataattaaagagtcagggtttcatgatctactgatgtaaaacccgcaaaaaccctaaaatctcgagtggtgttgtacagcatgtgggattcttttgtataacttgatgattttcaaaatatccatttcggctgggcacagtggctcacacctgtaatcccagcactttgggaggtcgaggcaggtggatcacgaggtcaggagatttagaccatcctggctaacacagtgaaacccgtctctactaacaatacaaaattagccgggcatggtggcgggcacctgtagtcccagctactcgggaggctgaagcaggagaattgcttgaacccgggaggcgkagcttgcagtgagccgagattgtgcyactgcactccagcctgggtgacagagcgagagtccgtctcaaamaaaaaaaaagaaaaaaatccatttaatcagagccatacttgttgattactacaggtgcttcccgtatctaatacctccagcaagaaggtttgcgaaatgggcagagagtaatargaagagtttcaggaagatggtttgagtgaaaatcatttcagaaccgagccctgcgaagtcttggtttctgcaatccaccacastttgggaaaatcgggaattttgtttagtccatttctatttttgtgcaccacaaatatgtaaacaaagctgggatcttcgtcgggggcggrgggaagggcgacagaaccctgacatctaatactggtcatcggtatttccatgtgtttcctgatcccattgtctctgctatttaaattaattaattccacaagtatgcactcagtaaatattgtgagccaggcactattctcggctctgtggttgcatcagtgaacaaaacagacgstaatcctgctttcgtgagccatctataatagaatgggcgagtcaagaaattgacacatgcattagaaaaatatgtagcgtgtcgctggtaagtgcttgagagctcatcagggaagggcaggagtttgtggagtgggggtgagggatgtggggtggggcggggcaagggtggcaagaggcctggggctgctggttgcaactgtaaccagagtggccagggaaatccttgctcctctgggtaatgccctatccrgaagacccttgcaaatttctaaaatgctgtgttttattaccgagaaagagtcgtctgggagctctccgaggcaaataacttttgaagttggcatgagcaggatattgtgcaatggggctcactggctkcktcccaggcctccgcatctgatgtgaaccacagctttgcaatcggtccccgtgccatccaaaaatattttgtgaccttgccggttggcagttttttaaaaatgttattttcagtctccaaaaaagggaaacatcaaagtgcaggctgtccactcctgcccttcttgatagacacagacagctgggccacacaatcagccattgtggcgacaagtgcccaactgttataaatagacggcgggctcgcacgtgaagcgctccagaggaagggcaagtgctctggggacactgccaactgctgtttccgtcgagagctcttctcaaagatcaatattattttatgtctcagtgactgaatttgaaaaaacgactgtgaaagcacctggtaacttaactgtctccaggattccattccaaacgcatcttctctcttcactgttaatcttagatgtttcccatgcttatttagtaatcattgcctgacggcccacttcactgcgatttacagtctcttgcggctcacttgaaatggtagagttatggataaccgcgctggtgtatgtgcgtgtgatgcgtggccggaagcgcatgcccattgaataatcacgttcgtcccacatcttagcccctcttccaagacatgtttactatcgtttacgtgtgacatgtcaaaacatcttaaaactatgccacgcatgtaataggctctcagtgattaaaaaatcagtttgtctcttaaggagaaaagaataacagcatgtgactcttgtgagtccctgacaaagaatctgttgttccccgtgcacttgaagagccgctcatgtcaagaagcaacttgtgattatgcaatgtgtgacttaaggcattgtcagatgcgttcggctgaaacgggaccccgccccagcagtttgccttactaagttaacatggtaggtcagattttagtattgtagaaaaagccacattcaatattctttgagtagcatatttatttcctagggctactgtaccaaagtacctcaaaccaggtggcttcaaacaacagagttacacgctagttgatatctagtgattcaaagaacagaattccacactagttgttatctaggaatgcggagtgagtgatagagggggttttggtggcgttatattctaattttgaagtaagtttaaatttacagagatgctcccaaacagtataaagaattcccaaatactcttcacccagattccctgaattaacattccgacatgtttgtctgtctgtctctccacatacacacatcccttttttccggaataatttgagaatagactgcagagagtgcctctagattctcctgtgtgggtttcctaaaaacaaggacgctgtccyggatagcctgcaccgacctgcccaaatcaggacgtgggcactgtcacaccatgccaccaaatgcagaggccccggagcccgcccaggaccacaggcgccgtctgtgtcaatggctctcgagtctccttcaatctggggctgttccttcgtctctgtctttcacgaccttgacatttttttaagagaacaggccagttactttgtagaatgtccctcggtttgggctggtctcatattccttcatgatgagaatcaggtggtaggttcctggcaggagagtccctgcagggttgtcacgacaggaacgcacacaggtctgatcagtcccatttctggagaagttaacttatcatttggttgaggtggtgtctaccaggtttctccactgtaaaattaatttgttggtattttgtaattatcagttaaaaagtactgtttctggtggggagattttttggggactcggaaaatatcctgtttctcattaagctttttgcccatttgttttagcatcctgggatgattcttgcctgagggaattagtatgagcattgccaaatggtgatgtttctagttgcattgtttcttttgcattgattagttggcattccactgcaagctggagcttgcctgctgtctttctctccttcctatcaatacactcatagactcctattttacccattgggttataattcattaccattatcatttgcttcgatacccagattgtcccagatttggccaaaagcagcgcctccaagctggcccctgtgttcttttgatgtgttcatgtcattctttgagcacatcyttacttcttcttcttttttttttttttttagatggagtcttgctctgttgcccaggtgggagttcagtggcgtgatctctgctcattgcaagctccgcctcccgggttcacgccattctcccgcctcagtctcccgagtagctgggactacaggcgcccgccaccaygcccggctaatttttgtatttttagtagagacggggtttcactgtgttaaccaggatggtctcaatcccctgacctcgtgatctgyctgcctcagcctcccaaagtgttgggattacaggtgagagccaccatgcctggccargttttttcgtttttgtttttgttttttttgagatggaatctcactctgttgccccggctggagtgcaatggcgtgatcatggctcactgaaacctctgcctcctgggtccatgcaattctcctgcctcagcctcccatgtagctgggattacaggcgtgygccaccacacccagctaatttttgtatatttagtagagatggggtttcaccatgttggccaggctgatctccaacttctaacctcaggtgatctgcctgcctcgtcctcccaaagtgctgggatgacaggtgtgagccactgctcccggccacatgtttagttcttggttctaggctcacccggaactttccttgctccagccctggaatcagccatttctccaataagccctggttccttttagtagaaagtggtttttagaaaccaggatctaagtattaggtgtgttcacgctactgggctattacggctacaaggacttctcaagcagcgtagttaggaatttttttttttttttttttttttttgagacggagtttcactcttgttgccaagactggcatgcagtggcaggaacttggctcaccgcaacctctgcctcccggttcaagcagttctcctgcctcagcctccctagtagctgggattacaggcatgcgccaccacgtccggctaattttgtatttttagtagagacggggtttcaccatgttggtcaggctgggtctcaaactcctgacctcaggtgacccatccatcttggcttcccagagtgctgggattacaggcatgagccaccgcgcctggcatagctaggaaattaaacatatgcatgtacttccctacacgtacacatatgtttgtacatacacacacgggcacacatgcgtttgtagttctttgtatccatctgtcccrctcgtatctatgtatccattcatctcatataaaaatcatgataccatccaagtcaaatggtttgtttcagctttctcccctttccttggctgtgcccctcttttctaacaataacagtaacagctcttatcatattaactgtttttatttattgacccttgtatgtcaccagtcttctgacatgcaggccatccagtccatgttcctggcccaggaacatggcagccaagggtccccacccccacttcggcccccaacagtggactctcgggatagttctttttttttttttgagacacagtctcactctgtcacccaggctggagtatagtggtgtgatctcggctcactgcagccactaactcctgggttcaagcagtcctcccaccctagcttcctgagtagcagggactacaggtgtacaccatcatgcccgtctacttttgtattttttgtagaaacagggtcggtcttaccttgttgcccaggctggtggatagttctttatagcagtagcctaaacagaaaaacatatacaacataagctaagaaaaaggcctcccttatcgatatttctgggttaatctgaaagattttgaagtctggaagaatcagctggttgttggtaaagggacggtggacatgaaggatgcggaagggatgggttggaggcgggaggtgagtttcatgtggtgtttttgactcagagggtcacttttattgttctgccttgtagtcagaagaaaaatcttttcacgtggtttcggctcagaagtatgttagaaagtagactacagagactgaaggtgacattccagagactttttaaggataatctggccaaaggtgtttactatttgattagccagcatccttgggctcggctagggtcttggtctggtctgagaacatgttgggggattgtgccagtgtcggtggtgggtgcctgtgcctggtcatctatgggcagctaggggtgggtgctgccccttccgactttctctccactgcagagacgaagccttcagcagcatttccctggaccctcttctctctggtcccaggtcaggttctgtacagcaatggaaagcaggggagaggatgcccacgctgtgcgtggccgtttggagcagactcagggaccagtgggacctcctcttctgggtgagcttggcaaccactcttttaggaattccagtttgtaatgccttccgggtgagccctgtgagtcgcttgctcttagtagtgtcctttgctgccccagccttctgcttccctgtatttaaaacctttctgagccaggattacgatttcctgataccatgactgacccttggtcgttatgagtcctgatggtcccaggagcttttccttcatttgcttgggttttgagttgtgagctggagaccaggggttttgcttgatggggacattcctggctcttctcctggggagtgaccatgggccctgcctaggtgagatcctctggattgtgaggagggacttgagcagccctactagagtgccgtctatgggaaccctcagcatcgcctgtccaagccagcatctagtggacgctcacgctgtgtgagacactgagcttatccagcaagggcagaaatggcagctcttgggaaagaagggagtggggcatcgctgtgtctcctattatttgccattgtggcctccctctccaggtgcaccgaggggcctatctgtgtgattcttgcaggggtactgacgtccgtttcatctcacccgtgtccctctacaagtgcaggagttgtagggctatgttattcttaggtagcttaatggatccattttcataataaactccattttattttgtttgccattgtactgccatttgcggaacaaagagaagttatataaaccacagaagggggagaatgtgacccaggaataaactgttgtgtttcacagtaagtgtatggaactaatttagaatgatttttcattgtcaaacaaagaacaaatggaaatttgaacaatgcatggttacttttaacaaagacttcattttaatgttattagtgttttctcattttaaaatggcagtgcaaatataaccttaaaatagggtttatgactaattacatttcttttttgtatgtctgacaatttccaattattgggtgtttgtgttccccagcccaccctcccccaaaaatgacagggaacagaaaccagtgaaaagatctctctttggcgcccttcccagactasgacctgttttgttcagggtgagcacagaggagaactgggtcctcttgtcaggctgaaggggacgtcacagaagccccaagtgggtcacggcagagcgtcagccagaacctccagggctcactcccaggcctcagtcaccagatgcttcgtggctacctgggtaagggagggttcagggcaagttagggactgcaatgagaaaacaacacactctggccggatgcggtggctcacgcctgtaatcccagcactttgggaggccgaggcgggcggatcacctgaggtcaggagttcgagatcagcctggccaacgtggatttcaaccaaggacctgcttggtcatagatttcaaccgaaggacctgattggtcatggatttcaaccaaaggacctgattggtcatggatttcaaccaaaggacctgattggtcatgcagacagaactttgaaggctgtcatgggttgtgtccatgttgtttggttttccatcttgaacgaataccagtgtgcgtctaacagctcacacagaagcccattggttacaaaggaattgcaattgtcaatccaattgccccccagggagaactgaagatttttttaaataatgtcttcgtaacagctgtgtaagtcccccaggcccttaactagagaaaccacatcacagaattttatttactttataaattctaatattttagaattaagataatttgtagtttagatgatttttgctaagctagctctctctttctttttatctcttcctttctctcttttctttctttctttgatggagtctcaaaaaaaggagaagggtgtccaaacatcctggatgaaaatggctccatgctrtcatagaattttatttactttataaatcctaatattttagaacttaaaaaagatactttgtagtttagatggttatagttaagctatttcattttttttaaaaaacgaagaaattagcattcaatgtctgcctagaaacaatcttatatacagtccttatgtacaaatcttttttgtggaatatgttttcgtagttttttgttttttgttttagattgggtcttgctctgttgaccaggctggagtccagtggcgtacttatagcttactgcagcctcgacctccagagctcagtcagtcctcctacctcagcctcccaagtagctgggactgcaggtgcatgccagcacacttggataatttaaaaaaaaaactttttttttgttgttttgttgagacggggtctcacttatgttgcccaggctggtctcgaacttctgggctctagcgaagctctttcattttagaaaaggatcatgtcacctcgatatgtgaggtctgtggaaaatcttgctttaagatgatctgcgtgaactagtagcttagattattgagtcttattttcttcagaactctgataggcacaattactagatttaagttaaagggctgtaaaacagcctcagtactttttcatgaagtagacaagtttcacagtgctttggaaatgactactaagctactcccagcctgctcattgagaactcacgrtttcctctggatgagtgggaatgttgttggttctgcatttgtcatcagtgcttaggacacacacacacaagcaacgtgtgctggcccatgcagtttttccttatttacaaagctcaygtgagaattgtgactctgcccattcgtggatctgcacaacatatggtgacgaatataagttcgggggcgtggggggaatgcgcatgtgctawggttcagtgctgggcactgggtgttgtggttcagtgctgggcactgtgtgccgtggttcagtgctgggcactgtgctgattgcttctgcgactccggacagatacttaaggctcagctcaggttcgtcattaacacgaatcacaaattcagacctggtgccgtggctcacacctgtgatcccagcactttgggaggccgaggcaggagtatcacttgagcccaggatttggaggccagcccgggaaacataggaagacccccaactctacaaaaaatatgaaaaaaagtttagccaggtgtggtggtatgcaactgtagtcccagctactggggaggctgaaatgggaggatcgcttgagcctaggagttcaagaccagcctgggcaacatgatgaaacctcatctctacaaaaaaaaaaaaaaaaaaaaagaaagaaaaaaagcatggtggtgcatgtctgtagtcccagctactcgggcggctgaggtgaaaggatcacttgagccaaggaggtcgaggctgcagtgagccaagatcgcgccactgtactgcagcctgggcaacagagtgagaccctatctcaaaaaattcacaagggttttcaaagctagttactgcctgagaccatcttcccctcttggatggatgcagcaaattgggaggcaaaattatttggctcttttttttttttttttttaaggcagagtcttgctctgttgcccaggctggagtgcagtggtccgatctcagctcactgcaacctcagcctcctggattcaagcaattctcctgcctcagcctcctgagtagctgggattacaggtacacgccaccacacctggctaatttttgtatttttagtagagacagggtttcaccatgttagtcaggctggtcgcgaactcctgaccttgtgatctgcccgtcttggcctctgaaagtgctgggattacaggcgtgaaccaccgtgcccagccgcgtttggctccttcctaactaaacagagattaaactgtttattsttacctgggctttcattttttcatagcagtcactttattttcatctctttgtcctcagcttcccctcaaatatttgtcaagtgtctaccaaggctgggaatgatagtaaaaggagtttaaaaaacaaaagaggctctaaaaatggtactagactcttccattcaggactttgtccaaagcctcactttataatgcttttgtgatttatcctcattcccataaactcagatgatacgaatttatacgagtttgcattaataaatatttcttgcatgcttgtcttatcaaccataccgagccagcacagcctcatctcgtaaagagttggcagtcacgtgcgggagccgggagcccgttgctgtgaggccgggaagtggattgttggtctggggaaagatttattttctgggggcaaaagaggcggggtggagagtccctccgcctgcctggagtgctgatgtggcctcagagctaggycctgaaaaattgctgggatttagatgcasgctctacatgtagagagattgtttaaatgtataatggttcagaagtgacactctcttgctatgtttctctgaaaatagatcagccttctctgttgggatctatgaagctccagagataaaactgatatacattaaagtggctcgtggttaaaggaagtatgtttgttaatattaaaccgaggtttctctggtaactagattttaaatgatttgattccataggtttataatggagaaatccagatctccaaaatgtaagttttactatatgggaagcctttttttkatttcctttgctgtgtttggtaaatagcctggaagaaaatggctccgtcctatcacagaattttattatttacttcataaacctagtgttttagaattttttttttgtttttttgtttttttgttttttttgagatggagtctcactctgttgctcaggatggagtgcagtggtgcgatctcagcccactgcaacctccgcctcctgggttcaagckattctcctgcttcagcctccggagtagctgggattacaggcacacaccaccacacctggctaatttttgtatttttagtagagatggggttgcaccatgttggctagactggtgtcgaactcctgatctcaggtgatccgcccacctgggtctcccaaagtgctgggattacaggcatgagccaccgtgcctggcctagaattttaaaaagattctttgtagtttagatggttctagttaagctatttcatttttttaaaaaggaagaaactagcattcaatgtctgcctagaaaacaaaaataaaaaaacaacaaaaaaggaagaaactgaggtctgtggcacttaagtgccccactcaaggttgcagagttcctagtgatgttattttttaatgaacttttcttctccttctcttttttgttaaattttggcagactgttttaccaaagcctaactgtacttttcttaattaactttggaatgaattctggatatactcattccagcaatgcacagaaaattctaggcaaagaataaaagactccacattgkttattattattatttttgagatgtagtcttgctctgttgctcaggttggaatgcagtggcggaatcttggttcactgcaacctctgcctctcatgttcaagtgagtctcctgcctcggcctcccaagtagatgagattacgggcagctgagattacaggcacgtgccaccatgcctggctaatttttgtatttttagtagagatggggtttcaccatgttggccaggctggtctcgaactcctgacctcaagtgatcctcctgcctcggcttcccaaagtgctgggattataggtgtgagccaccgcgccgggccagactccacattgtgaaaaaacgagggaaccgcttctgattttgctccagtggtgtattcctctgtcttgttataatgctttatgtttacatataacacattataygatttttaaagcaaccccacagggaagagttttaattttttgtttgtttgtttttgagacagagtcttgctctgtcgcccaggctggagtgcagtggcgccatctgggctcactgcaagctccgcctcccgggttcacgccattctcctgcctcagcctcccaagtagctgggacttcagtcgcccgccaccacgcccggctaattttttgtatttttagtasagatgaggtttcagcrtgttagtcaggatggtctcgatctcctgacctcgtgatctgcccgcctcggcctcccaaagtgctgggattacaggcgtgagccactgcgcccggccgagttttaatatttttagtcctgttttacaaaggggagaaacgaagcacagagaagtttaggaacttgcccaaatcatacagttgataagttagcagaccaaaaccggaatcgtccaaacggagtggcagccagaaagcattttataggtaaagtcacatcctacactgtaaataaaaacctcttggaacacagagttcgccaggtggctgttggattttcatgtcagcgctggtctagctccgttttgcaggattttttgttgttgttatcacagtatattctaaaaataactatatgttcatttccactctytcagataattaatatttataaatcctagtcactaggaaatatagttcaaccaacaattgaatggaatgcaggtcctctgggaacttatctaaaattaaatcctattttaacagaattagctagattaaggtcatggtgtaaaaactgatttttcagaaggaaataaaaatgcaaaatatcctaagaattcattttgtaaataattgaatcaaataacaatggggcggggaagaagccatatatttttcctctctttttagaaatgaattgaaggccagacatgctggttcacatgtaatcccagcactttgagaggccaagcgggagaattgcttaagcccaagagtttgagaccagcctgtgcaacataggaaaaccctgtctctacaaaagaatttaaaaacagctgagtcagctgggcgccgtggctcacgcttgtaatcccagcactttcggaggctgaggtggatggatcataaggtcaggagttcragaccagcctggccaacatggtgaaacccccgtctctgctaaaaaaacaaaaattagccaggagtggtggcggacgcctgtagtcccagctactcaggaggatgaggcaggagatctgcttgaacccgggaggcagaggttgcagtgagtcgaaatcacaccagtacacttcagcctgggcgacagagcaagactccgtctcaaaaaaaaaaaaaaaaaaaaaacttagctgggggcagtggcacatccctgaggtcccagctacttgggaggccgaggtgggaagatggcttgggcccaggtgatcgaggctttagtgagctgtgattactccaccgtactccagcatgggcaacacggtgaaaccttgtctcaaaaaaaaaaaaaacaaaaaaaatcagataaataaaaacaaaaaattgtttagactcatgaatcatcaactttttctttttctttgcccattttcttttttaagtattagcttggcattaaagcagtagtatatgaagatggaatttgctagtactttatttgtgattccagagttaaatgctactgcaatcaagtcttccttgaatttagcaatagatttaaaagtttagaaagagcctctttttttttttttttttttttggttttaatacggggccttgctttgtcgcccttgctcgatcgcccagtgatctcagctcactgcaacttctgcctcctgggtttaagtgatcctcctgcttcaggctcccaagtagctgggatgacaggcgtaaaccactacgcccagctacattttgtgtttttagtagagacggaggtgtcaccatattggccaggctggtctcaaactcctgacctcaggtgatccacctgccttggcctcccacagtgctgggattacaggcgtgagccaccatgcccagcccaagtctagctctttagaaggaaaaaataagggtagaaattcagagaaggatgagtgtggagtggcttccttgctctatttctagaacatgccatttcttgggaagtcttatgaccctgctggtctttaatgtcccctatatgattttcctccctgggctttgattctctgccttatctcctgtggtcttttccatccagaaattttgaaggggtatttaccttcaacttaaaactgactactacaggtaagtagtggccctgctgtttccaccctcccatgtctactggaagcagaattgtttcacctgtctcgttggaaaatcaaatgaggtaatggaaatgaaaagtactacacaagtgtgattattaaagacagttcagtcaataggtgaaaagactcgtgtagatactttatttaacctggaatcaatgtcttatactcagtagacactccttagatgtgagtttaaagatgtcattactcctataataccagcactgtgggaggccaaggcgggtggatcacctgaggtcaggagttcgagaccagtctggccaacatggtgaaatctcgtctctactaaaaatacaaaaattaaccaggtgtggtggcggctgcctgtaatcctagctactcgggaggccgaagtgggaggatcgcatgaacccaggaggtggagattgcagtgagccgagattgcgccactgcactctagcttgggtgacagagcgagactctatctcaaaaaaaaaaaaaaaattaagaagatgtcattttaatgagcagttctttgttaagtaaagaagaagaggaaaccaggaaatatgatagtgcttggccacctcaccaagtgtttgtcttaaaagaagctttcttgattaagtaaaaatttaaaaggaaggaaagaaaaacccaacctcaccgcaacaaactaccctagtctgaggtaattgtgtagtgtaatgtccctacacctgaatttttcatgcacctgcagatttaggggctctgcctatctttgagtataaatgtccactgaattattagcaaaatgatttgttctcagaaaccaaaattttagcctagatgaatgccgccattggagttatttatatgaaaaggcgtgttaagctcaatggtcttctcttctcttctcttgttttcttttcttttggatttgagacagggttttgctctgccacccagcctggagtgcagtggtgcaatcatgggtcaccgcagcccctacctcctgggctcaggtgatcctcccacttcagcctcccaagtagctgggactacaggtgtgcaccatcatgcccagctaatttttgcatttttcgtagagatgggatctcactatgttacccaggctggtcttgaacacccgagctcaaacgatccgcctgcctcgacctcccaaagggctgggattacaggcgtgagtccctgcacctgacctcaattgttcctttcagcaaaagtaaaattttaactttcaagggtgcaatcctgcttttttttttttttttttttttgagacagagtttcactcttgttgcccaggctggaatgaaatggtgcgatctcggctcactgcaacctctgcctcccaggttcaagtgattctcctatctcagcgtcccgagtagttgagattacagatacatgccaccgtgcctggctaatttttgtatttttagtagagatggagtttcatcttattggtcaggctggcctcgaactcctgacctcagaacatctgcctgcctcagcctcccaaagtgctgggattacaggcgtgagccaccgcacctggcctgcaatcctgcatttaaagcatttttaaagtgtcgttggaacacttaaaaagacaagaattaaaacagtagcagaacacctaaaatggcaaggaaacggcatgagggcgtgtaacacagaaaggggtgggtgtttgagaaacagcaccgcaagtacgtggggaagcrgcaaagatggaggacatgggagatgggggtggaaaggggcttggggcctggtagtgaaagactttgcatgccacgttagagtctctgctctgttctgttagcaggagtttgtagtagtacctattcacagactggtgcgggttaactgtgagggtartgcgtgtaaggtgcttagaacagtgtttgacacataatccgtattctctaaatcttagttgtaggagatgttgttgctattatttttataaaagggcaagcattacgagtttcagagcaaggcttatggggtgataatataatggaggatgaattggaagaggagaaactggaagcctggagaatggtttggaagctctttgctggggcccgagagacattcagggttcaggcagtgggagtggaaggaaagtagtggattccacagcgagacttggcagggcttgatggtgagggaaaggaaggagaagaaagtgacctggaggcttctggtttggatggttggggagtgatgaccccgagagaagagaggagagaaacagggttgtgaggatgagacccaactactctgttcctcttttctcaactgaaaccatgctgacttcatactgcaaagagtgtacagcgacacggtatctcagtccgttttactgctgcaacaaaatacctgcaactgggtgatttccaaacaatagaaatttatttcttacagttctggaggcagttctggaggccgagaagtccaggatcgaggccttggcattgggtgtctggtgccatgtcctcacatgacagaagagcaaaggctacggactcgttccctcaggcctttcatgcggttgctcacccctaagccctctcgtattagggtcttcatcccatttgagaaggtggagcactcatgacttcttccttacctcctaaagaccccactgcctttttttttttttttgagacagaatcgtactctgtcgcccaagctggagtgcaggggtgcaatcacggctcactgcagcctggacctcctgggctcaggcgatccycccacctcagcctcccttgtagctgagaccacaggcgtgtgccaccacgtctggctcattaaaaacaattttgtttttgtagagacggagtcttcgctgtgttgcctaggctggtcttggactcctggactcaagtgattcttccacctcagcctcccaaactgttgggattacaggtgttgagccactgtgccagtaagaccccacttaatacyatcccttcgtgatgaagtttaaacacgtcaattttgggggacatttagaccatagcacataggtttcaaaaatgagtcaaagccttaaatggattgtctcttttctagtaccagctgataggcctcacgtctgttcactgccttctgatgctcctccttaaccctgtgtaggactctgtagtacaggtctccgctcaaagacagttgtaaacgtggcacagttagtcaagagcattacaataaaaaatgctcagcatcactcatcacagagaaatgcaaatcaaaaccagaaggaaatatcaccttatgccagtcagaatggctattagaattatatgagaataatattaagaagtggggtcttactgggcacaatggctattattaatcccactactagatatctacccagaggaaaagaaatcgatctatcaaagggatacctgcacttgtatgttcatcayagcaatgttggcaatagcaaaggtatggaatcaatgtggccatcatcgaatggatgggtaaagaaactgtggtatatgtatatgcagtgggatactgtccagccatcaaggggaacaaaaccctgttatttacaataacatggatggaactgaaggtcattattattatgattattttttatttttattttttagagaagagtcttgctctgttgcccaggttagagtgcagtggcacaatcatagctcactgcagccttgacctcctgggctcaaatgatcctcccacctcagccacacgagtagttgggaccacaggcatgtaccaccatgcctgtctaattttgtttattttttgtagacatggggtctcactatgttgcccaggctggtcttgaactcctggggctcaagcgattgtcccaccttggcctctcgaagttctggagttacaggcatgagccaccatgcccagcttggaagtcattaagtgaaggaagccagacacaaaagacatattgcatgttcttatatgtgggasctaaaaggtttgatcacatggaggtagagagtggcaagaagggtaacagaggctgggaagggtgagtggcggggaggagaagggtcaagagaagtcggttaaagggtacaatcatgcagtaacgtagaaggaataagttcaaggcttgagagcagagtaatattattctaatattatatatattctcacctaacaaaaaatgtattgtggctgggcatggtggctcccgcctataatcccagcactttgggaggccaagacaggcagatcacctgaggtcaggagttcgagaccagcctggccaacatggcgaaaccctttctctactaaaaatacaaaaattagccgggtggttggtgggtgcctgtaatcccagctactctggaggctgaggcaggagaattgcttgaacctgggaggcggaggttgcagtgagccgagattgcaccactgcactccagcctgggtgacagagcgagattgtctcaaaaaaaaaaaaaaaaaaaacaaacaaaccccaaaaccaaaatgtattgtatttgagtgatgggcaccctgaatgccctgacttcatcactgcgcattatatacatgccataaaatttctcacataccctccaagtttgtataaataaaaagggggtgttgaatacagactttcaaagaaaaagcattctgctcaaaactcataaggggacgtggtgtgtgtgtgagttctgaaagaagtttgaaggaccagggttgaccacatgatcacgggaaacagcagctcctgggttgcttcaaggtgctgtggctgttggtggatgaaatcagcctactaggagataggaagatacaaggagcttctccagtgtactggaagatcacagctctggcatcatgggatctaaggagctggcttgtctttagtgaagggaggggggctggggccccttggaatcttttttttttttttttttttttttttttgagatggagtttcactcatttgcccaggctggagtgcaatggcacgatttgggctcaccacaacctccgccttccgggttcaagtgattctccaccctcagcctcccaagtagctgggattacaatcatgtgccaccacgcctgtctaattttgtatttttagtagagacggggtttttccatgttggtcaggctggtctcaaaactcccgacctcaggtgatccgcctgcctcggcatcccaaagtgctgggattccaggtgtgagccaccgtgcccggcccccttggaatctttaaggccaagacctgggaggctggaggtcgagcatgaaacaaagcgaaatttccctgagaaggaagaaagaagtgaggattccctgaaaccaagaagcagctctgtgttcccatctttcctcgtgtgtgtcattggcttcccatgcatataggctttgcgaggcaatctaagcatgtgtgcacgtgtgttttgtgtttttgtgtataattgagtatggctgacttttgagtgggcacccataatcactctgtatggcaattacacttatattaactttaatccatttcagagtaatgactcataatatttaatacccacatatcattgtgtattatatattaagtaattattaagatataatagctgtcctgtggttctttctgcagttctgcaatgcataagtaaatatatatctacttagcacctggcagaattctgacactggttccctggagtgagggctgttgtggtagcaaaggccaagtggaagctgccagaactgcctctgtctaccaaaatagtcaacccaaagcaattatcacattcctgggaggatggcagagattagtgccaccatcagggacttgaaagatgcaagggtggtgatcgtgtcacatctccgtttaatccatatttggcttgtctagaagacggatggatcttagagaatgacagcaggttgtcataaacttaaactaggcggtgactgcagttacagctgctgtgccagatgtgtttttgttgctggaacaaatcaacacatttcctggtacctggtatgcggtgagtgtcttctccttctctacctggtagtaaagatgaccagaagggtcttgcttccagccggcaaggtccacagcccgccttcatagttacacttcaggggtctgtcagctaccagccttatgttatcacttcagtctccttcttcattccatggggtgccaacggataaccactcagatagaatgtaaaaggactttgggccaggtgcagtggctcatgcctgtaatcccagcgctttgggaggctgaggtaggcagatcacttgaggtcaggagtttgacaccagcctggccaatatggtgaaaccccatctaataaacccctactaataatacaaaaattagctgggcctggtggcaggtgcctgtaatcccagctactcaggaggctgaggcaggagaaactcttgaacctgggaggcggaggttgcagtgagccgaaatcgtaccagtgcactccagcctgggtgacagagtgagaccttgtctcaaaaaaagttcataaaaggactttggctcctcttctggggagagggttagcatggttttggttgtaagacggatagtagcattatatggcatggaagcctagttgctatttacttgatttggaagttaagtacggttgaaaagaggagtagatatggacaccaagttgacaaggggtacgtgtagtgagttcgttttgcgtcaccttggctaagttggagctctgtatgtaacttgagccacaagagaccatttgtgtaagaccgagaaggcagaggggacacagcagccacatgcactgtggctcatgcacgtggtctctgatctgcaggctcaccttgttggcgcacggcagccatcaggcctgtacctcttctgaaacccaccaaatctttcgttgttcccctcatctgcgtatgtggcagacagtttttctatgttttcaggcaattgttgagcaaataataatagaatttttgaacaggccagcatcggtgctaatatgtgccaggcacagatctgagccctttagagtatttactcatttaatcctcaaaaccctgtaaagtcactgatgttgccataatctgtcagactcagaaactgaggcacaaagaggttaagtaattgcttaagccttcacaggaattgggatstgaacccaggcattttggtgtcgagtccatgaactgacgaagaacatagataactgttgtcagcttgtcaaggctcatgcctgtaatcccagcactttgggaggccgaggcgggtggatcacaaggtcaggagattgagaccatcctggccaccatggtgaaaccctatctctactaaatcataaaaaattagcgtctgtagtcccagctactcaggaggctgaggcaggggagtcgcttgaacctcggtggtggaagttgcagtgagccaagattacaccactgcactctggcctggcgacagagcaagactccgtctcaaaaaaaaaaaaaaaaaattacttcaaggagagactgctgagggttcctctgtctcctgtgtggatggaatttggcctccatttggaatcgggaatcttgcatatttagttctgcagtattacgtgaatctacggaagcaactcatttggaattagattccaagccgttataaataataaattttttgtctctgtcatttttgtagtaacagcaagagaaaagaatttaggaccaaaacttatgagagttttaaatattttttgctaagtgcttatatgtgatttatgggaaaatcataatttttaccctggaaggcagccttactcataaagaatggccatcttgtagcacctccaggacatcagtctgaagtctaagttaggtgtgtttgcacagcaaccaaatggtgagagcatttagcagctgggggacggcggcattgttgtgattgggttgccacgtggtggggcgggtgagggacggcagcagagccttggcagagcggagctgtgtggccgacggcttcctctttcttcctccagcgtgcgattataacttgttgctcatgcaccggcatgcagctctgtttgctcagtctgtttttctgtaaagtctctttttaaaaaagtatatgatacaggctgggcacggtggctcatgcctgtaatccgagcactttgggaagccaaggcaggtggatcacttgaggtcaggagttcaagaccagcctggccaacatggtgaaacctcacctgtactaaaaatacaaaaaattagccgggcatggtggtgggcacctgtaatcccagctacatgggaggctgaggcacgagaatctcttgaaccagggaggcagaggttgcagtgagccgagatctcaccattgcactccagcctgggcaacaagagcaaaactccatctcaaaaaaaaaaaaaaattgtgtgatatagatggaagaccacgtaaaataaatgtacaatctgattgttataaggtgaccgcctttgcatatctaccaggcaggttgcaggagagcacagccagccacccagcagccgtcctgccctccacctgccgcagggggccagatcttgccattcctggtggtcccgtctctgctcttcttggttttctttctttcgttctttctttttttttttgagatggagtcttgctctgttgcccaggctggagtgcagtggtgccatctctgctcaccacaacctccacctgctgggttcaagcaattctattgcctcagcctcccgagtagctgggattacaggcacgggccaccatgcctggctaatttttgtatttttagtagagatggggtttcaccatgttggccaggctggtctcgaactcctgaccctgtgatctgcccggctcggcctcccaaagtgctggggaggtgtgagccactgcgcccggactttttggttttcttatccaactgtgagtccttcaacacttggcgtcgggtgtttggcttgtctgttttttggcttgcttttgcttttttctccaacttttaatttaattttaattaattaattttatttatttattgagacagggtctcagtctgtcactcaggctggagtgtagtggcacgatgatggctcacctctgcctcgacctcccaggctcagatgatcctctcacctctgccccctgaggaactggaactacaggtgtgcaccaccatgcctgattaatttttgtattagccagtggtttcgccatgttacccaggctggtctcaaactcctgggctcaaacaatccacccgcctcggcctcccaaagtgctgcgattccaggtgtgagctactgtgcctggccttcgcaacttttcattttgataaatttcaaacctacagaaaagttgaaataatagtataatgaacactaatatcccacttcacctgattgacccgtggttaacattttgccaaatttctttggctgtctcagtgtaggtgtgtatatatgtatgtgtgaatataattatacacacatttgtgcaagaaccctgaatgggatataatacagtacacacatatgtatgtgcatatgtgtatgtgtgtgtatctatatttgtcctcttttttctttgctgagccattgaaccgttaactgactaaattgcagacattgtggccstgcacccttaaattcttcagcatgtatctcctatgaacaaggacattctcctgtacagacaaaacaaattatcctactcaagaaatataacattgacagaatactcttataaaatatatagttcatgttcaaatttccccagcrtctaacagtatcctttagagcttttatggtgttcatccaggatccaatcagggatgwtcttttcctaaaagaggacactcaagatctagatctagaacagttccrcacatttttttttctttactgctattggcatttttgaagagtttggtttcctgtttcttaaaataaattttgcattgaagtgtaatatgcatgcataaaatgcataagtgtacagtttgaagaattatcacaaaaggaacacatccactaaaccagcacccagatgaaacagaatatcccagaagcctccctcgtgtccctcccaacgctacccacttcctccttctaaaggtaaccatgtcctgacttctggcaccataaattgcgtttgcctgtgtttgaatttcgtacaaatggaacctgcagtgtgtattctttttttttttttgagaccgagttttgctgttgttgcccaggctggagcgcgatgccatgacctcgactcactgcaacctccacctcccaggttcaagtgattctcctgcctcagcttcctgaggagctgggactacaggcacccaccaccatgcctggctgattttttgtatttttagtagagacggggtttcaccatgttggccaggttggtctcaaactcctgacctcaggtaatccacccgcctaggcctcccaaagtgctgggattacggacttgagccactgcccctggtcagtatatattcttttgtggctgcctctgtcactcagtgtaaagtttgtgagcttcattcctgttgcctgttgcttacgctggggttccttcatcgtcactgctgttgtgccttctcggtcatatcacaacgtatccatcgatcctcctcttgatggatacatgggttgtttctgggctttgacttttacaataatccctgtgaatacttacgtactgtatcctggtgcacacttgcatgcatttctttggccgaaatcaatgtctagaaggggaattattgagccatagagtgtgagtgtcttcaacttccatcggtaataccgacttgttttacaaatggtgataacaaatggtgataacattgttatcacctcatacccgtcagcagagtatgagggttcctgtgggtggctctgcatcctcaccagcgcttgtcactctgttgaattgcagccactctggtgggtgggtgcagtttcttttggtaattttcatttgtgattctgtatttgatttgcagttccctggctgagtgtcttttcatatgtctgctggccacctgggttggctcttcagtgaagtgcctgttcagctttgttacacatttttctactgagtggtctggttttgttttcttattgttgggcttgttttgttttgttttgtattgtcttgagacagagtctcactctgtcgcccaggctggagtgcagtggcacaatctcggctcattgcaacctccacctcccgggttcaacattcttttgcctcagtctccccagtagctgggattacaggcacgtgccacctcacccagctaatttttgtatttttagtagagatggggtttcaccatgttggccaggctgctcttcaactcccgacctcgggtggtccaccaaccttggcctcctaaagtgctgagattacatgtgtgagcccccgggcctggcctcttactgattttgaggagttctttatattcaggctaccagccctttgtcagttatatgtgaggcaaataccttctcccactctagttttgcctttttactacgaaattgccatttttgtagatcgaaatggtcaaatattggcaattggcatatggttcagcctaccataaaattgatccactttttttctttgttaggtgaggactttttttgtcctatttctctacttctgaggtcatgaaactataatattatttcctagatactctattgtttcacttttcagatttatgtctataatccacgtgaaatgtgaactgatattttttgtgtacactatgaggtagggatcaagttttactttaaaaaatatatagctaggccgggcgcagtggctcacgtctgtaatcccagcactttgggaggccgaggagggtggatcacgaggtgaggagttcgagaccagcctgaccaagatggtgaaaccccgtctctactaaaaatacgaaaattagccgcgtgcagtggcaggtgcctgtagtcctagctactcaagagactgaggcaggagaattgcttgaacccgggaggcagaggttgcagtgagccgagatcgcgccactgcactctagcttgggtgacagagcaagactccatctcaaagaaaaaaaaaagaaaaaaagaaaatagataacgaattgagcactttttattaaagamagttttactaaggtatcatttgcacactatgaagctcagctgtgaaaagtatacaattttatttttagaaaatttagggtatcatctggttttagaacatttccatcatcccatgaggtccatcatatctggtttcaggcaatacctgcttccagtcccaaaccacaaatctactttctgtgtctatagatttgctttttctagacatttcatataattggaatcatgcaytattgtagtcttttgtagctgacttctcaattagcttattgtttttgaggttcttctgtattgtagcacagatcaagtatttaggtcctttttcgtgagttaaattcggtggtgtggatatatcacagtgtgtccatccattcaccagctgctggacaygtggattattcccacgtcttggctgtaataaacagagctgctctgaacatcgcttgcaagtcttagttgtttccatttctcgtgagtagaggcttggattggaattgcaagattgtatggtaacgtataattttattttgctaattatcatttgtgaactgacttttttctcttgctatacggttctaaggatcataacacatgtataggttttgtagccaccagtacaatcaggatacagaacagtttaatcaccccccaaaaatctttcccaagggttgaccttttaatatgatttggctgtgtccccacccaaatctcatcttgaattgtgactcccacaattcccacatgttgtgggagggacccagtgggaggtaattgaatcgtgggggcaggtcattcccatgctgttctcgtgatagtgaataagtctcacgagatctgatgggttttttttcttttttttttttttgaaacggaattttgctcttgtcacccaggctggagtgcaatggcatgatcttggctcaccrcaacctctgcctcctgggttcaagcgattctcctgcctcagcctcccaagtagctgggattacaggcatggaccaccacacccagctaatttttgttttactagtagagatggggtttcaccatgttggccaggctggtctcgaactcttgagctcaggtgatatgcccacctcggcctcccacagtgctgggattacaggcgtgagccaccacgtccagttgatctgatggttttataaagaggagttcccctgcacacactctctctcttycctgccgtcatggaagacgtgacttgctcctccttgccctctgccatgattgtgaggcctccctagccatggggaactgcaagycagttaaacctttccttcrtaattacccagtctcggataattataaagtctttatgaacagtgtgaaaacagactaatacaccctttatgggtgttaccagtggagggtcttgactacaagttgtctgggttcttaaccagattyttggcattttgaacaaagaattggacaaaatgcacaaacaaagcaacgagaaaacgaagcaagggaagcacagatttactgaaatgaaagtacactccacggagtgggagcaggctcgagcaggagcaagtggctgaytagagaattttctggagccttaataccctgtagaggtttmccattggttacttggttacaccctatgtaagtgaaggagtggcctgtgaccagtctgattggttgcaggaggcgaccaatcagaggttgaagtgaagttgcaacgttacacctgaagacctggcctgggaccagtctggttggttgcgggagggaaccaatcagaggtactttccatttttcatctgccacgaggtgcaaagggagtagtagcctctgatccttttgttacctgggtatggttttccttttgattcagttctaaaaagtcagggtgaatcggccttaagttccctgcctccaggcccctgccgacccagcaacaactatccattccctgtagttttgcctttgggagcctgtcattaaaatggaaccacacagcaygtaccctttgaagactggtttcttccacttagtctagagctattgagattcgtcctggatgctgcatgggtctctagttcattccttgtgatgctgagtagtgccccattgtggggagggaccacagtgtgtttatccattcatcctgggaaggacattaggttggtttccaggttttggcaattatgaatagtgccgctacaaacatttgcgtacagcgttttttgtaaacataaggtttgatttctctagggtaaatatccatgattggggtttctgggygtatggtcattgcaggattaacttttttttttttttttttttttgagacggagtcttgctgttgttggctcaggctggagtgcaatggcgtgatctcagctcactgcaatgtccgcctcccgggttcaagtagttctcctgtctcagcctcccgagtagctgggactacaggtgacgccaccatgcccagctaatttttgtatttttagtagagacagggtttcaccatgttgcctacgctggtctcagactcctgacctcaggtgatccacctgccttgacctcccaaagtgctgggattataggcgtgatccaccgcgcccagcctctacttyagtttcataatgggctttaatttgtgaattaacttcttgatgtatctgctcatccatccattcattcattcatttctatattcacccaacaaatagttaagtgccttacttctgtctttgctatttctttgcctttggagcactgttttgaaagagccagcgcccactgtcagctgtccagctggtagcactgtcatctggaagattttagatactttctcatgagtgawtctacaccagcctgaatctcacactacctgacatcctctcaatcgtagccacacccaagggtcctactttgctgtccccactgccaccagaccaaacacacccccttccctgaaagtctgggagtcggtttcttcttcacaatagaagttggcctctgctggtcatgccccaaaccttctggagctgcgggttctgccttctctgcagctgccttcccgtgggctgccctggtcagtgcaggacatggcrcaggacctccgccctgccacacccccgggccatttcctcggcaggcctcgtgccagacttctccaaaggactgaccgcgtgtgccttctccaccttgcacacactcgcacaccaacctgccagcctggcctgtgctcttcgccgcccaaacgcacctctccctggtgtggtcactgacagtctttgcgtggccagtggccaaacccaggctggctttsctagtggcctcatcttctctctgcagcgttcacagtgatccacttctttttttttttttttttggagacagagtcttgctctgttgccctggctggagtgcagtggcaccaatgtccgctcactgcaacctccacctcccgggttcaaggcaattctcctgcctcagcctcctgagtagctgggattacagtcatacaccaccatgcctggctaatttttgtatatatatattttttaatagagacgggggtttcaccatgttagccaggctggtctcaaactcctgggctcaggtgatccacccgcctcggcctctcaaagtgctgggattacaggctttagccatcacacccagcccccctccctacccctttgtccctcctcagagccctgctggcccacttccctggccgttcaaaacattgcagctccaaggctgcttcccaggcctccccacctgctgtcttctccctggtgatattatggacagtggatctctggccctgagctcccttctgatttcatggtatagccacctccttgtccctatcgcttgagcgtgtcaccagcatcttcagcttgggaggtccagaactgagctcctgattttgccccctaaacttttacttcttctggtctcactcatccgtccacgtactgaaggcagaacccaggaacccaggaagtgtccttgttccctttgttcacatcctgtcggttctgcctagaccttaaatcatgaacctgacctaaggccactccagcttttgcctggaccacagcaaaaggccaggagtgagcccccgcttctactcctgacacctccggagccattcgccacccagagctgtgtaggctttaaaaagagccagccagccgcgtgggatcctggatgggatcctggaacataaatcaggtgaaaaattggtgaaactcaaatcaagttcatcgtctagttaatttcctgttcttgattatcaagctgtgcttgacgtcgtacaataagacattcacgttaggagaagtggagcgagggatatatgagaactccctgtaccgtatatgtaactttcctatatgattaacattagtttgaattaaaaagttttaaaaaattggatgggtgcagtggctcatgcctataatcccggcactttgggaggctgaggtggccggatcaygaggtcaggactttgagaccagcctgaccaacatggtgaaaccccgtctctactaaaaatacaaaaattagccaggcatggtggttggtgcctgtaatcccagctactcaggaggctgaggcaggagaatcactcgaacccaggaggcggaggttgcagtgagccgagattgtgtcattgcactccagcctgggcaacagagcaagactcagtctcaagagaaaaaaaaaaagttaaaaaattaaaatgcaaaataagaaagaatcgaactgtgtgctgtcttacttaaaacactgcagagctcttgtgtgtgcctagcatgtaagtcagatgcctcttgtcgttttgagacagagtctcctaccgtcccccaggctggagtgcagtggcgtaatctcggcccactgcagcctccacctcctgggttcaagcgatgctcgtgcctcagcctcccaagtagctgggatcacaggcatgtaccccgcctggctaatttttgtatttttagtagacacggggtttcatcatgctagccaggatggtctcgaactccttacctcaagtgatccgcctacctcggcctcccaaagtgctgggattacaggtgtgaatcactgcasctggccaggcagaaacctcttaatggctcccagggcctggcccacctccccagcctcctctcatgccacactttcttccctcagtctgcatcgggaacagttgccacctttcagccacgtgagcatgctgggaccgtcctttccatgctgatccctgcatccctcgtgscttccccagacctacaccaccgcaattgcctccatctcactgtgatatctccacttcagtctcatttcttcagaaaggacgtccctgactctgtccaaaccgcatgttgggtattctctattgcaggaagcttttgctttcttcctggctcttaatcacagctggtgactcgggtccttgcttgtggattctccctgccactggttcctaccactgagtcaggtgatggacgccatgttcacagttttatcaccagcgtctagcgtggcctgcagcgggtrctcccatagaacccataaacaaacaacttcttgttycttattatgtgaagaaagttggtctgtgtaattcaccctccagagaaatgacagcactttcagtactttgttctgcccttccttgatctccacgctgtttgcagatggaccaccgttgtagagatgtgatttgattcttgacgtttctgagtgtccacggtgctgcgccttcccccaggtactacagtactgagattaataagacagagtcaatgtaaggtgttagtaggatttagaataggtctaatctcattcttaacggatttcaggagcttattatgtgttgaaagaatgaataggataaaagttgttaagaaattttctccgtttaatttttatttattaatttatattttagagacagggtcttactctgayacccaggctggagtgcaatggtgcagtcacagctcactgaggctttgaattcctgggttcaagcaatccttctgcttcagcctcccaaattgcggggattacaagcatgagccactggctctggcctattttctccttttaaaaaaaattgctgcagrtatacacatatgcacggatatacacatacaaatatgtaccttatacatatatgtatataataaatacatgcatatgcrgaattgtggcatagtcttagtcttttttttttttttttttttttttgagacggagtctcgctctggtgcccaggctggagtgcagtggtgcaatctcggctcactgcaagctccgcttcccgggttcacgccattctcatgcctcagcctcctgaggaactgtgattacagcatgggccaccaggcctggctaatttttgtgtttttagtagagatggggtttcaccatgttggccaggctggtctcaaactcatgacctcaagtgatcctcccacctcggcctcccaaattgctggrattacaagcatgagccaccatgcctggttgtatttagtctttaacctgtcctcaggctgtttctctctgggcagggagaagcatggaaagggggatgggccctggtggccacctttgaagcatggaggctccggtgccaccctgcccttaggctgggcacaaaggtggctgagggaaggctagtcagctgctggaggtgtcctttatggtctcagtgattaaaggttatgttgtccatgaatttaattttatttcatgatggaaaagaggacattgcaaattaagtatgtcacagaaatgtaaggagccayggggtctgatagggctgagggtgagtggcttgccgtcgagtttccagaaggcgttattatggaccctaaaggggatttcatgcgtttcaaagactctaacagaagtgttctgatgaagtggagtctggtgctgggacctgccacttcagcctggaattgtcctcgtgtgaagcgcagtaaaaacccagaatggatgtcggcaataagggaatttctgggatatgatgggggaacgaatattgtcacctccatttgtgtcaggaagtctcastatgcagatgagtcagctgcagggggtggcctcccaggctgctggtggagcccagaagcagggggcaggcgtttggcctctgatactctcctagctctgagttgggacggagctcgtgtatctacagtgtgctcacacagacttggtgcyggtagatggtgaggggataggttggcaggtgggtagggggcctcccraggcagtagggacctggaggaggctggtagaaagtggagattggccaaagtgacctgaattagattctacctggttcatgaatttgcctgaggctaaggcttcagcgcaagggatggtggagtaatacctttcctgaaacacctgctgccggcgtggccttgtckgtctctgccagatcttgttagcactgtggcttcaggcctagttaaacattcaagcccaatgcggttggagagcacccatggcacgcccattgtgcagcagtgtgtttaatacatgtgctgcttttaatgggtgtgaaagatcagagagcttgggtgtgtgttttaccaaccactttttaaactcacatagtaaaatttatagtatataaaaagcagaaaatatggtgtatcttctaaatattcacatttaaaacattttttagaaataatgtatgtcaagcaaggtcaagctaatgtgtttatataggctctaaattagagttgtgaaccagtatctcatcccacttatagggttttttttgaaaacgttcaaatgtttccagctcttttgtttctttattctaaaacattatctgctattttgttcgatagagtaactgtttctattccactttctttttttttttttgagacggagtctcgctctgtcgcccaggctggagtgcagtggcgcgatcttagctcactgcaagctccgcctcctgggttcacgccattctcctgcctcagcctcccaagcagctgggactacagacgtgtgccaccaagcccagctaattttttgtatattttttagtagagaggggttttcaccttgttggccaggctggtctcgaactcctggcctcaagtgatccacccgcctcagcctctcaaagtgctgggattacagacgtgagccaccacgcctggcttattccactttgtaattggctatccctgctattaatatacagggtactctccctctcgtatttgcgtctaaatgtcatctataataaataacagtgaatacttactgrtttcatatttagttttacttttatcccacccattttcttttagtagttcttatgacttcacgtttatttaataaaggtaaaaaagaactttctgtttccrattcattcctttcaccaataaggaaggatgtggatcttcactgcttcctacatagctgccagcctcatgtagctgtttaaaatttaaattataattgaaatcattaaaaaattaattccttgttcatactagctacatttcgagtggtcagtagccacatgtgcctggaggccacagaactggacggctacaggatgtacccatcatcacgggaagttcatagaaagttctttttctttttctttttytttttttgagatggagtcttgctgtgttgcccaggctggagtgcagtggcgcgatctcagctcactgcagccttcacccactgggttcaagtgattcttatgcctcagcctcccgagtagctgggattacaggctcccgccaccacgcccggttaatttttgtatttttagtggagacagggtttcaccatgttggccaggctggtctcaaactcttgacctcacgtgatccttccaccttkgcctcccaaagtgctgggattataggcatgagctaccatgcctggcatgtatctcttcttctctaagtactcagctgtcttgtttgaggctagtacctccactagtctggaaccctccttcctgggctttctgcccacttccatctctcctttgacaacagtggtttttccagggtctgtgcagagctcagctttctgccataagacaggggagtttctgaagactcctcaccccttttgggagtgagggctgctgactgaagctccaggtcactgttttatgagctagctctccgtttgttgatggccggggacccagcctttgtcccctcctctcgtgcttgggcactcactactcactgcctcggttttgctttcagttttgattgtgcattgagtccacaacttcaatgggattttcttaaggcataaatgacagttgcatggtgtgcagtgggagaacaaatcgcccagcctgggacatccctgggtggcagagtggacctgctctcaacttatggaatgtgcagcaacaccttgaggttattaataaatacctgagtctgggcatggtggttcatgcctgtaattccagcactttggcaggctgaggccggaggatcacttcaggccaggagttcaagcccagcctgggcaacatagtgagattccatctttaaaaaaaaatttttttttaaaagaaggtgggcttggtggtgcacacctgtcatcccagctacttgggaagatgaggtgggaggatcacttgagcccaggacgtcgaggctgcagtgagccgtgatcatgccactgcactgcagcctgggtgacagagaaagaccttttctcttaaaaaaacaaaacaaaacaaaacacacacacacacacacacacacacacacacacacacaactgcgattcttccagaaaagttcagaaaaaggaagtccgaaatacatagtccatagtatttcagccaccagtgctgctgaagtgaaattagagatagcagagatatctcaggagaaaatggaggtttttgggtttctcygttagatgactcgarcaagtctgcatgtgctctgtaaacaagaaaacacagtctgggaaactgtcagcctctgccccagccagtgtgcaaaatactcttcaaaagagagaaaactagaaaayaagttgaaaaccgggtgatctgacaagtgtggaaattcacagcaagcatgtgcctgtgctgcagatacgatctgggagagagccagcagcctggatccacatttcccagaagcaacaggtggtgaagkcagcggcatgactgctcccgcggaaggttagtcacgcatgttcagcatcagccgggcgcggtggctcacgcctgtaattccagcactttgggaggccgaggcgggtggatcacttgaggtcaggagttcaagaccagcctggccmacatggtgaaaccccaactgtrctaaaaacacaaaaattagccrggcatggtggcaggtgcctgtaatcccagctactcaggaggctgtggaagagaattgcttgaacccgggaggcagaggttgcagtgagccgagatcatgccactgcactcctgcctgggcaacagagcgagactccatctcaaaaaaaaaaaaaaaaagagaagaatattccgcaacttagagcttttcctttgcatgatatgatgtttacaggcgaggtggctccgcagcctcggtggcctttcttccagctgaagatgcccacaggaggtgtcagtgcaggtataaccacctgtgggtcagaagaaaatgcctttgcaagtaaatctcctcctggatgaaaaggcccatctgtgttccaggcaaggacagtggccgcttctgcgtttctgtggccaagcgtctggcgtgcgggtgtggctgggctcaccatgctgtgcgggctacacctgctgcaggagaagtgtgtttgtgctcgaagaagacaatgtgggtgtcggcccggcgtttttaggttggactacaatagtgagagctgcaaattggatgattcttggagctatttcatgaaggtcaaattttcttttgttttgttttatttaatctctcccagacttctgaacttttgctatgttgaatttttagttcttcaaggttatttggccttattcttgacttgcatgtttttctgccctagctctaccacattatctttttttttttttttttgagaaggagtttcactctgctgcccaggctggagtgcaatggtgcgatcttggctcactgcaacctctgcctcctgggttcaagtgatcctcctgcctcagcctcccaagtagctgggattacaggcgtgcatcaccacgcctggctaattttcgtattttcagtagagacagggttttaccatgttggtcaggctggtcttgaactcctgacctcaagcaaccccccgcctcggcctcccaaagtgctgggattacaggtgtgagccaccatgcctggcccacattatctatttctaagcctttaatatttttcatttacctgctactgctcactctaccttgtattctcagggagggtgtatttcttcccagctttattttatttcttctctaaatctcagaattattgcaccttgttgatgttcacattactgtatttagtttattttattgtattattaatattattattatatttgagacagggtctcaccctatcacctaggctggagcatagtgacacagtcatagctcactgcagccttcatttcctgggctcaagcagtcctcctgcctcagcctcccaagtagctgagatcacagaaatgcaccaccacacccagcttccttttctttttcaaaaaaacagctttattgaagtataattcacatatgatgcaattcaccctctcaagtgtatgatttggtggtttttagtgtattcatggtgttgtgcaaccatcaccacaacstaattttacattttcgtcaccccaaaaagtaaccctgcatccgttagcagttacaccctctctctcctaaacccatggcagccactcatctgctttctgtgtctacagatctccctatgccagacatttcatataaaggggatcacctagttcgtggccttttgggactggcttctttaactaaacatcatacagctttatttccattttcagtgtattccctttttttgttttcaagtatttagtggctacctagtctcagattttaaatttagtttttcctttctcttctttctataatctatttttcatcatctacactgtgtgcttgaatcagcacctcttagaaacctacggatgagctgttagctctctagggacaagaacacggtctgggacccccgtccctgctgcaggtgtgacctgaccccctccctctgccgacgtgacctatcyccctccctcccgtctgtggcatctggtgcatttggtgctgtcatttcacaaataaaaggtgatcagctggtggtctgtttcagttctggtatctttccccagctctcttgtttcatagcctcttcccattatttaaactctgctctgttacaggattcttaatagttattgcagaccttcatttccattttgttgtctgcaactcattgttgaagtgccatttgttgcttctgaacagcccatrgacacttggacttgaatgcatatgactctcttcttgtgggtccagatcgtcactcactgactgtcctcacattcacagctgttctcaggacaagcaccgtctttccctttttcggatgtccctgtttacmtgaatcaactcatttaatcctcacaacagccctgtgctatgatatgaccatcatatcacagcattttckttttctttttcttttttttttttgagacagggtctcattctgtcacccaggctagagtgcagtggcgtgatctcggctatctgcaacctctgcctcccgggttcgagagattttcctgccttagcctcccgagtagctgggacttacaggcacctgccaccacagctggctaatttttgtagttttagtagagacagggttttgccatgttggccaagctggtcttgaactcccgacctcaagtgatccgcccacytcggcctctcaaagtcctgggattataggcgtgagtcaccgcgccggccagcatttccrttatctagacaagggaactgaggtcaagcattggagtgaaagtcacctaggtggctttttttcttttttaacctatttatttctttcaaccctyagcccagatcctaaccttcggtaagtactcagtaaacatttagtctgctgggtgcatgaacgagcgaatgagcaaatgaatgacagcgatagcacctggtgggctgttcgctggtgtgctgggtgtgctgggtgtgctgggtgtcgtctctcagagactcatttctacagyctttgtgaaggctcgtgctagtaaaccctaattcaagaggtttcttagaggtgggaggcgaaggtctctgaagtgtgtggactcctggactctccctatgttagcattctggaatgtagcatttagcagtggggcatttattaactcggaatacagaagataagaagccaagccaggcacggtcgctcacgcctgtaatcccagcactttgggaggctgaggtgggcrgatcatgaggtcaggagatcgagaccatcctggctaacacggtgaaaccccatctctactaaaaatacaaaaaaaattagccaggcatagtggtgggtgcctgtagtcccagctgctcgggaggctgaggcaggagaatggcgtgaacccgggaggcagagcttgcagtgagctgagggagccactgtactccagcctgggccacacagcgagactctgtctcaaaaaaaaaaaaaaaaaaaaaggccaaaacaggggaatgtggtcactcaggggatgcctgtcattcccatttggctgtgatggcagctgtttagccattactgggagagagagggaagctgggtatagaaggtacctgtttagaagcaggggtggggaagcgggagggagagagagagagagaatgcgtgcacatgctctaaaattttattttctggctgggtgtggtggctcacgcctttaatcccagcactttgggagacagaggcaggcggatcatttgaggtcaggagttcgagaccagcctgtccagcatggcaaaaccccctctctgctaaaaacacaaaaattagccaggcatggtggcacacacctgtaattccagctactcaggaggctgaggcaggagtattccttgaacccgggaggcggaggttgcagtgagctgagatcgcgccactacgctccagcctgggcaacagagcaagactctgtctcaaaaaaaaacaaaaaaatttttttttggttaagcagaagatcaaattaaacaggcaaggtgcctaccctttgtttctttcactttcttccataaatccatctcatattttattatttgggacttcttttttttttttttcttttttgagacaaagtctcactctgtcacccaggctggagtgcaatggtgcgatctcggctgactgcaacctccgcctcctgggttcaagcaattctcctgcctcaacctcctgagtagctgggattacaggcatgtgccaccacgcccagttaatttttgtatttttagtagagacgggatttcgccatgttggccaggctggtctcaaactcctgagcacaactgatgctcccgtctcggcctccctaagtgctgggattacaggagtgagctaccgcgcctgacctgggacttcatttgttaagaagaggttaagtttcaccagcagccatttgtagtaggaacttgagatttatcatcaaatattgggacaacaagaacaaatcagttcttatgattatttatggtgcatatgagtaggaaggacttacaaccctccggagagcattttaatgttaacatatgaaagatattctctcttttgtaccaaaacttttgttcttcttacgcagaaagaatagataattataaaatatatctatgactccataggctttggctatttggtagattaagagtatttttatctttatttttcttattggctgattacagtttagtttaaataactctcatgccgcttggtcgtttccgacctagtcgtgaggaagaatgcaatgcaaagtgaaagacgtttttggaatgtttctgaaccagcccaagctgattgcctcttttctgtttattgttttaagtcataagtgacgtaagcytctaggcatttgttatgctatgtggctggctcccaaagtcatgtcttaaaacattctttccttcctgattattcttctctttcttgtttttcttttcttctttttcttttaatttttttttcttttttgagacggagtttcactcttgttgcccaggctgaagtgcaatggcacgatctcagctcactgcaacctccgcctctcaagtttaagcgattctcctgcctcagcctcccaagtagctgggatttacaggcgtgtgccgccacgcctggcttgtttttctttttttctttttttttttgagacagggtctcactctcttgcccaggctggagtgcaacggcgcagtcacagctcactgcagcctcaacctcccgggctcaagtgatcctcccatcttagcctcctgggtagctgggaccacaggtgccaccacacccagctgatttttaaattttttatagagatgggatctcgctatgttgtccaggctggtctcaaactcctgggctcaagtgatcctcctgccgcggcctccgagagtgccggggtcacagctgtgatccccgtgcctcgctgttgttctctttctgttgagttggcagtcaggtccttgattcttggtggctgagggtatctcagtccaaggcaagaatcccacagaaagagactgggacaaatgaggccagaaatgggcctcgcccatcactcttttccaaaatgggctttgtcagtcactcttcctatacttgggtcaccaaacctgatcaccactatgtgcaaagtgcagttttagttttcaaagaagtgacactatacttaagaatacttaagaacgttaactgcgttaacctccacgcacacagccatagacaaattcccccgtcagacaggagcccattaggaaatgcccacccctctctgtagcctttgtaaaattaagctgataaaagacatygctgttgttgaggtttaaaatcaatggataaccaggaaagaatataagaaatcatattaattattctcctgtttacactacacttaaatcatttagctgtcttttttttttttttttggaccttctgctgcaaaagagccattctaatgaacttggamcccagggtccatgtgtgtggttattcattaaatcatgtcgcctgcagagtctcctgacttaagactttcgctgggcttgaactcagtaacctgtcctgatgtatttctcaggcgtttgtgattaggcagctgggctctgccttacctgtcagggtgataacccttctggttctgacaaaaggtttcactttaaatttagctttccatattgaagcataaataaaaagataatttacttcccgattttgctcgttgtggacacggaggtgtgtttgaccttcgtaaagctagtaggatcatgttatcactatgggttggtcattcagcgcttcctaaagaaaaactcaagtcagaaacaaatcaggagcaattattgatttaacagttttgcaaatgcttttgtatgtagaaggtgcatgaaaaagattccagtgatacgcagatcaaacactgcgtcgataatcacagctaatgtcgagtgcttgctgcgtgcgtgttgatcatttaagcctcacatgcgagcygtgyggtaagccctcctcctgccctcgccttagagatgaggaaactgagaggcagcgatgaagcagctcactagccctgctcctgtcctccccttagagatgaggaaactgagaggcagcgatgaaacagctcactagccctgctcctgtcctccccttagagatgaggaaactgagaggcagcgatgaagcagctcactagctctgctcctgccctccccttagagatgaggaaactgagaggcagagatgaagcagctcacttagatcacgggattagggggcggacctggacycgactccgaggccccctccagcagccaggccctcgcccatcacgcttggttgcttgtaatgggagccttgcctctcgccagcagtttgtggggagtaggtttcccgtttccactgttatttcctgactcccgtgcctcccaacttcccacccgctgtggctggcatttccaccggctccctggcttgtcctacgcctcatgcctcctatgtggctcttctttctcctcccgcccccctgctgcccgtggccccagaatggaggcttcccaggatggcccacacagtgccctgcacaggtgctgtggctcagccctggccattccctccacacgttctctgctccagccacactgagctccaagccatcctttagctatgcctgctgcaggccacctctgtagagggcctttcatgacctgttctagtaacccccctgcctggtgtcagccacccccgcccctggcctggtttgctattgccgggctgacctcgccccgtctttcagttctccrtgtggagggtgctgatccgtccgtctccatctgcttgtgaagcaataacagaacagcataggctgggtaatstatacagcacggaaatttctgtcctcatgcttcaggaggctgggaagtccragatcaaggcaccagcaggttcaggtgtctggggagggctgcatcttctggaagggagaaggaaactggagggcaagcgagagagccccttacagcaagcccctttatgcaggcgcctgatcccatcgcaggggaggagccctcctggcctcgtcacctcttaaagccctgcttccttaagactctcactccacaacgcctgaactttggaggggacacrttcgagccacagccccttccttcctgaggcttctcaagatgccccctcctgtgcttcctggagcacccgtccttccttgtcctgggacttggcacgccygaccatagtcatacctgcttgtcctcttggcccctcttcaggtaatgggctccacacaggtcacgatctcggccaaaatagtcacacatcgtccctgcacccatcagtgtgtagtaaacaggaagtgcttaataaatgtttgatgaattaagagtgactcagtaatcccagtacaaaaaagcaacagcagacgttggagatgtgcttgaggcacgtgcccagcttgtgagcagaggccgccgctgccactccgtgctccccgtggactgccgtgctgagcgctgtgaatgtgctggctgtcccgtcgtgctccagctcttcaggcytccctgctcagcctctctcagcttcagttgccaygcacttctaggagaggccatcttgactttctcttgcagtcccggagccacacagggagcaggtgcgcagtcacctgggtgagggccccttcctgggtttcagaggcagcccagttcatgctcccagggcagcccttgtgcatggggagccgtagcctcaggcaggggcaccctgagccaacagcaccttgcagggccagccacagacataatggaaaacctcatccttcagccgcaacttttcctacctcccatcaaaaaaatgtccctcctctctcagtatgtggggactgcggtctccagagtggccatccacagtcacactggctgtcagtggctcctgtcaccaccctgccacctggtgacttgtgggccacactcaggagtcatgggaaggagacccttagagcagccccaggacaggcctccttgcgtgtacttctttgatgaaggcgggtataagccctggcagctcattgtcctctcttgagtccacataggttgcattttttaactctggcaaagtgaagttacaaagtcagtctggtgtcgcctrggacaggtccgagaaattagtataaagatgscttcactcctgcgtcgtattccagttcacgtttccatttcagtgtatacatgttacagtcgtgattgatcctgtgcataaattgggatgtgggtttttgttggagaaaaaaatgcacaaaagttcaggagctaagtaagagtgaaagattttcattggaccaggtgtggtggctcacacctgcaatcccagcactttgggaggccaagatgggcggatcacttgagtctaggagttcgagaccagcctggccaacacagtgagacccccatctcaraaaagaaagaaagaaatagttggacatagtggcggacgtttgtagtcccagctactcaggaggctgaggctataggaggtgggggctgtagggagccatggttgcaccactgcgctccagcctgggcaacagagcaagaccctatctctaaaggaaaaacaaaacaaaacaaaacaaaacatgaagagtttcttggggccagttggcatctaaaaatatctaagtcttttgattctcagctatgacctggctacgttctaggctgtctttacgtgtttctaggactcttggcaaattctcagaacagttgacttaaaaagattagccacgtagtatttttacaaggagagagggaggtgaagtgatgagatggggccatacttataaaatgattcgggattattgatgaagtagtccctaggtttctgattaattaattttaaagcgctgaccaaatatgtacccagcgtaagaagccagagtcgatcagtgttgtagacacgtcgcctctcgatggcatctttccatgccacacccttcacgacctgaagctggagcttaaacccttcaagaagggtccctgcgaccgggtgcagtggctcacacctgtcatctttgggaggccaaggtgggcagatcactaggagttctaggccagtctggcygacatggagaaaccctgtctctactaaaaatacaaaaattagccaggcgtggtggtggacacctgcctgctcacaggctgagtcaggagaattgcttgaacccaggaggtggaggctgcagtgagctgagatcgcaccattgcactccatcctgggtgagagagtgagactccatctcaattaaaaaaaaaaaaaagaagggaccctgctttgttcatgattttattctcggtgtgtggcatacactaggcctgaaataaatgttatttaaatgttaaattacattgtccctccttccgatacatttgccatctggttaaattccagtgaagtcaaaggatggatttctttaaataaagtttgcttctttttcaaaaattccttgggctctttctagaaaagctgctcctttgccatcttcccagcagattcccggggcaggatccacccacctgttcacagctccttccagcgcagtgtgggtccggctgttagctcagcctcaaaggagaattgtaaagatacaggtcaagtgtccttttgaccaccttttttttttttttctatatgcgggattttgtgagacaataaaatgcatgtggacctcagcttaacaaaagctgaatgttcctggggtgagtgtttgaatccaacaggaaatagatgctcaacagctctgagtctggggaggttttaatggcctcttggtccctggtagggtcttgtttttcggggtagttttgcagcctctgacacaggtaagatggtcagtaccggaagctgccatgacgtctagactgaccgttaggaaggtactcactggactggtattcacagatggaaataaaccaaagcagtgtctagggtcaaccartctgctttgctgccttcacrgggaggtcctgggaccctttcatggaggaactttttaatgcttattttaaccctgaaggtaaaacatgaaacatgcagccattactccaagaaaacgtaacgtgggtgagtggtgtgtctcgggggcccacggtctccctgaggccgcatctctctggagagatcgtggacgtccgtcgtaaactatgacctattcacattttcactttactctcaactttccaggagtgagtcctcyccagagagcaagacggagctgcgtttcaacagayggtgctttcaatctgtgctgactgtaacttttrtccatcataggtttgaagacatacctgatatcgggtcagagagccaaggagtctcgctgcagctgtgcagaggccttgctttctggctttgaggtcattgacggctcacaggtgtcctcaggccctaggggacaggggacagcgtcatcagggaatgtcagtgacttggcgcagactgtcaaaacctttgataaccttaaggttagtttttttgttttttttttcctacttctaaaactttctattaattctgcagtagagcacgtgaaataataagcagcctccaggtctgaggcaaacaacttggaatgaccttcgatttggttttcacgattttaatatttagtctaaagttagtagcattctgcatttttaacatccttgctttttgacatatgacgcacctccattgcctttccattgcacaaggatgcttmtcatttgaattattagttattttctcttcctgggacctgtggtgccttttgggatttctagaagctggtgataaatgacagtaaaggtggctttccttggcaccttgggtggagagctagttgataatctgatttcagagaccactttctcaaatacttctacgtctcttgaaatccactattttatgattacttgaaatgatgtyggtgtgggtgaatcctaggacacagctcactgagaggacaggctgccgagaacattgtagtatttcattattggaaccgggatctcctggtagctgcctagaagtgcccgtttctggactgacctgtcatcataaactaccagggaattggcgcggtcgaccttgggtgtgtgaaatcatttcagtttatgagctgttcctttgctttcacatttgatttagtttccccactggtaccttctgtttatttttatagtttaaacatctactgtctccattcttaaaatgagacagagaatcaaaacagctctcctatgctgctttgtgttctcagataacacagtggggtatgtgtgaggatggcggccagtggttacagcttcacccaatacgtccctgcctctccacattcattcacaggtttgaaagccgctattggtatttacgaggaacagtcttcattatgtggcagtcagctggggtatgcagattacttactgggtcagaatacatagtgcctgtcgcccagttacacgtaatgattgcactcgggttctgtcaactccgctcgtggatcgcggtcgttgggtgctttgttagtgtaatgcagggcttctcaccttggcaccgctggcattttggaccaggtagtcatgtgttgtggggctgtcctgtgcactgtcagatggctggcagcatccctagccgccacctgccagatggcagcatacccacccgtaccctactccccagctgtgccaaccaaaaatgtctccagacatggcccagtgtcccctgggggtgcagagtcacccctgggtgaaaaccaccgggacagtggtgttggaccctctcttccctgtactcttggcacatgtgtaaagctcatgtatctgagattccctggatgcctgcaaactttagagacagccgccttgcctgggctgacgttgtgcaggagtcagaaaatggagctctgggctcctagacagcggacccgggcagggaggggctggcgtggggtggaatcgggaatggttttgctatttggggaagaattgtttcctccagcctgcaaactgagctgtatttaagtcgtgaaagacagccccgagccaaaaatatataattcgttgtgtttgccattttagcttccacatatgtgtgtttctgtccgttaggggatgcggtcgcagagttcaccatatcacatgctcacgggtttagtgaccacggttttagcaatggcgattctacactacattgcactctagtcatatatatttgttttggtcggaatgagcaaaaaccatttagcgtatcttcttggcatgtggagattttccaaatattgttgaaagtttctgagaatcttgtgatctatcaagttgacagaaggccgggcatggtggctcacgcctgtaatcctggtgctgtgggcggccgaggtgggagggatgcctgaggctaggatttccagaccagcctggtcatcrtagcaagacatcatctctacaaaaaaattttaaaaattaactgggcttggtggcctgtgcctgcggtcccagctacttgggaggctgagccaagaggatcacttgagcccaggaatttaggctgcatgagctatgattttgccactgcactccagcttaggccacagagtgagaccttgtcctgtctccaaaaaaagggaggagggygctcagtggtaaagtaaattcgggaagcttgggatattcaacacagaaagggtttctttactgcaggacttctcggagccttcactaggctagtagacagtagctaggccttcagaggaggacgcggtatatacagcattctcaggcctctttgagcacaattgttttttttcaagctgcaccttgcagggctaatgtggtcacaccttttgggggaatgctcatgtagtaaaaggagtttcatgccaaggaccaatacattagagaaaaggtgttcaggaaacgttccctgaaggagcatgcgtagattttcacgtgtgtcctgttcctgctgctgctcacttgagatactcatggcttctctttcccctgaactcctgtctgcattcaccgttcagctccaccacgccttcccgtgcctccgcagctgataacgctgttccctcgtctccaaattctcagtcccttcagtctgtcccacttggctgtaacatacacgatcttaaatctttgtttcttatgcgtcttcctgggagctctttgcattcagagactgagtgttaaataacttaaatatttcccaagtgtcgagcatggtgcctggcatgtagtaattaacagtttctttttggctttttaattctttaattaaacacatggagcgatgcagctctgcagagccaggcgaaggactgaagtcagaagcccgagcagaactgtgtagaaccagggcagcgcccacgaagggtttatttcctgcccttagcatgtgtgtcctctgtgaccttaagtcatctcctaggtcatagctggaaaattcttatctaatgtaacataacctgtgtactgtaacgacctaccaggaaatgatagtgatgtcaaaggccagggctttggtcctgaagtcatagctcaaagggaaccctttstacacccaagtgttggcttcttttttttttttttttttttttttaaagagatgggatctcgctctgttgcccaggctagagtaccagtggtatgatcttagctcactgcagctcgaaactctcaggctcaagtgatcctcccaagtcaacctgctgagtagctaggaccacaggcatgtgccactatgcctagctaatttttaaatttttttttttttgctatattgcccaggatggttgccaactcctggggttataccatcctcctrccttggcctcttaaaatgctgggattacagtcatgagccactgtgcctggccttgggttcttgaaatgaccagcagtgagaggtcctcatcctaagggccctgacattgcataatgtgggggacagatactgcccgagtgaaggaaggagaggtcaagaaggaaaccaaggagtaagcattagacatgaggacgccactgtcagcgtcgcggaggggaggcggaccacggcgggcaggggcgcaacttgaagcaagacccttctcaagccttggctttgcgactgtgaagaaactgcagccaggtgcagtggctcatgcctgtagtcctagccactcagacagctgaggcaggaagatcgcttgagcccaggagttagaggctgcagtgagctgtgatgatgccactgcactccaaccagggtgacagaatgagacactgtctcaaaaaaaaaaaaaaaaaagaaaagaaagagcaaacacacacttaattcctctaagtgagagttttcctcttcagtgcggtggtgataaggaagagacctctcgggattgctgggagatgagccggaatggtgcctgtggacgccagggctgagaagaagcctcgctcacactcggcacgcacgccttcactccacgcagagcagggacagtgaccacagacggagccatggaggactgggaggggccgagagacggtcccagcttgcctgcaggaagtcactgactctctggggaaggtcccatcttctccacggttccgattcgagggagattctcacagtgattgcggctgagcattgctgtgggttggatgctctcggccgtaaccaagtcacttgtatgacacgggagcatgtgtgccttggcctgttgaatgtgacgtcagcgctccagcaggcatttgctttccattttctcatgaaccctgtgggtgatgagtggatctagatgccatatatcaataaaaacagcttttccaacatcttcatgaagaaaaagaaaacccarctgggctcagtggctcatgcctgtaatcccarcactttgggaggccgaggcagagagatcacctgcggtcaggagttcaaggccagcctggccaacatggtgaaaccccatctctactaaaaatacaaaaattagccaggtgtggtggcatatgcctgtagtcctaagccactcaggaggctgaggcaggaggatcccttgaacctagtaggtgaaggttgcagtgagctgagaccacgccactgcacttcagactgggcaatagagtgagactccatctcgaaaagaaaagaaaacccaaaattgaattacttgtatcacattacttctgatcagggaaccatttgagctgtgaaagcatcttagtacatctctgaaaggcctccctggagcgcacctgcgtggctggtcttcctgagtttaccttcatctattattcagaaccccgggctgcttggccactgggtgtttctacatggaccagtcagtaatgaagctagtgatgtagatttacccatacggggatgaytcagagaggacctgtcctgctttcaaaaggtttctccttcccctttaaggccactcacctcaggaaccatccttttgtgacagtgaattttgaaaatgaccctaaatgataacttcttttatctacttgttttctatgtgycaagtcattatgagtaggctcagtyggcccaatttgaggaagtaaggggcttttcattcgttatagaaattgaaaaaatgatttcatattttatagacacatacatatataaatatatatagcttagaaattaaataggtatttattataagtggtagtctgaattgatagtggtgatgcttgcacatccctgtgaatatgctataaaccctggagttatatactttaaatgggtgcattatatgctttgcaaatgacatcttaagaaagctgttgtaaaactaaagggtagtctccgccaggtgaggtggtcacacctgtaatcccagcactttgggaggccaaggcagatggatcacctgaggtcargagttcgagaccagcctggccaacatggtgaaaccccatgtctactaaaaatttaaaaattagccgggtgtggtggctggtgcctgtagtcccagctacttgggagactgaggcaggagaatctcttgaacctggaggcggaggttgcagtgagctgagatcatgtcactgccctctagcctgggcaacagagtgagattccatctcaaaaaaaaaawaaataaaaaaaaaaaccatctctacaaaaactataaaagttagccaggcatgttggtatccacctgtagtcccagctacctgggaggctgaggtgggaggatcgcttgagtctgggaggcagaggctgcagtgagccaagattgcaccattgcactctagcctgggcactagaatgagaccccatctcaaaaaagaaaggtggggggcggggtaggaataggaacttcacagtggacaaaccrggcagatgccaccttcaccaaatgatccaggtgagcctccctgctcactgccatccggtaccctagtgtggtgtgctgagaagggcatgtcacctctgcggcattctttccgcaaaccccaaacctcagtctgctctgagaaagcaccaggcaggtccagatctggacatttgacaaaatgcctggccgggacttcaaacgcagcagggccagaagagacagagaaagacagaggaacccccataggctggkggtgagcagggggcatgagggctaaatgcaacacgggacctagaggagacccgaacagcaaagggacggtgsggaaactggggacatcagaataaarccagcagcttagttaacggtatcgcgccagcatgagttgctttggttttgataactgtacggtgagtatgtacggaggatatatgcagagtccttgaactgtctttcccactctctgcaagtctaaaattatttcaaagtaagaaattatatatgtgtgkgtgtgtgtgtgtgtgtgtgtgtgtgtgtgtgtgtgtgtgtagagagagggatggaaatgtatgtgcggaatcattgaactggcattgccagagagtgaaatattgcatttccatgaaatttccccagatgccaaatattttcttatcttgacttcatgatggactgtttccacagctggtaacagtcttcctgcctgacagtctgctgagtatattttcatctattcttgactcggatcgccatcaccagcctggttattgagcccagtggtcctttagggctaagggattgagtgagaggtccagggacttttcgactccsccccgtgtggctctgagattgtgtgtgtgagttttacacgtgtgtgttcatgtggtgacttgtctagtattctcaggccatctgctgtctgttcttactgctttggggatgtaagaaaatttctttttctgtgataattactgcttatcttttcttctaatattctgcttctatttttctctaatgttgcattagcagaaatactctattttgtacttatgcccgtacctaacctgttagcttaaacagcaatgccagggacatagagttagccccatggctctgccgcactgacaggctgcccygttcacctggagatcgttggggccaggagctctgctgcctgggctcaccgcctctttacgcggttccgaccgtaccgtgtggctctgggccagtgcttgctctgtctcagtgtcctcatctgtaaaatggaaccgatcatagtacctgcatcgtggttgcttacgagggttaagcagatacaaggagtttcaaagaacacctcaggaaattgtgtttgtggttattgtggttgcaatatcatgactattcctgctcaccatgttaacatcattttgagtttgggagcaaaggatgcttctgataacacgacatcttgcaaaacagtcgtgttgagaagacgaagcaggcaaagccagggctcttctactggtgtatcctcctcatttctgagaaaagaggtttccccactccctcccttgacagttttgaaaagggacagctgttggcttagaaatgatttatcttgtgatgagaaataaccttgaagaaaaaacgattttatagctttgtgccatatattttgaccggaatgtagggtgcaygtcctgaaatgtgttaaaaacaaatgcaaatgtgcccaagtgtgttagagaaatggctacactcttccctccaaagcccacgtccacatgggggaaggagcaaagataatccggaaaaatgcagagtttgctcttgggcgttctccagggaatctcaggttacccaggcaacagccagcaaactccctggcccgccaggcgtgctgctgggaggaccttagaagtcttgagacttcccttgatgccggagggcccagggtgctgcttggaagaaccaggaggacaggcatagctgctcaggtcactctagggaaacaaggcccaggagagcaaggtgccaggattattcctgggtcctccttgtgccaggaaagggggccagagccatatgacggtggtcygggtcccagggccctggagtctgtggccgtctgcggaatgatcattgctgcctcacagtgtggctgcaaaggacgagatcatacagtcgagactgcagatattgcgtggatgggggcccgacttgttcacgggtaggatcttggcccatagacattcctaagtcatagtagctactgtcattatgacactgctttttctctaatgtgcctgcccgtgtggctccctgtgagccagctgatagggttgtctcccaaggcagtgaggtgcttccatgcctgsagcttcctggagtcagaaatactcttcccagggagggcttctcagcaggggtggagatgcctgcagctgtgcagggggagacgctgtttagccggctgggaaacatttcacagaggcatstgtacttggcaaaaaacatgttgtgaaatgtcttaatccagattaaaattaagctaatgaatcgctcaaggaaaattgccatgggggttggggggtaggaggtcaggggagggaaacaaacccacccaccattgcatggtgggaccctcctggtacagaaggggcctctaactacagctcagaaggggatgttgagatgtgagaatctctccattgggtagatggatttctctttttttcttttcttcttttcttttcttttcttttcttttcttttcttttctttctttctttcttttctttttttttttttttttttttttttttgagacagagttttgctcttttgcccgggctggagtgcagtggcaccatctcggctcactggaacctccacctcccgggttcaagagattcccctgcctcagcctccctagtagctgaaactacaggtgtgcaccaccacgccaggctaattttttgtattttagtagagacgggctttcaccatcttggccaggatggtctcaatctcctgaccttgtgatccacccatgttggcctcccaaagtgctgggattacaggcatgagccactgcgcctggcttcttttttcttttttaaagagacaaggtcttgctctatgacccagtctgcagtacagtggcatgaccatagctcatggcagcctctccctcctgggctcaagcgaccctcccacttcagcctcctgagtagctgggactacaagcacacaccactgtgcccagctaatttctaaaatttttaaaaagcttttgtagagatggggtcttgatacattgcccaggttgatctcaaactcctgggctcaagcaagccaccacacccagctctaagatttcttttgtttcatttgtttgaaagtttttatctagaaaattatccctcaaaaggaaggtagctgaggaatcttgctctgtcgcccaggctggagtgcagtggcacaatctgggctcactgcaacctccgcctcccgggtccaagcgactctcctgcctcagtctccccagtagctgggattacaggtgtgtgccaccacacccagctaatttttgtatttttaatagagacagggttttgccatgttgaccaggctggtcttaaactcctgacctcaggtgatccacccgcctcagcctcccaaagggctgggattacagggatgagccactgcgcccagccaaaatccgcattttcaaagtgcagtaaaatgatggctgctgggtccgggtgacacaggtctgtgggrccatgccacccagcgcggcctggagtctgcacctggctctcccccmacctcccatactcccacttcccggacaaacctgctgggaatggaataggcagtgagcactgtcccggccctcaggaggcccgagcgtgggtgtctacagctggccatgtgacccagacagcccccttccttctgcaagcgcagcctcatttgccatttgtgggcggctctgccagacctcacttctgtatcagaacttcttatcactgcagggtgcaggcctcggcctctgttcaaggggatgtaagcaaagcactgagttccccacctgtggagaccactgccccaggcccccagagctcagcctcatcccagtgggcatgcccgggctgcaccggccttccagcccctctgagggaagcccttgtggagggcatggagccccctgtcctcagtgtgccctctggtgccaagttggtttgactgtcacggtgacacattcatggctctaaatgcttagaaaatctcataaagccagtgtgccgtggggggcactgaagaagcaggcggcctcgtcttaaagcacaggagggttggccgggcacggtggctcacgcctgtaatcccagcactttgggagggcaaggcaggcagatcacttgaggccaggagttcgagaccagcctgaccaacgtggtgaaaccccatctctactgaaaatacaaaaataagccaggcgtggtggtgggcgcctgtaatcccagctactcaggaggttgaggcagcagaattgcttgaacccaggaggtggaggttgcagtgagccaagatctccccactgcactccagcctgggtgacagagcgagactcagtcccaaaaaaacaaacaaacaaaaaaagagagaaaagcacagcagatgaacttgaggcaagaaaaatacctgaaacagactgacgccaggagattcctgtgactaaatggctacagaagaatagataccaagggctgttctgtctgtaatcaaggacattgaattaccagatgaactttaatgaccagagagcatagttaacagaagttttcatattcactaccagcatttactgagcacgcacttgcacttcgggctttggctgagccaagtgcagcagacgcttccacacctccagcttcctttcctggtctaccggttgggccctgaaatggctggtgtgccccatcaagcaccaagccccccaccttagccacaccagagagttccctcaggcatcttttaggcatgggtatcaggcacacctattttattcttctcttggtgttagatttttttacatttaataagagcagtggtctcattggcaaatatatacatatttatacatatatatatgtattttgagaatgggtttgctctgtcacccacgctggagtgcagtggcacaatcacagtgcactgcagccttgacttccttcgctgaagcaatcctcctgcctcagcctcccgagtggctgggaccacaggcacgtgccatcaaggtcagctaattggttttatttttagtagagacaaggtctccctatgttgcccaggctggtcttgaactcctggccctaagcagtcctcctgcttcggcctcccaaagttctgggattacaggtgtgagccagcacaccagcaaaatgtttagaagtttaactctgccagtcaataccaagaggtgctttcaaatagactcactgtatgttattgataactagaacattttacctctgttgataatgtcagtttttaaagagctgtaagcaaatgttatctagatgccattatttgctcagatatgttaattaatgatttcgctagctgttttggcatgtatattttcattttttgaatgcatacaaatgttcaaatttagcttgtatgttacatcagattcccaaactatacaaccctgtagaatctttgtttcttttatttaatatagtacaggtctgcagtctaactttaaatacaacctgggtcatatctttgcccttaggtagtgacacttactttaaatttccaaaataatatctggcctcccataatttatttcaatgttttacacttcttgctgcaaggaaattgcttttgagtccaaaaaaaaaaaaawatatwtttcttgccacggtttgtcttcttcattggaagctgttagttgctttcttagatggttcctaggttacctggtcacattaataataataataagtttattaygggtatactgtatgccaggaactgtgctaggctatatatatacttatttcatttaattattatttttttaagacagggtctttctcttttgccccaggctggagtgcagtggcaccatcaaagctcactgcrgccttgacctcccagactcaagcagccctcccacctcagccccacaagtagctgggactacaggcacatgccaccaggccaggctaatttttatgctttttgttgaggcagggttttgccatgttgcccaggctggcctcaaattcctggactcaagccatcctcccaccccagcttcccaaagtgctgggattacagccgccacacccagccaatttcatttaattcttagcaacatatcttcactcttkgtttatagatgagggaactgaggtaaagtgatttgaacagagtctccaaactagtaagtacttgactagggtttgaatcctagtttatgagaaataaaggctttgctctttttagggtacctgtattaaatcttgccttctcttttctaggtccattaattcctataaacttttaagtacgcctagatctggaaatcgtgtacctttgattattcagcccatcttatgagactagctcaccatcacacggagcttaagaaccttggatttgtgtcctcgcatagttggtggccagtttctttacttaataacagctttgttgagatataattcacatactataaaatcgatctttttggccaggcacagtggctcatgcttgtaatcccagcactttgggaggccaagacgggtggatcacctgaggtcaggagttcaagaccagcctggccaacatggcgaaaccccgtttctactaaaaacacaaaacaagtagccgggcgtggtggcaggcacctgtaatcgcagctactcaggaggctgaggcaggagaatcgcttgaacccaggaggtggacgttgcagtgagccaagatcgtgacactgtactccagcctgggtgacaagagtgaaactccatctcaaaaaatatttaaaaatcgatctttttaaagtgtacagttcagtggtttttagtatatttagcaaggttgtgcaaccatcaccgtgatcaatttcagaacatttttatcatcccaaagagaaaccctgttgaaataccacaaaccaggtggcttttaaacaacagaaatgtatttctcagggttctggasgctgggaagtccgagatcaaggtcccggaagattcagtgtccagtgaggacccgttcctgcttcacagatggtgccttctcccagggcgaagggacgagggattcctctggggcctcttttatgagggcactaatcctattttgaaggcttgtcccccatgacctaattacctcccaaggctttgccccccaatgccatccccttgggaattaggatttcagcgtctgacttttgagggggcacaracattcgaatcgtagcaaaccccacgccccttagcagccactcccccttcctgccccyggtcccgcctggcagccaggaatctgccttctccctccaaggattcaccttttctgaatatttcacatagacgggatcacgtaatatctgtgctgtgtctggcttccctccccgagcataatgttttcgaggttcaccatgctgtggcaggcgtcagtgcttccgtctttttcgtggctgagtaatatcccattgttcgaatagaccacagtttgttgatccattgttcagtcagtgaacattcccggttccatttttgggtcctgttgcgttcgtgcscgggtttctgtgtgtttccactgtcactttgcccgttggctttcagctcatccccgagcggttctgtgtgccttccccttgctcaccaccatgctgcgtgacggcagatggcaacagcggacctgcctgaattcagggtggcagtcgcggtttctgggtgtgtccccacagtctgtgtttttcttctagacctgcccttcgtgcggaatcacatttgctcccaaatctgaagccggcgccgagggaggagcacctcaaaacggctgccaagacgagcataaaaacagcaccaaggtaacaagctcatggctgttgttcctgtcagttcctctcctggcgcatccacccaaggtgacattcctgtcttgtcgacttcttagttctgagagtaactcctcttgggtaacascactccgcacccgcgggtcctccgggtgttgaagagaccggcagggagctcgagggagggtcagcagcaacccacgtggaaaccagcgctcaggggctgagctgggcgggattcctytaaaggccaataagggtttaaaatgcgtggattcgagtgccgggaggggatttgtggtactggaagctggactcagtttatgakagaatatagacgggcagagacaagagggggtcttcacggcgagaaaggctgggtgaagagagaggttgggagttagggccggtggcaggaaggctttcaggaaaaccagacttggacaccagggccaggactcagcccacccgcgagagcctgtcggcgggggctcatgcaggcgactcacctggggcgcgggctctcgtcctccatctgctctccatctgccaaaggattgcaggtgcaggtcatcccatgccttcccacagccacgggggacacccacgacacgagcccgtttccatccaccttgcctgtgccctgacagccctggacccctcgtcatacttctcctggacccccgacccatgcaccctgctcccagaaccgtggttctggcctaagcagactctgggggcctcggctcctcactttcctcccttcccctccacctccgcaccgactcttcccatgtctcaatgtcctggcagcctgaacacccagcgttaccactgggcactgttgggtaacaggaaggagcagacgggcagtcagggctgggattggagcaggtctgtaggcgcaggggggtgggggttcctcgcaggtcagaaagtcccacgccyrgtgcagcagcgccccgcagcrgaggtcggggtgggacaggcgtgtgtgcccagtgcccggtgccacttcacttcccgtgtctgcgtcctctttgtctcgaggcaggcttctggaggacctaatcccaaaactcagaacgggctcctcagccctccccaagaggagaagctcaccaacagtcagacttctctgtgtgagatcttgcaggagaagggaaggtgggcaggggtgagcctggaccagtcggctctccttccgctgaggttcaagaacatccgggagaaaacggacgcccactttgtggacgttatcaaagaagacaggtacgactggggctgtctgggaaaaagcaaaggttgcaggcagaagcctctctgcctttttcttttcttttctttaagactgagtctcgctctgtcayccaggctgcagtgcagtggcgcgatcttggctcactgcagcctctatctcccargttcaaacgatgctcctgcctcagcctcccaagtagctggggttactggcacccaccaccatgcctggctaggttttgtatttttagtagagatggagtttcatcatgttggccaggctggtctccatactcctgacctcgggtgatccacctaccccaccctcccagagtgctgggattataggcgtgagccaccacgcctggctttttttttttttttttttttwataaagactaggtcttgctgtgttgcccaggctggagtgcagtggctcaatctcggctcactgcaacctccacctcccaggttcaagtaattctcctgcctaggtctctcaagtagctgggactacaggcatacacaaccatgcccagctaatttttgtgtttttagtagagatgggtttttaacatgttggccaggcgggtctcgaactcttggcctcaggtgatctgcccgcctcggcctcctaaagtgctgggattacaggtgtgagcctgtgcctggcctaatggtaacatttttgaaaaatacaggtccagtccttttatcaaatattcctgaagttggattggttagattcaggctctccctctggccaggcagagactgcagaagggatgccgtgtcctcctcagggtgtcctctccagggacacgcagtgcccgtctgttcctcattagtgatactaattttgattaattaggcaaggtggtgccgggttstctcatctagggttattatattcctcttatgactaataagcaatctgtgagaaaatacttgaagatcttgtacatatttcattccccatcagaattccctagatttaacattcattgatgattcttgcctctgtcttcactataatgcctcaaagggtgattttcagccaggcgctgtggctcacgcctataatcccaacactttgggaggccgaggcaggtagatcacctgaagtcaggggttcaagaccagcctggccaacaaggtgaaaccccgtctctactaaaagtacaaaaattagctgggcgtggtggcgggtgcctgtcatcccagctactcaggaggctgaggtaggagaatcgcttgaacccaggaggcagaggctgcaatgagctgagatcgcagcactgcaactccagcctgggcaacagagcgagtctccatctcaaaaaacaaataagaaataaatggagcagcacagctaatagcagtgtcgcttctgccacttgactgctaaaatgtggccttgtgcacatcctctctgcagctgcgtggttgctcttccctcagtccacactccctgagtcaggggaggagagagggtcagtgtcctgggacagaattatttctcttctgagtctgagaatgttggaagttactggatacctgtcacagaaaggagagtgtccgccgtgctgcaaggacaggaaggaacacacgtgatgagccgtactttgtgtggggggcacatgaggcacttgacatatttcacctgatttactctttttttttttttttgagacatagtcttgctgtgtcacccaggctgtaatgcagtggcgccatcttggctcattgcaacctccatctcccaggttcaagtgattctcctgccttagccacccgagtagctgggattacaggcacctgccaccaggcctggctaatttttgtattttttgtagaaacgggggttcaccatgttggccaggctggtcccgagctcctgacctcaggtgatccgcttgcctcggcctcccaaaggtctggggattacaaggatgagccaccgcgcccagcctcgtctaatttacttctgatagtcactgtatgagggagagaggctaacacagctatatttgctttctgaaatcatgttaacgttcccttagtttctagtaattttctgcagtatagaaaggatattactatttgctggcaattcataaatgaatgaaagagtcatggaaagcggggttgatttccctgctattaaaatcactgagctttatcattttgcaggtttcacatgcaatctgcatatgtgacaatagcaccaaaattacgctaactataaacacaattttgtgataacaacctgttagcttttacggtggcaattactgtcagtgctctgaatgacaggaccgccggttctgaattatgttttcgtttgaagcctccaaatccatgtaagtactctcagcacagtgatctgcgtgttcttcacaaaagattgtttcaaagaacagaaaagctgccttcatcktctcctaatcctagacattaggaatgtgttttcaaaaacaagcctcagcagctyacgctgtcatcccagcactttgggaggccgagatgggtggatctcttgagcccaggagttcgagaccakcctgaccaacatggtgaaaccccgcgtctgctaaaaaatacaaaaattagctgggtgcggtggcaggcgcctgtaatcccagctactcaggaggctgaggcaggagaattgcttgaacctgggaggcggagattgcagtgagccaagatcgctgcgccattgcactccagcctgggcgacagagtgagaccttgcctcaaaaaaaaaaamcccmaaaaaaccaaggttctgwtgatgtgtgytataatcatggtggatggtcattctttaacgaaggtgaaacacaaaatatgattatgctttgaggtgcgaaggactttccacagatctgttttaacaaggggcagctgagtggcgtctgttccacaggcgcttttagacgcagctgttgtaatatacctaatgagcagcgttttggtagctaattatgatctgaaaacattggcacagtyatggtgctgggtattgatcgactgcatttgttgtgtcttctagcctgatgaaagattacttttttaagccgcccattaatcagttcagcctgaacttcctggatcaggagctggagcgatcctacaggaccagctatcaggaagaggtgcgttcatttctccttgcgcttttactaaagaatgtgtttrttgttctcacatggtcattcactgttagttttgtgctttaccaagrgatgggaacacgaaggcgaacattgatttcccacactctgtaaaccctaagtggcaactgtacatgaaatgtctctttgcaaaggaggaaaaaaaccctttctttagtcctttgtcttaaagcgcagcctcgccattactagcccctttcctctgccgtggcatctccaggctatccccagccttggaaggggcccccccaccacaacctgtcctgaaaggaaacccccaacctgccctggaaggaaacccccccacctgccttggaaggggcccccacacctgccctggtaaaggaaccccccccacctgccatggaaggggtcccccacctgccctrgaaaggaacccctccccacctgccctggaaaggaaccccsacacctgccctggaagggaaycccccacacctgccctggaagggaatcccccacacctgccctggaagggaatcccccacacctgccctggaagggaaccccccacctgccctggaagggaactccccaccgacctgccctggaagagcccccgtcccacctgtcytggagtcttgggtgagactcttctctgttgccctccctgctttcttcccctgagaagggcccaggaggccttcacctctctctctaactccggctccatgttccctctcccgcccccaccgccttaaccccttgtacttgacttctcagcccatcacccaatcccacttcctccaagaagctctccccgactgcagactggattgtacttcccttcatacacttccttctccgtgtgtgccccattttggaatctttccgtgtgtggttctggattcgtgttcctccctccctagatgctcagctctgtgaggtaggacccccgtctctctcctccagcccctcctkacagcctccagcacagtcccaacacccatctctctcctccagcccctcctcacagcctccagcagagtcccagcgctcacaagtgctccttagggggttgctggaaggaataatacaagaayctagagcctggtttgaatcctggcggcttccagactgcattctctcctctgggcccaaacctaacctctgagtgttcccaagtcaagagtggatgccctccccacccggaacaaaagggatttctcactctgattcccttggttcctccagcaggtcttcattaaactccgtggtgtcctggcttgggctctagagagaccctggtgagcccagtagagccagttcatgcctcgtggggtgggaggtgcccccttccgtcagcctccaagggacagtgaatatccgttaatgtcccagacatggctcccggagtggacttgcaagttggcagttggctggttggtggcccgtaaggcaaaatatcgtctcatttaatgctcatagcaatgctrtagggaagctgatgattatcctccttttaccaaagagctgacgctgagcaaggctgaacaggtggctgtggtcccatagccggggtcggacacgagtggtctggctgccaaaccaggcgtccgggccgctyctcgccctgcactgctgagcctcccaaacagcagacacctttgccatgccttcctccaggcaccaaatgtacgctcagcctctgctctgccagggactgttcttggtgctggggaagggggaaagacgtggcctgatggggagcaggaattagaaacaacatccggagctggaggtctgcgagtgccctcccagcacacggcgaggcaccaagcccaggctgggggctccaaggggggaactcctgagcctgcctcagtggggggactaggaattaatggaatgtgggatgagggaacattctggagagtggggccagcacccacaaacgttagagataccaaagagcctggttcgtccagggagttgcaggcgcatccggggcagggtggggcaggagtggcaggacstggcaggggccaggtcacggctcccatgccatggactttatgccacaggccatggggagctgttgaaggatctggaacaggttgtgttacaaagatcacacagctcacacctgtaatcccaattactcaggaagctgaggcaggaggatcacttgaggccagtagatagaccagcctgggcaacatagtgagaccctgtctcttccaacaaaaagaagaaaaacatggccgggcgcggtggctcatgcctgtaatcccagcactttgggaggctgaggcgggcagatcacctgaggtcaggagttcgagaccagcctggccaacatagtgaaaccccgtctctactaaaaatacaaaacttagccaggtatggtggygggcgcctgtaatcccagctacttgggaagctgagacaggaaaatcgcctgaacccgggakgcggaggttgcagtgagccgagaccatgccgttgcactattgcactccggcctgggcaagaagagtgaaactccgtctcaaaaaaagaaaaaaaacaaacatgtatcagctgagtttcggagggtgataagagtgtggacaagacaggaggccacatgacaggtgggaggctgttaccgaaactcagggcaggtggccacagggtcccggtggggaggaaaggagagatgccaggacaagggagcctcccagctggcccgcgtttggggactcattgtgctgggggctccacgtgggtgcgttcttagccgagcatcccaccgcccacaaggtgcaagtactggtttatccctggttttggataaagagactgaggcatggacgcgtgggtatcatagctaatcatggtggagtggccttgagcccagacagcccggctgcagagcctgtgctctgatgatggtgggacggccgcacccrgaggccctgggatgtgggtagtgagcagggcggagcctggcccacggtgccctggcagccagtggcactgtccctgggtttggagcccatggggagagagggcgaaagagtgtcatgatgtgggggagcgtcgttctcagtgggactgggacaggtggcactcccgggatgyacaggggtggggcagatgggcctgggagcctctggcatcagggccaggggtggcccagagggggaggctgtggcagggacaggtgtctctggcaagtagcagggcaggcaggagagactgcaagggaggtggagggaggagcggggcctctgrcagcgtccatggatggggcagttctacagaggagatggcagccccaatcaggaaaggccctgtacccgagcccttggcttggaaggtgggaggtgtgggctctcagaaggacggcagcccacgtggaaaccttccggcctcacatgtgggcaaggcagtgrtgtctcagggacatcacatgcatgcacccggccctgactcgaacccctgacgggcactagatggagccccacagaaaggggacktgcgtgggcctctgccaaggtgagtgggcatgggcagtgtcgcccctgaaattcctacacctggccrggtacagtggctcaggcctgtaatsccagcactttgggaggccgaggcaggcagatcacgaggtcragatagagaccatcctagccaacttggtgaaatcccatctctactaatcatacaaaaattagctgggcgtggtggcgggtgcctgtcctcccagctactccagaggctgaggcaggagaattgcttgaacctgggaggcggaggttgcagtgagccaagatcgcgccactgcactccagcctggcgacagccagatcccatctcaaaaaaaaaaaaaaaaaaggaaaagaaaagaaaaatgaaaaaaaagaaattcccacaccttctgaggggattccagggctgggacctgactygcccttttgggcactacagagcctccagcttccttggagagaatttggaaccaaaccctaacccccaggttgccctggcagggtccagcctggcatcagggctgactggcagccttgctcccaccgtccaagtgcccctsctgccctcccacctagttcctgggagtggtcgaggcacccggagctggtttgtcccaaagaacgcacaccgcacccagggctgccaggagacctttccgctccgtgcgtctccagctcctgccctcagccccgagcctggccgggatgctgagtggacacccatggcctctcaggggttgccagaaggttgcaaggccaaatggaaagcagctgaactggctacatcccttcctctcccaaccacagcctctgcctttggatcctacaccttcctctaggttagggrsacactcaggagtcaaccggtccatgccaagtcctggcctggctccttgttcgctgtgtgccctaggggtagcccctggccttggcctcccaatctgtacaccgagatgggtggtagttcctgcctgtggggtgccgtgagcgtcaatggagatcgcacctccccagagccttgcagggcctgggcctggtcacctcttggacgtgtcagcatcgttatttctccccctcaattgccgaacactagtgtgtgcctctctagtgtactggcccccagcacagagccaggccccgtaggttcccaggcgatgatgtgccacttaaatccccgtcggccacttccgccacgaagccccgctttcgcacctgctgaacctaggactccgccatgcagcaggaccgccctgcacattgctctcgtccaactgccttacagatgcagggacctcacctgcgccagtcagtaactcatcttgcagctaaatatataatgtgtctatgagaatgtgctgggtcataatcagttgctctgtgaccctggcagggttttttttgtgtttttttgttttcggaarcggtataattctgcagtggtgtgatcatagttcactgcggcttcaaactcctgggctcaagcaatmctcccacctcagaycccaagtacctgggactacaggcacaaaccactatgcccagctaattattttattttttggtagacggggtctcgctatgttgcccaggctggagtgcagtggcatgattatagctcactgcggcctgaaactcctgggctcacacaatcctcctgcgtcatcctcctgagtagctgggaccacactcacgcactgccatgcctggctaattttaaagttttttgtagagatggagtctcactgtgttacgctggccgggaactcctgggctccagcgaccctcctacgtcagcctcccaaagtgtcgggattacaggcgtgagccaccgtgcccagccccctgggcaagtttaacttctctgtgccttggactccccagtgttaaatggggtagtagagggagacagccctccgagagccttcctgccctgtgcctggcccagagcagcagtgctccgcacgtrttgcctgtttctccatctgaactgcgctcctggccgcccatggcctcccagtcattctsctccactcctgctccacacaggtcatraagaactcccccgtgaagacgtttgctagtcccaccttcagctccctcctggatgtgtttctgtcgaccacagtgtttctgacgctgtccaccacctgcttcctgaagtacgaggcggccaccgtgcctcccccgcccgccgccctggcggtcttcagtgcagccctgctgctggaggtgctgtccctcgcggtgtccatcaggtaagcgccgcgtggactgggtctccagctctgagccrttagctccctcttctggctccatggcttatggctgagcggttggactggtccccagccagctgtccctgctggctgatttctggagatgggtccccgygtcctccccgagccctgtgccccagcatcctccctccctgacgttggcccagatgcggggggaccacctcgctggagggggcggkgcctccacagccccaaccgctgccagcttgtccccagatttccaggttcagagactgcaaaggagaaggtgagaagataggaaacaatctggaggaaggaaaggaaaagacatgagcgggggtagtgggcctgggacagcaggcgcctcttcagagtaccggagccaaacagcatctccacgcacttgcctcaggcagtggtctcttggmtgtgacgccaacagaagaaagaatagacaagcccaacttcctcagaagttaagctgttgcgctacaaagaacaccatcaagaaagmgaaagaacccacagaacgggagggaacacttgcagatcaggcctcggacaaggtctaacatctagaatggataaagagcacacatagcctgataataaaaagacagctcattttaaaggggacagaggctccgartagaccacaggtgcgtcttgggaaagctgggccctcgggaccagcctggctccctgagggggctcgcagcggctctgtattcctgagcaggmaggtggccctgtgtggtccccgtcctgggcaccacaagccccttgggtggtcctgtcaccctcaacaggatggctgccggcctagcagagtcccactagcaacggtgccccggagctgggcttcaaacagacatggggaggcagccctgaccttgagcgtctgctgcccttatccaacatcccagggcagaaatgaatggctttgagtctggcgtgaggcgccggaatgctggcttctcccatctggggtgggcaggctgggattcctgccccctccttcccacstgcactgtacccaggaccctttcagcttcctccgaggccgccatgggccatgctgtctgtggcgtgtgctcagtgtttcccagaactccctgtgggctcatgccccatcacccccagcgagcagccctcttcctggcacagcctcccctcctgcctcagtgccctcctgtgcttctggggacccctcccaaaggagccgtcgcctgcaaaccctttcagggtccacttccccagaacccaaaccagacatcctcaggcccctggttggtttgtttttcctctttaaaaagatcagctttaggctgggcatggtggctcatgcctgtaatcccagcactttgggaggccaaggcaggtggatcacctgaggctgggagttcgagaccagcctggacagcatggtgaaaccycatctctactaaaaaataccaaaaaaaaaaaaaatagccattcttggttgtgggcacgtgtaaccccagctactcgggaggctgaggcaggagaatcaacttgaacccaggaggtggagattgcagtgagctgagatcgcaccattgcactccattctgggtgacgagcaaaactccatctcaaaaaagaaaaaaaagaagatctgctttattgtgacatgatttatatacaataaactcattcaagtggacaactctgatttttagcaaatttgaagaattgtatgaatatcaccactatgtaactatcgggcacctccatcaccccaaaaagaaacccatcctcatgggcagtcactcccccaggtctgccttccctggtccacccccaggttttcctctaatgtgggtagctgtagcgtcttgagggctctgaggccagcaytgtctccattcctttttactttcaccctttagctattattccctgctccttcagacccaattctaaagcattgagggcaaccccggtgtagactgccgagggctggggtgaggtgcgctggaactgcctgcacagacatactccccaaggatctggtgaaggtggtggctgctgcacccctgaacaggcctgtggtgggatttggttccatttaccaggaatcgtcaagcctgggagaggcccagaccctgaaaggcttccctggcccctctgagggccgtgttgaggaccccaggttgacgggaacctgcgctgtggggtatacgggcaccccatccctttcctgtacaggaggaaagccaggcgcctcctcagtgactggcccaggccccgcccgttgcctccaggaggcttcctgcatcaccctctctgctctgccccagcaggcgtgaggtctcattttcagatccctgcagtctcagggaccagcatgaaggccccctccaacctcacatctttcccgctgctgactgggaacttggttccctctgtyccccctcctagggcctctgtattctgcatatttgtggttattcttggaagtattccaaagtcttcattatcctttaaatatcaggaagccagggctgtccaggaccctaaaagggtgaggctgtgcctgcgtccatgtggggaatggctggagagtgagcgttccctcgcctggccacaccacgcagccaagagggagaggcatggtaggtgttcaggcccgaaggctgggggcggggggctctgtgccagaggcttttttgctgttcagtcacaacagcggcccccgcccagcctctcctgaggcagggacagcaggcctatccccagctccctggcagcaagcttgagagaaggactgtctccccacgaggaccccacaccttctcttcacctccccatgtggccccaccatggcccaggggtccttggactcagccaagacctgttcctcctcctcacagtggttcttggcccgcacactcagctgcttctttatacagaaacttttattgtgtcaacatcacactcctgaaacgaagcccgctagacacacgcctgcaaaaggagtcagtgaatacagtcgctctgcttagaaggacaaagtcttttaaaatgaaatacgtggtgctggacctcacgtacaacagagccccgctgtctggagagtcctgaagccgccagctasaggtgaacatgcacgatgaacatgacagcccagatgcagacggcacgcgtgtgcgggtttggtggtctaagcgccacgagccaggttcagcctgtggtgtgattttctgaaacactgatgatgatgccccaaacrgcagagaccactgtcactcagtttccacaggagctgcgctccaagaaaatccagggtgtgtcagcaccaccacagagcaccctgtttgtagctgggacacagcctctgggctaagatgctgtcagcagccttctgcctttgcaggtgcccaggggcttggctgctgtgtggggtgcagggcagaacctccctgggtggcacctgcccacatgcaggacagctctgtccctggcgcctgcccaccagatgccaggaccgcctcttctgctgcgacaactgcacgggctccacagaattccaggacgcctccaaagctgcccccgtcaagacctcctgcctcagaagctgatgggagccggtgacggcaacgtggtggcccccaggagactctcctcrgggcctgtgatactctcacgtgttctgttaggcgagcgaagcatgtgcttttcacaagcatattttatcacaacgcaacatgtgaccctagaatcaggtacaatgagctaagcctggcttccttgccttctaccaaaagtgagggaggtagactcccaccccacgcctgctctcacgcccatcccaggggcaacacgggagagagcagagggcggcgctggctgcggcctcgcacckgtctcctggcygatgacccaccccgggccccgtcgctcctgctaacccccatgcctctcgcaggatggtgttcttcctggaggacgtcatggcctgcaccaagcgcctgctggagtggatcgccggctggctaccacgtcactgcatcggggccatcctggtgtcgcttcccgcactggccgtctactcccatgtcacctccgaatatgagaccaacatacacgtaagtaaaggctcagccgttttatttccacgctctcctggactccctaatctctcttttctttaaatcacttgggatagcaatttaaaaataaaccctttggccaggcatggtggctcacgcctgtaatcccagcactgtgggaggtggaggtgggcagatcacaaggtcaagagatcgagaccatcctgsccaacatggtgaaaccccgtctctactaaaaatacaattagctggtcrtggtggcaggygcctttaatcccagctacttgggaggctgaggcaggagaatcrcttgaacctgggaggcagaggttgcagtgagctgaggttgcaccaccacactgcagcctgggtgatggagcgagactgcgtcacaaaataaaataaaataaataaaataaaataaacccttgaagaggcacgaactcttttactctcctgagccagcttttttagaagccgacttagcattggcctgcccagatgctcacgsccgggcagtggccgggctggggagtccccggtgggcacgagtccctgccagtgtggcttcttcttcatcaagttccaaatcagttattttccttcacattttacaaagaagcgtctgtcccacctttcctaaccatgcgagaagcatacctggcacacagaattgacttgtgcccgggtcggctgctgctgatcaggaagggamctgtgctaaactccgtggagagggaaccagcacggccgtgggagatgatccttctggtgcaagtgagcatgagcttccgggcgggctgatggtgtttgacactttagccccaaatcacatctcactgggccccaaggaaaagtgttttgaaggaaactgatcacacagcgtttctcaaacagggaggcctccctttcctttccacgaagacacgtgccatttcccacacctgcagaagagtgtgatgccatgtgaacagggagcctcacgcygggtagggaacctagaggcttgatctgtccttgacactgcccactagcaaaagtaagactgactgcagatagtgagcaattagcyggtatcggtgatatttttaggttacacagaaacatggattaggccgggagcggtggctcatacctgtaatcccaggcactttgagaggccgaggcaggtggatcacctgaggtcaggagttcgagaccagcctggccaacatggtgaaacccagtctttactaaaaatacaaaaattagcgaggtgtggtgccgggagcctgtcatcccagctactcatgaggctgaggtaggagaatcacttgaacccggaaggcagaggttgcagtgagctgagattgcaccactgcactccagcctgggcgacagagygagactcagtcaaaaaaaaaaggaaacatggattagtggcgaatgttttggcggccgggtrtagcaggggtggcggggtggccctgggcggctgtcctaacccttcgcctcttgcagttcccagtgttcacaggctcggccgcrctgattgcygtcgtgcactactgtaacttctgccagctcagctcctggatgaggtcctccctcgccaccgtcgtgggggccgggccgctgctcctgctctacgtctccctgtgcccagacaggtacgcggccagcactgcttgcgggcaccagggtgcgtggccaccttgcccgaggttgcrtagggcctggctgcatttgcacattgcttctcacgccccgatagagatatttcccatcatgacccaaaatagctgtcagcacacatcataccaaagagctaatgagatgccctcagagtaatatgcaaaagaaagaaaaagaatatcatttagaacagcactctgggtagttgaatgtagacatcctggaaaacataatgctgccattgcattataccgaggtgacttctgatgaatgggctggaatctaagaaagtaggacctgaaggatttcatagaagatggtcaaggccatgaaagagcggagctgcagatggatgtgaaggtggagaggaagctggtgctgactttccttgagtggggtagggttcatgaaccgggacaggtcacagcctggaaggaggaggtgaagacgtaggatgatcttgcaagtcacctggggcttatttcaaaatattatgtcaggctgggcacagtggctcatgcctgtaatcccagcactttgggaggccaaggcaggcagatcacctgaggtcaggagttcaagaccagcctggccaacatggtgaaaccccgtctctacgaaaaatacaaaaattagtcaggcatgggggcgtgcacctgtaatcgcagctacttgggaggctgaggtaggagaaccgcttgtacccgggaggcggaggttgcagtgagctgagattgygccattgcactccagcctgggtgacaagagtgagattccatctcaaaaacaaaaaataataaataggtcaaaacagttccccatatgatgtcatgagacgtaggattaatgaccagtcactgaacataggtcttttattttgaaatcctctgcatactgaggaggacgctggccttcagaaccgtatcactggtaggtgctgaggaatgggatggcgcagacacagaaacaggagtcagggaggccggtagacctctggggacaagcccagttctcatcattgtactacaaaaaatgtaaaaacttacaggatggcagtgataggtgctatatttaaaatatttgccattagcgacatccagtaagatccctatctttcatgtgttgcactaactgaataattcttgatttgttaaaaataagtcccagccggtcttggtgctcacgcctgtaatcctaccacttttgggaggctgaagcgrgtggattgtctgagctcaggagttcaagacagcctgggcaacacggtgaaaccctgtctctactaaaaatacaaaaaattagccaggcatggcggtgtgcacctgtagtcccagctactcaggaggctgaggcaggagaattggttgaccctgggaggcggaggttgcagtgaaccgagatcgcgccactgcactccagcctgggtgacagagcaagactcagtctccaaaaataaaaataaaaaataagtctcaaaattgcctattacacatttgctactggtttcagggtattttaagccttttcaactaaatgtgttgttggaaatacagtaataccttgtataacagaatgtaagcagtgaacaatttattcaaatatttcgtgatatcttaaacccattaagcttccattcatgtaataaatttctcccaaatattgggcttttcctataactgcttataaaaatgtttcactattagtgtgtattgaagaaccgcctgtttacaattacagagggtttaggtgcgcagaatgttttaaagtcacatgggacatttcttccttgtccttgcaggagatctaacattctggctccctgagttattaagagaaccagagggacccctggcatttccgaaatgccccgttggagtggcattgctgttgccaaggacctctgcttgaattcattcaaaagcacaaaatgattctatttgccgcagtattgtcagtatcagacggagtaggcacggggtgtctttggttattagcaaagcaacagtccagccatgggcagtgtgagcatccgtcctcagtttacttaagaaaagaatcacaatacaaaagacmtttaaattccctgcaaattaagatcaaaaagggaatttaaaataggactgtcattcagtacttgaaaggaaactttaatgaatagattaagcaaaataaagcagacttggatttttctgaaggtatggccatctagaacgatggtcacgatgagctctttctcgagagtatgaaatccagcaaactgctttttaccttttaaatccatcacaggtccctcatcgggcattcaccgtggcctttagtcatggctgcggggcttttctacctggagctggagagccacagtgatgggggacccctctgccgcctttgtgcccagagttcaaatagcagatctggggtagggatgatggttgaagttccactcggcccagaactcctccatccacttgaggcctcagagcccctaatcccatcacggttgctaagcctcagcaggatagagaggatgcgggatggtaaacaaagacgtmaactcagctttaccaagggaactgcccccagcattgggagacacagatgtgaagaaagaggtgggagcaggtggctttatgtggatgtacaaccacgtctaaaaaaggaacatagtttgttcaagctcttctcaggttgccttgtggaatgccttctttgctctttatgataatatttttctgcattttaatttcagttctgtattaacttcgccccttgaygcagtacagaatttcaggtaagcttttaatattgcacttctgtctgaataaacgasagtgactgtattaccctgcccatttcgaagcttcctgaaaacaatgggatcttgaataaaaggaamaatacgtgcattcttagaatagaaagtggaaaatatctcctcgttgaactgtatcatagttataatgtctaatggggaaaataaaattagttttattattttaataagacattacagtcatgtaattttatgtaagactttcgcatgcaacaaaggaaatctcgcaaatcaaagaaaaaagttattttgtaaaatattttaaaataaccgacttgaaatcagccaggcacggtggctcacgcctgtaatcccagcattttgggaggccgaggcgggcggatcacgaggtcaggagatggagaccatcctggctaacacggtgaaaccccgtctctactaaacaaaatacaaaaaattagctgggcatggtggcgggcgcctgtagtcccagctactcaggaggctgaggcgggagaatggcgtgaacccgggaggcrgagcttgcagtgagccaagattgtgccactgcactccagcctgggtgacagaatgagactgtgtctcaaaaagtaataaaataactgacttgaaatccaaaatactaaatgtttgacccttgctttactataaacagcagaataaattctaaataaattgaagagtcggaaataaaaattaaactatataaaatctagaaaaagtaaaattcaatagttttcaagcctctaaaactgagataactttccaggcttacaaataataaatagaaccacaacgaaaagatggacagatttgagaggaagggagagaaaatcaaagcacacagaaaaggaccgggctcggtgactcccgcctgtaatcccagcactttgggaggccaaggcaggaagattacttgaggcctggagttctagaccagcctgggcaacatagcgaaatcctgttttggcaaaaaattgtaaaaattagccaggtatggtggtatgcacctgtagtcccagctactcgggaagctaaggtgggcttgaggccgggaatttgaggctgcattgagctgtgatggtgtccttgyaccccagcctggttgtcacagcaagactctgtctcagaaaaaaaaggccaggcacgttggctcatgcctgtaattccagcactttgggaggccaaggcaggtggatcacctgagatcaggagttcaagaccagcctggccaacatggcaaaaccccgtctctactaaaaatacaaaaattagctggggtggtggtgggcacctgtaatcctagccacttgggaggctgaggcaggagaattgcttgaacctgggaagcggaggttgcagtgagccaagatcggccactgcactccagcctgggcgacagagtgagactctgtctcaaaaaataaaataaaataaaaaaaagattcattagcaactgtagttgtcaataataaataaattaactgattatacatttactcaaataatacaactgttaaaatgcagtaaatatggaaaacatttaagattttcatttactaggtgaaactatatatgtactataggtacaactaggtatttatatatagtaaaaatwtgtacragatttatacttaggatataatgaatgagtgatgattacagctttagtacttaaaagtaaagcacctagcatctttttttaaccttttattgatgtgtatgtcagtatgcacagaagagtacctgatcataaaaggacagctcagtgcattttcaccagagaacacacccatttaactaccacccagaccaagaagtagagcattaccactaccccagaagccctccaaccccaccgctgctgaccccctctcccccgacctgaccacctccctaggggcagattttaaatggcactgaaatataccaaagtgtcaaccgaagccacrtttggctggttaggactgcaagtgatgtttgctttctatttttttcagtttttcaatccctcttctccatgataacggattacactgtattttactctaacttccatttatgacttataaattaactcctgcatttagtcacatgaaatgcctctttttgagccaggtgtggtggctcacgcctgtaatcccaacactttgggaggctgaggcaggtggatcacctgaggtcaggagttcgagaccagcctgaccaacatgtttgtgaaaccccatctctactaaaaatacaaaaattagctggacgtggtggcgggcacctgtaatcccagctactcgggaggctgaggcaggagaattgctagaacccgggaggcagaggttgcagtgagcctagatcgcaccactgcactccagcctgggggacagagcaagactccatctcaaaaaaaaaaaaagaaaagaaaaagaaattcttctttttgaagtggatctttgctatttgaatttaggaataggatcggctcctttgttcctttggtattaaaataggaaacacacattctagctgggaagctgtcctcgtacctgtttcttacagatgccttctgttgcgaggcagcccccttggtttctgagtgcacatgctgtgtgtgatggcttttcttccttggaagcaaaggtggaaagcaaacgctgtgctctgccttcctctccctctggcactagcccatgtgctgctgtccctcctctgcctggaggggcctggcctgcgcccgtctcgagtcagctgtgctgctggctccggctcccgcagattagagtgagctgtacaagcgataactgattgagaagcccagatacagtctcccatttccaccacagagactggaaacaccccctgcacataatggggatgttagaccttggtgacacctgctcctaaaggggactgttctyggtgtcaccactttgagaaaccaaaagaaaggtcaactcctaacccaacgagcggggctcacaaaaccttcccccagtccatattctcttcctgctctatttacaatcaaccagagggctcatggagctggacagaaatatgtttgagtcatcatcgtaacaaatggttattttgcttagtacttgagatgtaggatatgtaatgtcatctgtttcaatagcagttcacgaaatgagtcagtgaagcacagggtgtcttcccactgaggactcttggttcctggtcataggcgttgagtcacaaagcccgtatcagggctcccaagaccagccccaggtggactcaggactccgcaatctgctctctcaccgctgtgattacagcgaaaagacataaggcagaatcagcaaagggaagggtgtgtgagttgacgtttggaggaagccggcaccagcttccaagagtcctctcccggtagagtcacacgggatgggcttaattcctccagcagtgagtggtgacaacacttgtaacatgctgcctaccagggaagctcattaaagtctcggtgtccaggcttgtattaggggctgttcaggtctcccgcctctgcccagcacgtgcctaaattccagacttccagcaggaaagcgggtattcagcgtaaacctccttatttagrcagtgtaggcagtgtgagccgctcttatcaaggaatggcaggaaccctccccaaatcccagctccctggtgccagccaccacctttgcaggcaggtctttccaaggatggcagcctcaggcctttcctgcacggaaccttaggctggaagggacgtagccatgctccagtccatcttcacagcttacaagcgaggaaactgagacccagaaagatggcatggcttacccaagattctgaaactcccccgcggtccagccaggatggggcccaggggttctgttccacccacggccagggcttttggcggttgtgcttcgcagagggccgtgatggccacacaggtcaagctcattgttttttaatatcccaagaacagttagtgaaacttattagacactttgattaaaggactgagcttttggccgggcatggtggctcgtgcctgtaatcccagcactttgggaggccaaggcgggtggatcacctgaggtcaggagttccagaccaacctggtcaacatggtgaaaccctgtctctactaaaaaatacaaaaattagccaagtatggtggcgcacacctgtagtcccagctactcgggaggctgaggcaagagaatcacttgaacctggaagcggaggttgcagtgagccaaggtcgcgccattgcactccagccagggcaacagagcaagaaagaaaaaagaagaattgagttttggccaggcgtggtggctcatccctgtaatcccagcacttggggaggctaaggcaggcagattggttgagctcaggagttcaagaccagcctgggcaagatggcgagaccctgtctctaaaagaaaaagaattgagctttccagtgtgatggagctgtctaaactgtggatccgccagtcgcatatataagtatatagtgaccaagcccattattgcatcaaatcaactggcctactctgtgcgcgggaggaatgcatcagggtacagcatttacatgaacagaacagtcacggtgttgtaaaaaagaaaaagactagaatgcagttcaacaaatgttaatagtgattgcctctggatggcaggacgatggacaaatcttttttgtctatttttttctacattttctatgatgagtatgtagtatttttaaatgggaaaaaatgtattccagcacactggggaggcagaagcagaacagtttgaacccaggagtttgagaccagcctgggcaacatagtaagacctcatctctacaaaaagttcaaaaaattagccaggtgtggtggtgtgtgcctgtagtcccagctaatctggaggctgaggcgggaggatcgctttagcctgggaggtcaaagctgcagtgagctaggatcgcaccactgcagtccagcttggatgacagagacagaccctgtctcttcttaaaaaaaaaaaaaaatacatatatatatatatatatatatatatatatatatatatatttcaaacaaactttaagaaattgtgctactcagccaggtgtggtggctcacacctgtaatcccagcactttgggaggtcgaggcgggcagatcactttaggtcaggagtttgagaccagcccagccaacatggtgaaaccccgtttctaccaaaaaaaaaatacaaaaattagctgggcctggtggcgcacactactcaggaggctgggccgcaagaatcrttgagcccaggaggtggaggttgcagtgagctgagatcacaccactgcatgccagcccgggctagagagtgagactctgtctcaaaaaagaaaaaagaaaaagaaaaaaagaaattgtgctactcaccactcatctgcagccccctgaccatggctgtctccatcagtgccactgaagtggagacagccccgctgaaagcaggctcagttatcaaagggagcagagrctgggcgcggtggctcacgcctgtgatcccagcactttgggaggccgaggcgggtggatcacgaggtcacgagtttgagaccaacctgtctctagtaaaagtacaaaaataatctgggcatggtggcgtgcacctgtagtccgagctacacagaaggctgaagcaggagaattgcttgaacccaggaggcggagtttgtggtgaggcgagatcacgccactgcactttaacctgggcaacaaagcgagactccttctcaaaaaaaagaaaaaaaaaagcagaaactggttcagccttgtttagaagggcaatttggaaatttctaaggaaattctaaatgtgcaatatttaaaatgactcagcacttccatacgcacaaagataggggtaggggaatattccctgtgacactgtttgtggtaagaaaagacagactcgggcccagttccatcagggggaatctggctaaattacagaatttccgagtgctggaacactgcacagccatgagaaaataatggcactggttcagatgttagcattgtcctgagtgatttcggcaaaaagaactaacccagaatcaggggagatggcgtcttgtcaaacttttttatacaggtagagagtatagaactcataaaagctatttgtaaaatgataagtttattggattagaaatctaagaaccaaggccaggcgcggtggctcacacctgtaatcccagcactttgggaggctgaggtgggcggatcacctgaggtcgggagtttgagacaagcctgaccaacatggagaaaccccgtctctactaaaaatacaaaattagctgggtgtggtggcacatgtctgtgaacccagctactggggaggctgaggcaggagaatcacttgaacccgggaggcggaggttgtagtgagccaagatctcaccagcaacaagagcaaaactccgtctcaaaaaaaaagaaatctaagaaccaaatatatcagagaatgttaaatttcttgggtatgatgatgatattgtagttacatagggaaatatccttattcttaggagatacatgctgaaatatttagagctgaagtgccatgtcagcaacttactttcaaaaagttcattcagcaaaaagccgggtgcagtggctcacacctgtaatcccagcactttaaggcaagctgatcactttgagrtcaggagtttgagaccagcctggccaacatgatgaaaccctgtctctactaaaaatacaaaaattagccaggcatggtggcacacacctatagtcccagctattcaggaggctgaggcaggaggatcacttgaactcaggaagcagagggtgcagtgagccaagatcgcaccactgcactctagcctgggcaacagagcaagactcaatcttaaaaaaaaaaaaaaaaaaagatgttaggccaagcacagttcaagcctgtaatcccagcactttggaaggccaaggtgggaggatggcttgaagttacgagtttaagaccagccttggcaaccagcaagaccctgtctcttcaaaaaaaawwttttttaattagctaggtgtggtggtacatgcgtgtaatcccagctacttaggaggctgggcaggaggatcgtttgagcccaggagtttaaggctgcagtgagccatgattgtgccattgcactccagcctggacaacaaccatgtctctaaaaaaacaaaggagagagagaawagaaaagatttttgaaagaagctaaagacttctaaaaaaaaagaaaaagaaaaagaaaagaaaaacgattaccaagcacttactaaagatgttagttacagggctgggcacagcagctcacgcctgtaattccagcactttgggaggccaaggcaggaaaattgcttgagcccaggagtgcaagaccagcctgggcaacacagtgagaccccacctctatttaacaaaatgaaatcaatcagtttcaaaagttagtctttatccctccataccttcagccagcccaaaccaggaatgggcagcttgacagcttcaggttgttgaaggcctggactcaacaaagctttgcgtagctagcggggctgttctgagcttggaagcgccgagcagtaacctctccctttcccgtgtctttgctctccagttccgagaggaacccgtgcaatagytcggtgccgcgtgacctccggcggcccgccagcctcatcggccaggaggtggttctcgtcttctttctcctgctcttgttggtctggttcctgaatcgcgaatttgaagtcagctaccgcctccactaccacggagacgtggaagcggatcttcaccgcaccaagatccagagcatgcgggaccaggcagactggctgctgaggaacatcatcccctaccacgtggctgagcagctgaaggtgtcccagacctactccaagaaccaygacagcggaggggtgatcttcgccagcatcgtcaacttcagcgagttctacgaggagaactacgagggcggcaaggagtgctaccgggtcctcaacgagctcatcggggactttgacgagctcctaagcaagccggactacagcagcatcgagaagatcaagaccatcggagccacgtacatggcggcgtcagggctgaacaccgcgcaggcccaggacggcagccacccgcaggagcacctgcagatcctgttcgagttcgccaaggagatgatgcgcgtggtggacgacttcaacarcaacatgctgtggttcaacttcaagctccgcgtcggcttcaaccatgggcccctcacggccggggtcatcggcaccaccaagctgctgtacgacatctggggagacaccgtcaacatcgccagcaggatggacaccaccggcgtggagtgccgcatccaggtgagcgaagagagctaccgygtcttgagcaagatgggctatgacttcgactacagagggaccgtgaatgtcaaggggaaaggccagatgaagacctacctgtacccaaagtgcacggatcacagggtcatcccacagcaccagctgtccatctccccagacatccgygtccaggtggatggcagcatcggacggtctcccacagacgagattgccaacctggtgccttctgtccagtatgtggacaagacatctctgggttctgacagcagcacgcaggccaaggatgcccacctgtcccccaagagaccgtggaaggagcccgtcaaagccgaagaaaggggtcgatttggcaaagccatagagaaagacgactgtgacgaaacaggaatagaagaagccaacgaactcaccaagctcaacgtttcaaagagtgtgtgaggcggcgcccacccgctgcccgaggtgctctgtttgtcgaaacacartaatatttgtatttggctgttgtgctttccaagcgccacagttgccctccccggacgtggtgttatgtggtcatttcagccctaacttctgtgtggatcacagttattcagggttcattttcatccattcttccctttcgctcccttccctggaaaccccgctgcctctgggtcatccgttcagcacgtggtggagaacaagtgccttcagggctggcctcggcctcgagtctcgggacagaggccgccagtggagatcatggctttgggtattatttgacttttagaacaaaagctgtggttaagatctcatttttattgctttttcccacgtcccacgagacactattttcggttctctggctaataccctgtttttgagtttattttgtttctgtctatgtcacagtgtyccyctacgacccgacctctctatgtaagcacacatgcgcacacacacttgcattcatgaatctgatataaagtgccagtaatccgccaagagggggtgcgaagggggcatgtcacgacagctccgccaccccccattgcccacccgcactttcccgagcaccgcgccccgtgggctgtgggtgagccgcgctccctgcactgagcgggtttaggggctcgcccacatgcatgcaggccaagacagcaaatgccagccgggcacgacgccygtgtgcccaggcctcgggggtctcagagccgcctctcacccccgaccctccacccaggggtctycccrtcgggagtggaggygttggtcctggaagctgactcatcggagagggaaataccaaataaacatccgaggttgcatttatttatttatttatttacccggaagcatgtgcgctcccgggaggggtgctgggtcctcagggtggggggtcatagccacaggggagggcagttcccaggaaggtaaccagatgtctcttttgtgttttggccacctggggccgcccccaacctccccaccccaagaggggtctgagtgggacctcaaagcatggccagtgcaattctgaggctaggggaataggagaagcccaccagctgcccctgccacccacgggggctcctccctgccggggtccagctcagaaccacgggggtctgtgccggcagcaccggtgccatcttggcttccacaaattccagaagtttcttggctgcctcccgctctcagatggcacagggcctatcagtggcaggatttaatctggggagcaaattccagctctgaaatggagttctcacaccgtatctagggacagaggcatctggatgcaaacgcggggtttgttaggggcggaatcccgagggtggtgtgggggagctccgtccgggcagttggctgctggtcctgtctgattatgttttgccatattgagtctgaagtttgtgtggaagtgagctcgcccgagttgtccggtcsgagttgtagccastctttcaggggaccccgggacgcygatgaggcccagggtgcactccttgtcagtcttgcccgwtgtccctgtgcattttgctttccgctgtcaaatctcactgtctcgttttcacaccgcatcagtcyccatcatcactactcctccccaragacatacagattgccctccccggcatgaagaagtcacaattctgacccgccacctctccaggggcggtgcctgggatggccacccatcaggacagccagagccrgggtcccggcgtcctgagagtccagggcacctccccccattagctgtaaggtttcctgtcaggtgtgactgtcagtttgctggtcttccaataccgaagaaagggtggttgtgacaatacctcttgcttctaaagaatgtattataaaacaccgcagatttttttttttccttaaaaaacactacctgatgctttccttgttcgtggggattgtggtcacatgaagctctttctgcatcagtattaaggtgtatatttgaatgtcctcccctcccctttcccctccaggctgtgtagctttgaggggctgggcgtttgctcacgaccttgctgtctcgctcagaacatgctccgcaaagttctccgcacacacttcttccccatcaagcccatttccttccccaaccacaaaggtgtttgtgattcctcaccccgggaaaccaaggagctgcaaagkggagtctggttcagccccgtgcagactcacccagagcttaacgttgtctttcaaacaccctgagccttcctaaacagccagtgcagacrttctctctgggccacgaagcccctcgggtcctccccgtcccctgctccgatgcatacctcagtgcagaaccacagaatctctgcagcggaaacgccgtgcatctcttgtctgttggcagcgagcacatcgtgctggagacacgagtttctaagcagctggcacgagggctgctgacggcatgggtcgtgcttcagggtggcaatacctcttaggaacttagggcaggaagcaatacttcagcattgaatgtgtgtaaatagttgctttgagttgcaattgctattttcttctcagtcccagctcagatcgaattatatatccatatatatatatatatatatatatggtaaacaagcacacacaattttatccaatgcaaacaaatgtagagcatcagttacaaaaccctcgaatagcttgagagccccacaggctctgccacacccgtgacttcatccacactgacgtcacccgcgggggctccccctgcacatttgcacacgatccggagagccgaaggccgcgtgcttcctgtcacatgggctgtaatcatttgtagtttccaaagacacgtctgcatttgaatttctagattttcgaggtaaggagttttttttaattggttgtttggaaaatcacatcatgcctagaatctgaaattgaattagcaagaaccgactgtttgcattttccatatatccttttatctgctctttttaaattgttaattctaataatttcaaaatgcattcactgaagaaatggacattaaaatattctaaaatttaaatatatgatgcctggtgttttcttattgaaaagatgagcactgcttcagagaggagggcggtcttccttggacagctcgtgttttctgcgatctgtggctcacctgggtgggtttgcctttctttcacgtcatgacttcagaaacagggcaagtagaaaaccctgtttgtgtttatgttatttttttaattggatctatttgctccagttaacttgagttgaaaagtatttatttttacacagaattttttaaacaataaaagtaaggttgcaggacaagttttgcttgtgagattttccctgtcaggcctcctaaatagttttctgcaacatccttagagaaggaattgagggggaaaaagtaggttttctgaaaaggaaagagtgattgcaggtacacagatcactggggtcccaggtgttttgaggaagtcacaaagccccttcagaatctgtttaaagtcatagagcctcttcccagaaaaacacacatgccattttctacacttcttgggagttcaccacactcccgcatctgaggccaaactatggatcttccaggggttagagccccttcccctgtaggggttttcctgatgagttattttttttttaatttttatttatttagacagagtctcactctgtcacccaggctggagtgccgtggtgcgatctcagctcactgcaacctctgcctcctgggttcaatcaattctcgtgcctcagcctccctagcagctgggattacaggcatataccaccacacccgggtaattttcatatttttagtagagacagggtttcaccatgttggccagactggtctcgaactcctggcctcaagtgatccgtgcgcctcagcctcccgaagtgctgggattacaggcatgagccactgtgcccggcctggtaagttaagtatttatgaccaacttcagggcacaaagattcttttgtagactccacaaagggagctgaattcatggcttctggtggttgctcatggacttgcgggggtgcagcctccagctgattctctgctggagcccggggccaatgaggttgctgtttgatgaggtcactctcctcccgagtcgccactgcaggcctccctggtcacctttccagcttagggaataacccgtccttgctgccttgagggtcttgtaagaatggaggttttgttcggtttttttttttttggagacagggtctcattttgtcacccaggctggagtgcagtgaccatcagggctcactgcagccttgacctgccctgactcaggtgatcctcccacctcagcctcctgagtagctgggactacaggtgcgcaacaccatgcccagctaatttttgtatttttttgcagagacggggtcttgccatgttggccaggctgttctcgaactcctgggttcaagtgatccgtcctcctcagcctcccaaagtgctgggattacaggcatgagccaccgcgcccagccagaacgtgggtctttctactagaaagggcacccagtgacttagaggatttctcaaacagccaagaaaggcagcctctaatttttgcaatcagccccagaactgatcatttgtggtttctctttcatctgaaatcttgttcacatggttgcttttccccactgtgggaatctatggctgtggccacctggaatagatcccgcgtactgggaaagtgaaactaaccggagaaagccaagaggaagcgattaagaaaaagtacacacttgcacgcaatggacatgtacatttaaaatcttcccaagtgtctatttttatacagttcctttttaaaaattgtttttttaaatatcatgactctaaagagttgttaatgaatattagagtaatttaagcttagggaattctcgtatccctgctggccctgaaagtctgaaggagatgtgagttaagtaatccgcgtgcctgttagagtctcagtcaacagcggggattcttcattgttttttttccggggtggggacaggtttggctcgcaaaggctttgatagtttgatgaaggttatggttactttgtccagaaaaaatgcacataaaaacaacttttgattttttgttgttgttgtttcgttgcttggtttttttgagacagagtctggctctctcgcccaggctggagtgcagtggtgcgatctcagctcactgcaacctccgcctcccaggttcaagtgattcttctgcctcagttacctgagtagctgggattacaggtgctcgtgccaccatgcctggctaacttttgtatttttagtagagacagagtttcaccacgttggccaggctggtctcaaactccagacctcaggtgatccacttgcctcagcctccctaagtgctgggattacagaagtgagccaccgtgcccggccaaatcttttgattttatatataatttcaggagtccacgaatgcaaatagagtgcccctgatccacggtaaccagaggagagatgacttttcattccaactctctgcagatgaggtttcctagcgtttctggactctccgctggaaacctgatttggcatgttaatgctactcattgttacatgcgcttttattttatttatttattttttttgagacagagtctcactctgttgcccaggctagagtgcagtggcacgatctcagctcaccacaacctccacctcctgggttcaaacaattctcctgcctcagcctcctgagtagctgggattacaggcatgcgccaccacgcctagctaaattttggatttttaatagagatagggtttcaccatgttggccaggctggtctcgaactcctgacttcaggtgatccacctgccttggcctcacagagtgctaggattacagccatgagccactgtgcccagcgttgatacatgcatttttaatcaaaattatattttagaatttaatgtgtgagttatctaaatatatttgaagagctgcttaaaaaacgtttcagtacacaaatatgttagttgaattatttccaacagataagtaacatccagccagtatttgtcaagcgactactgtgtgccatataatgccctaaactccctttacttaggttttttaatttacctaggttgttaaattttctgcaatacatgagagcatttgagaaacagctgtgattagaagctgtgcttgtcccagtggctttaccactgtgaattccacttataaactgaagggactttccagatatgaggaatcaagtacggacattttttttttttttttttttgagataagagtctcactctgtcatccaagctggaatgcagtggctcaatcacagctcactgcaacctcaacctccctggcctcaagccatcctcctgtctctgcctcctaagtagcaaggactacaagtgcgtgccactacgccctgctggtttttgtattttttgtggagatggggtttcaccatgttgctcaggctggtctcaaattcctgggctcaagtgatccatccacctcagcctcccaaagtgctgggattacagatgtgagccaccgtgcctggccaacatttttaaatagggctgttaacgtcaaccctaacgcatgcaagatgatttttttgtccatggctttatggagagttcaacctctgaataaaaagcaaccgaggcagggcatggtggctcccgcctgtggtcccagcactttgggaggccgaggcgggaggatcacctgaggtcaggagtcaagactagcctggccaacatggtgaaaccctgtctctactaaaaatacaaaaatcaaatcagccaggcgtagtggtgggtgcctgtggtctcagctacttggaggctaaggcacgagaatcgcttgaacccaggaggcagaggttgcagtgagccaggattgcaccactgcactccagcctgggcgacagagcaagattctctcaaaaaaaaaaaaaaaaaagtaaccgacgagaaagattcagagaaaacaactgcaccacttctgtgttggttccttgatgaaggagctcatggcagctgctgcccataagatcatctttttttgtttttctttttttttttttttttttttgagacggagtttcactcttgttgcccaggctggaagtgcaatggcgcgatctcggctcactgcaacctccacctcccaggttcaagtgattcttctgcctcagcctccccagtagttgggattacaggtgcacaccaccacacccggctaattttttgtatttttagtagagatggagtttcaccatggctgggctggtcttgaactcctgatctcaggtgatctgcccgcctcaggctaccagagtgctggggttacaggcgtgagctaccgtgcccggcccatccattttatttttaaaattcctccctcggcagtgtttggggtcctggcgggagggtcccagagccaggcagaacaaacactggcttgggttggctggtgagagtctttcagggtagtgtatcctcccgcagagcccccgctgctctttgagggaagagccgatggttggggacccagacgtctctgccaatcccccccagccctggcacagtggaggcagccctagcccggcctccagctgccctcccgagagctgctgtttctgtgtcctgtctccctctgaccttctttattttctcatcaaacaaaatccgtgccctctaggatgagagggagatgaacgggaccagaaaagtttgtttggatttgtgcgtgtgatcctgggataacgcaaaacaggatcgggaaggatgtgaaagggttcagggagagaggagcgaaatgcccgcgccccgccctgacaccccgctctgctcaggacgcccgggggcacagacatgcttgtgccaagacgcacctgaaccgccccctagccctgccctcccaggacccccatcccgtattctccacggctttctagccttctctatctcctccagaactggcctgtgggaaccctcgggtctcagctcagcccagctccagctttggttctgcgtctctaggacatttattcttctccaaggacacacctgccttcctcaagccccaggatgccacggttctgcactccgcctgtggcctccacccccattccgccatcaccctccccctccctgactctaggactgtagataaaccttcagcaacaagatcaccaggcactgctttgacttcaagagaatgacttttccgccagtaaattctgttttcacatacgcaaatatgcctctacctggaagatagtctgctgttatgctatgcttttctgccaacgagctgaaaacccctggagcctcctctggcctcaggatgccccattgaagtgttggcagaaggcttttctgtttatcaggttagaaagcccaggttctaactgggcatcattggccacagtgtttttgctggtaacagccagaaacagagcgcggtattacagccaaacggtttcttttccttcctcctccttttcaaggaaagaacgaagaacccagatggagggggagggtgtaagtttaatgtcaggcttagacagtagttcagaaagtgaccacgaggaaaaatgtattttcccccttctccctccgtcgctcttttcataagattcattgcttaaattatgtgtggaatatttattatctagtgtatgcttagaatggagaaatgtttaattgctcaaataagcctgatctctgaaaatcctcaactcggtgtctacagagtaaccaaattatccaaatggtcataggggagaggcaaggtttgctgcacatttgtgcctccatagaaaagacagattgctggccgggcacggtggctcacgcctgtagtctcagcactttgggaggccaaggcgggcggatcacttgaggtcagc

SEQ ID NO: 93602 - DNA, 64025 bp, Homo sapiens
  misc_feature (1)...(64025): n = A,T,C or G
tggcagacatctggtgctgctcttcttgtcagaagtcagatcgtctcctcttctctaatattctgaacgcatataccatactcatcctacatttccattccttcttttcctatcgctgtccccgtgtaagccatcatttaaaattattatccagcagagtcgtggaaccaccttatactagttaatgagaacaaattgttaggtttcaggaattatgtgagatgatcattaatcacaaccattacaaaaaatatataaagtaacaaattatttatatttaaaatataagtaataaatttctcaaacttattacttccttatcactttatcacattttactattttctgcgctcttaaaattacttatatatattgtatctttaggtaaaaacaccaaccatataatgaagtggtagtgcatatcttttgtgtcccatggcatcatgctggtaacttgaaagtgaacatggtgggaatatttacaccatggaaatctgcaaatgctacaaattagcactttattgatttgttgatcattaatgcagattaaaagttaaagtgtgttgcatctgtagttgttacattctaaaaagcacccaatatttgagaaataatcttccagtatttgcaaactattaccatattcagcaagaagtcgtttatgtcattgatgaatcagtgaaattctaacttatatcttcattgtttcactttgtccaactcattaatgtatattgaaatgttgaccaacattcttactggacctacacacattcattgatgacatgaataatttctttgctgaatcatatagtaaacaagcatttattcatcttctgaacaaattgcaactgtgaattagctatggaaacacgagtttggcaaaaattaaacaaaaacacttttgtaaaaatcaattgactatatgggatttgcagtaaagagtactgtatattttataatatatattaaaaatgtgaaacatcattttaacagttaaattcgtaatactttgttgtatacatttttttccaagagaactggttattaacatttaccagcataccaccgattatgactctcaggatgtcacaagttaatttttccattttctcacccttgcttttcttatttagaaagaactgtgatcttccataaatacagcaaaaaaggtagtaaaaggtagaaaatagtacataaattgcattatgaatcagtgcctggactgcagagggatggctactgttttggtttattgcaactcgctgagtctctgagacagaaagcagacagggaggtccaaagcctctttctgattagtttcaggctggcagatttgctcggatatagaaactgcacaaaatgtttatctcaatccaaacccatcaatcttgcagttcccaacaggttgcagttgtaataggttcacccattctgttttattattatgagtttttattattctcagtgccttaatttcatatacaatgggaaaagagaatatgtaatttagtattattatgcaggtgacttttaaaattggaattcagaatccgtgattttgatctagtggagataggagaaattttttaaaagttatataaagttctcctggatagatgactagcttacttctatctctagctgaagtgataaaattaaagtaagtccctataccatttattttctttatagtctacttaattacctggaccagatttcttctttttttaagcattgtgtctttattttattaaactttaaaaatatttttcaacttttattttagaaatgaggggtacatgtgcagatttattgcatgagaatattgcatgatgctgaggtttggggtacaaatcccatcactcaggtaatgagcatagtacttggtaagtagtttttcaacccacgtctccctcgttgtctcccacttatagtaatctgcaggtctattgttccaatatttatgtccatgtgtgctcagtgtttagcttccacttacaaggaacaacatgcagtatttggttttctgttcccacattaattcatttaagactataacctctaattgcatccatgttgctgcaaaggatatgatttcattctttttaatggctgcgtagtattccatggtgtatatgtttatatacacattttctttatccagtgtaccattgatgagcacctggattgattccatgtctttgctattgtgaatagctcagtgatgaacatatgaatgcattgtctttttggtagagtaatttactttcctttgggtgtatatccaataagattgctgggtcaaattgtagctctctccattttaaattctttgagaaatcaccagacagatttcttggattcaaaaattaagaattttgtttatcttcattaaagagtacataaatgtgtcaagaatatctgctatttccaaatgcactagcttgctatctaattttaaagtgtttatgcaaaaatggtgatgctaggtgccagagaggatttcaagaggaagagagcaaagcgaaaacaattctacaatccagttcttattttctgggtcttcatatatatttagaagtcatgagaacacacaaatgaaacaattaggcactaataaacttgtgccccaaggaaagcaaattgagcactatacatagtgctgtgtgagggtaagaaaaggcaggtcaatataagagagtacctttaatgaatgttgaaagataaagtcaaatatatttaaggagcaaaacaaactattaggtcccttcagaagtaacatctctcataggctttttggcagttatagcttacactctcctataataaaatatacattgtcttgtaaccaacatttgcagagaatttgcccttaaagtcaattctgggcagacccaagtcaaaggctcttcaggtttatgttttaaagcctcaacattcaaagtttttgcaattagtagtaatgatgtaaaaaaacaaaaaaacaaaaaaaactaattacaccttccttccatgtattggccactggtaaatgtttgttctaatttgagaatacattgaaacttcttgcatcaaagtgttatatgaagaatttgcctgaaatatttgcatgagcatttcaccatgtgaactattgtgttgaatcaaagaagaatcaaaagtcagtttactaacagtctgactctggtgaaatagcaattataggaaatacataaaacttctttgaaaatagcagatggttttagacccttgaggaatcgccacactgtcttccacaatggttgaaataattacactcccatcaaccgtgtaaaagcgttcctatttctccacatcctctccagcatctgttgtttcctgactttttttaatgatcgccattctaactagtgtgagatggtatctcattgtggtttcgatttgcatttctctaatgaccagtgatgaaaaacttttgttcatatgtttgttggcctcacaaatatcttcttttgagaagtgtctgttcatatcctttgcccacttttggatggggctgtttgtttttttcttgtaaatttgtttaagttccttgtagattctggatattagccctttgtcagatagatggattgcaagaattttcccccattctctaggttgcctgtttactctgatgatagtttctttggctgtgcagaggctctttaattagatcccatttgtcaattttggcttttgttaccatttgacccagcaatcccagtactgggtatatatccaaaggattataaatcattctattataaagacacatgcacatgtatgtttattggagcactattcacaatagcaaagacttggaaccaacccaaatgcccatcaacgatagattggataaagaaaatgtggcacatatataccatggaatactatgtagccataaaaaacgacgagttcatgttttttgcagggacatggatgaagctggaaaccatcattctcagcaaactaacacaagaacagaaaaccaaacaccgcatgttctcactcataagtggaagttgaacaatgagaacacgtggacatagggagggaaacatcacacactggggcctgtcagggggtggggggctaggggagggatagcattaggggaaatacctaatgtagatgacaggttgatgggtgcagcaaaccaccatggtatgtgtatatctatgtaacaaacctgcactttctgcacatgtatcacagaacttaaagtataataaaaaaaaaaaaaggaaagaaaattgcagatggtgaagtgaaggagtactacatgtcctgtcttgataggatatgatcctggtcaaaaatccttctgtaggtagccgtgctcatctattaggtccactccagggatgaggatccctacaaaaaggttcattgtgtccctctctactctacagttgctttctgtatctcagcctgtggattaatcagaaactattgtgaaaaattatttccagatgctgcaagtgggagggaggaaggaaagtaaagagaaaaagaacgaaagagaaagaaagaaaaagaagaggaagaagaagaagaggaagaagaagaggaagaagaagaagaagaagaagaagaagaagaagaaggagacggaggagacggaggagacggaggagacggaggaggaggaggagaaggaggggaagaggaaggagaagaggaaggagaagaggaaggagaaggagaagaagaagaagacgaaggagacgaaggacacggaggagacggaggagacagaggagacagaggaggaggaggagaaggaggggaagaggaaggagaagaggaaggagaagaggaaggagaagtggaaggagaagaggaaggagaaggaggaggaggagaagaagaggaagaggaagaggaagaagaagaaagaagaagaagaaagaagaagaagaaggagaaagaagaaggagaaggagaaggagatggaggagacggaggaggaggagaaggaggggaagaggaaggagaagaggaaggagaaggagaaggagaagaagaagaagaagaaggagatgaaggagatggaggagacggaggagacggaggaggaggaggagaaggaggggaaggggaaggagaagaggaaggagaagtggaaggagaagaggaaggagaagaggaaggagaaggagaaggaggaggagaagaagaggaagaggaagaagaagaagaaagaaggagaagaagaagaagaggaagaagaagaagaaagaagaggaagaagaagaaagaagaggaagaggaagaggaagaagaggaagaggaagaagaagaggaagaagaagaagaggaagaggaggaagaagaggaggaggaggaggaggaagaggaggaagaggaggaggaggaggaagagggagaggaagaagaggaagaggaagaggaagaagaagagaaagaagaagaagaaaaagaagaaggaagaagaagaaagaagaagaagaaaagaagaagaaaagaagaagaagaagaaaagaagaagaaaagaagaaggaagacgaagaagaagaggaagaggaagagagaagaaagaagaagaagaagaagaagaagagaagaagaagaagaagaagaagaagaagaagaagaagaagaagaaggaagaagaagaagaagaagaagaagaagaagaagaagaacaagaagaagaagaagaagaagaagaagaagaagaagaagaagaagaagaagaagaagaagaagaagaacaagaagaacaagaagaaccaaaccagggtagatgaagacaaagttaaaaagaaagaaaaggctggtgctggcagagagccttctgctccgatttgaggtgtatgcattttatgctgtaaagcgtggccagtcacaggaggattcaaaggcgaggagagatatgatcaaatctgcacttgggaaagcgcaccttggtgcgcatctggggatagaggaacgtagggatgggaggatgggggatgggagtttggggatgaggcagctgaagaacagagtcttgtgatggtggaaccaggacttcgttgttccttcattgtgtgggcagaagaggtggaggattttaggcgccacctggtcttgtccccactgcccaggtatagctgctgtctggagcaggrgcctcgagacgccgctcaagtctcacgggcagatgggttggacaaaacattgccccccttcttcttcccagacaggcagggaatccctcttcttccttttgctgaatcagctggagaagaaagcccagcaggakgcctgctagcctcagcctcgggccctaccagggtcctaggtactggaatggaacttcgccgaggtcaccgctcaaacggccacaaygagggagccgatttagatcctctgggcctgttccttccttttctttaaacgtyccagtctagcttagaggaggacctgttttgtgtaaggcttgccggagcaaccagcacctttcctggaatacagtcttgtttgtggcttttcctttgttgtacgctagcgtgcactatcgcccgcacgctgactgacccctgttctacaccgcccctgataccactgaatagggagtttgrgaagtttatgtcgtgccccagaaaacactagtggccttgttctcaagattaaatatccttagagcagccagatctgaagagggaccccagaaagatccacgggcatgttcatwtgtttgcaattgataatataggaaacactttctaatatttcaggaaaacaaaacctttaaaaaaaccagacgacgtgtaactcctaacattcttaccttgcttcaggactgttgggaggataagatagtgtggcagctataagcatttagcatagagcctagcatacaatagtccttccatgacattagcttctctctccccagcaaagatgacactgcataatccaatgtacagtggggaaatttttcactagtacattaagatgttatttgcagttagaaagaatgaatactgtaatcccagcactctgggaggctgaggtgggaggatcaygggtcaggaggttgagaccatcctggttaacacggtgaaattctgtatctactaaaaatacaaaaaaaattagcccgccgtggtggcgggtgcctgtagtcacaggtactctggaggctgaggcaggagaatcgcttgaacccaggagacggaggttgcagtgagcccagattgtgccactgcactccagtctggcaacagagtgagactatgtctcaaaaaaaaaaacaaaaamaaaagaacaatgaataagacctagtatttgctagcacaaacaggtgactgcagtcaaaaaatctaaattgtacattttaaaataactaaaagagtataattggattgtttgtaacacaaaggataaatgcttgaggtgatggataccccatttaccctgatgtgattattatgcatggcatgcctgtatcaaaatatctcagatttaaatacacaaatatttaagtacataaatacagagatacataaatatatacacctactatgtacccacaaaaattaaaaattgttttaaaagatgttatttgcatgcataaagaaaatgttatttaaatttcctacttaaaaattyttctttttcctatgatagtagataaatggcaagcaaaaaacgagaagtccagttacaggtgggtctgacatatcaacaattctttatctggtgcactagtgcttgaataccttttacagtgccttccactttgcagacagtcatcaataatcaaagcctgtgggatgagatgttgcagaacaaaggcttaacaggtataaggactccccggctgtctggccacctggggtttgacccrgagctcctcctggcaccctgtccctctagagtccccactttgaccaagaaatcctgcagtgcctttgccctggccatggctccagattgggataactgctatcctagattggtagactttgttatttcataaatatcatcatcttctagtgattgatgtttaccaagcctggtgtggaccttgcanagcaatgcaacctttattcagaaaattgaaaaatgaactgaacgaagaygaaattctgcattttgctgtcgtaagaattttgttttcattaaaccactgttttcacattatattaagtttttaagtatcctctaatactttaagtattgtcttaatttaaacaacctgtcagttcttcaaaatagatagtctttacttggcagttttactatatatttaattctactagatctgagaatgaatatgatttttatccsattcttataacgtcgaggctatttaccatgactgtgaaagtcagaaaagtgtaatartggacacrtctattgttctgtttccyttcacctgaccacatgttcagtgtgtgtcctttagaataagggctacaaaagctgtttactgggtatcattgagtagtgccctggcattaacccagttaccatattttccagtggcaatgatttttcctcatttatttgctacctacttgcaataagggattaaaatattatagccaaacacattttactgaattgtactgttttttcaatctattcacataaaatgatcaactaattagaatttcgttgtccaacayggtagctactaggcataagtgactatggagctcttgcaatgtagctggtccaactgaggagctcaatttttaattttaatgaatttaaatctggattttcaaactgatactccattgagttattgtaaaacttttaaaatctgggataacttgagtatgtgaatctactacttaactgtaaatgttattaaagctaattaaggattaattatttctgattacatttarcatatgaattaagacgtactcttaagtgtaagagacacattagattttaaaaatttaatatggaaaaagaaagtgaaatatgccatcaataattttatacattgattacatgttgaaatgataatattttggatgtatcgggttaagtaaaatttattatcacattattttcacctttttttgtttttaaatgtccctactggagaatttatatgtgtggcttatataatatatttatattatatagaaaagctcccaaaccaactagacttaagatacaggagcagataacagatgataacagatctttactccttatctctgaaatacatagttcctaatgcagacatgcaaccacaacccactcatgttctcccagttacaggtctttcatggcccctttcaacccaaacattggaatgggtttgcctactgaccttgtatttcactatccatccccttctttaaatgcattttccataggacttattttccttagttcaagatgatgaataagcagtttaaagcctagacactcacctcttattatttttctattcaagasagtaagtggctgtctacagtagttaaatcctgttgtcctggtgaaggaattgactttttttttttgtcttctgaaataaggactttgtaaggttttcattcctttaattttttaaaaaatgtctttatatagatkttatttttagagcagttttaggctcatagcaaaatttaccaggaagtaaagagttctcatatatcccctatccccacactctcatagccttttccaccatcaaaatcccacatcagagtggtacattgttacaacggattagcctacactggcacatcattatttaccaaaagccgtagtttacattaaagttcattctcggtgttgtacattttagggagtttaacaaatgtgtaatgacatgtacttactatattatggcatcatatagtatagtttcattcccagcaaaatcctctgtaatctgttcatctctccctacctcataacctctggcaaccaccaatcttttgactacctccatagttttcccttttccagaatgtcatatagttagaatcacatagtgtggagccttttcagattggcttcttttacttagtgatatgygccatgtcttttaatgatttgatagctcatttctttttagtgtcaaataatacttcattatctggatataccagggtttatttatccattcacctgctgaagaacatcttggttgcttccaacttttagcagttaggaaaaggctgctataagcatccatgcttaggtttttgtatgaacatactacactttcaactcatttgggtaaataccaaggagtaagattgctggatcatgtggtaatgatatgttttattttgtaagaaaccaccaaatcttcctaagcagctgtaccattttgcattcttaccaacaatgaatgagagtttctgttggtccacattctcaccagcatctgttctctggattttggtcatcctaataagtgtgtagtggaatcactttgtagttttagtttgcgtttcccaagattatgtgaggtggagcatctttatatatacttatttgccatctgtatatcttctttgaggaggtgtctgctaaggattttggcttatttttttaattgggttgtttgttctcttattgttgagtttcaagtattctgtgtattttraataacagtcttttatcaggtattacttttgcaaatagtttatcccagtctgtggctgsttttttcattctcttgtcattgtagtttttttaaagacragattctgtaacaacctgtttcactctggagaatcacaaccaccagaaaggagctaggaaattattctagacttgattcttcacagagaagaaaaatcaagttagaagaccagagaatagagcctaaaggagattgccacatgcagttggaaaggggttgatagaagttaaaatacagtatcacaagtgtctaacagctgacagatggatcacagggaattgaggatcaggaaattcttgtgaatcctggcagttggcattaggaaagtggcagtagacgttcacatagactaggggttccrgattctggtgacctgcccataaaggtgaaagaaaattatatctccaaacctccattgtgagcagcaatggagggatgccctctgccggacatattgttttctgctgttaatcaaggaagaacttgaacatgtaggtccaaaattaaaatgtatgaggttatttcctattaaaattgccctgagctgaatggtcagtatacaatttttttctgctgtgtgcctttttaaaagaggaacattaaatattttatatatatakakagaggcatataaaaatttagttaatagtgtttattatagttactgttatattattattaaattatttaatccttaataatttatgtattataatataaacattataattataatacmtgaattacttctaaatagagttgacccttaccaatgctggagttaggggtgctaaccccccacgtagtaaaaaattcatatatgacttttgactccaccaaaacttaactactaataacctactgttgactggaaaccttatgggtaacataaacagtcgattgatacatattctgtatgttatgtgtattatatactatattcttgcaataaagtaagctagaggaaagaaaatagtattaagaaaattataaggaaaacaaaatatatttactatgcattaagtggaagkggattaccataaaattcttcatcctcatcatcttaacattgagtaggttgaggaggagamgaaggaagaggagttggtattgacgtctcaggggtggcagaagcagaagaggtggaggaagtggaaggggaggcaggagaagcaggcatagtggatgtaattttatggaaatacgtggtaatttctgtctgacgtttttgctttttcattgctctaaaaatgtttctatgtggtaccaatccttcttccaccatttgctttggtttcagtgcccatatcatagaagggtccatgtcataaatgaagtcaaaagcagtcttgaataactggaattcttctgccagatgttctaatgtcagtttgttttctggcactggctcttctacatcttctccctcatcgtctggcactgctttagaggcactcatctctaycaatttgtcttctgttaattcctctggtgtggtgtctctcagctcttggatttctccaacatccatatcttgaaacctttcaccccccacctttttgccacatacacaatctcttttatgacttccttaattggctctgtcataaatcccatgaagtcatgcacaacatctggacacaattttctccagcaggaatttattaatttgtgcttgatagcttttgcagctttttctataacaatgatggcatcttcaatggtgcaattctcccagactttaatgatgttctatcagggttctcttccatagcactgacattttttccatagagtaccacgtgtaatgagccttccaggtccttatgagcccctgatctagaggctgaattatagatgttgtgtttggagacaagtagatcattttgagacctttgatgtcgacctcatgggattctcagtgaccaggggcattttccaatatcaaagaactttaaaaacagtctctcactggcaaggtacttcctgacaccagggacaaagcactgatggaaccaatccagaataaaaggttctcattgtccaggatttcttgtacaactgaaagactggcagctggtgttatcttttcctttcaaggattgggggttagcagttttattgagaaagatagccctgatcataaacccaactgcaatgcataaaatggttgagttagcctatctcttcttccttaagtcttggtgctcacttctcttctttactaaataacgaactttgyggcattcccctccccccaccaaatcccaagtttagggcactttcatctgcattaaaracctgttcaggtagacatcttttctccttaattattttcttaaaggcatctggaaacttttctgctgtctcttggtcagcagcagctgcttctcctgatatgttaatattttttaaccttttcaaaaattatcaaaccatcctttgcaggcattaaattctccagctttagatccctcgcttacttttgctttaagttgtcatatgataactttgcttttttgggaatcatattagagtctataggcatgcctttcttatagtaatcctgcacctgcataaaagctgcattttcagtgtgagataaaaaggtatttcagaaaaagtgcaagatctatatgcctgctggcacagctgcagcaatggctcaatgaacttcctttaaaaaaaaaaacccaattactcttagactggattcttttatcttgaaatggtgggcaacttcagctgcagacctcaatctagggtacctatcaggcaagtcagctctttcttgtaatgtcatgatttttctcagctttttagcagcacttgcaacatccctagtagcactttatctggatctcaaggtgttagtcaaggtttatggtattgcactgaacacaatgaaaattccactttgaaaagcattgccttagattacaaaaaccaactgttataaactgaatgtttgccatcaaatttcataygttaaaatcctaatctccaatgtggtgatatttggagatggagactttagaaggtaattagagtaaaatcaaagcttttatttaaataaaggaagagacatatgatttcttccaggtgaggacattagtggagaagagggccttcacttctggcacccagactgtgctggcaccctaatctgagacttccagcctccagaactatgagaaataaatgattgttgttcagccacccagtcaatagcaatttgctattgcagcccaaactgactaagacaccaactcttacagaagaccctamcaaacgatctcattctggcagctggaccaatggatactatgttaatatggaagaagacactattattgaatgtatagttgttcataattaatttggaacaacttgaaatttrtgagaaaatattaagaaaattacagacataaaattcaaaatctttaaaagttgactactaatttattcaaggaatgtttagtaaacctcttttaatgtatggccctatgactgacagagggagatgagatacaaacgtggataggaaacatactatctctgtgcacacaactctccttctaacasagcaggtgtaacaggcccacacgtgcctgtagtagaatattgaaagggacataggtgccttgggagaggggcagtaacgtgctgtgcagaacgagagatgatttacagcaaaaggaagtgagacagaattggaggaaggatagttgaacagggacmgtaaaagaagggcaggaccagggaggaaaagatgagtaaataagtttggctaaaggttggttaatgtaaagggaaacggtgcggaaaggttaaggccaaatgacgtagggcttgaatcgccagtatgtgcagtttgatccctaaaaccactaaggcataccgaatgttgcagtaaacctaaaaattatatatatctctgcattgtttcaacatagtgtatcaaattacttgaatatagttttatttattattatatgaaatgtttactttttccaggcagaagctgacaacattgtractttgcagccatttagagataaatgtgaacctgtttttctctttagtgttgtaagtatatttactttctcaattgcattatcagattccagtttgcagttaagaacaagtaacattgtaaaattaccatgaaattgtttgccaatgacagtaattacacaatgtttgccttatcttttcttgactatttataaattttataatttggctgctagsagcttattatggattgaagggattagatgatgacacactggattcatcagggaaaggaaaagtaagatggygtttatctttacyamggaaatgatcrgagatttgcacaataaattttttacaggagtaaaaccttggaaatttcatagatacctagcaagagagaactggttataaacattcatgcatatccatacaagaaagcatctgtatgatcagtcttttgtaatacacattactcttatctctatatttataaagaagaaagcaagtggatccaccaaaatgttatagcagttttctatgtgtgaggaacaggtgactaatttaagttttattattcatactattctatattttccacatattctgtgaggaacacacaactttaataatcagacagaggccaggcatagtggctaacgcctgtaatctcagcactttgggaggctgaggtgggaggattgcttgaggccaggaattcaagatcaacctggccaacatagggagaccacatctccattttcaaaaataagtaataataaaataaatataaaatataaatgaataattagaaagacataaatagtgctattttctaaaagcagagtgtacagttagtgctaaattgtgtgacacagggtatagctgctacagagttcgagaactgagacagaagaaagaaagccttcacggaggagatagacaggacttggactgttcctccactgtggatatttatttttgatattagaaatactcattaaaaacacatcttggatataacttttttctgctattaaacaatattcttgcaaccctttcaaagagttgaatygctgggttaatgattaaaaaatgcattgaatggtaaaaaatgcattgtagatctcctctaagttggatgtttagaattcaacgatttaggtgaggggtcagctaacgttgtttttgttgttgttgttgttttgttttgttttttgtaaagggccagggagtgaataatttcagcatgattaaaatacagtctctggactgggttgaggtttgctgactcctaaactagatgtcattacactcatgaggggaccagaatgaataacaacacagaggcagaatgggcttggggggctcatggaacaatgaggaggctttagctgcacgtartgggtaggtgcatgggaatgagagaaaagattgggcaggtgggtcacattgtagaggctggagctctgggatagtcgataatatagtttggatatttgtttcctccaaatctcatgcagaaatgtgacctccagtgttggaggtggggcctagtgggaggtgtttgggtcattggggcggatgcctcataaatggcttggtgccctccctacagtaatgagtgagttctccctctattagttcatgcaggagctagttacttaaagagcttggcactgtctcacctttctctcactccttctctctccacatgacatgctgtctccctttcccttcctccatgagaacaagcttcctgaggcctcaccagaagcagatgctggtgccatgtttgtacagtctgcaaaagtttgagccaaataaatttttctttacgaagttcccagcttcrtgtactccttgataacaacacaaaacagactaatcgggccatcaccccgaccgctagtccagtctgaccagtagacccagccccactctccttaagtgtaccatccaatccatgttctctaatgcctgcaatcagtgcccagagtttaagtccacccttcctcatagccatgtttcatccatccttctaatgcttattctttgtcacacccagttctccaactcttcccctatctcccaaacctttccactctatgacatctggaattaaaatgacttcctaagatttttgaccatggctctgagcttttgtctcgcttccttggcttaccttagttctaccttcttcctttggacactctctccacagcccagaagtgataactgtttatttcagaatgtgaagtatagttggtgtttgctttacttcttagttcttcaataactttcttttctttgctattactagaggtctgtttcacgtggctaaatctccaattcccccatctcactcctgtcatttaccgaccttcagatcaggtctattgatgactgaagtctttggcgtgtggtttaaagtcttactctcaatcctgagtcctgccatcaccttgaggactttagtatccacactgacaacccgcccaatatcctggcctttcaattcttgacctcctggctgctaataaacttttcttccaataaacttcatcgaatcactcctgcaatcatgtctcagactgcccattgctccacatccataatcattaatttaagaatagaattctgtgatcacaaaaacaccatcaagtccaatgctcattttattcagatattccctcaatgtccctttgtacgggtcagcatttttagctgacaacagattcattccagctagtctcagcagaagccttcctcaagagatattagataattcacagaattgttgaaagatactttttagttggaaatggtaactagagtttcaggtttcatttaaaccttactcaactgtatctttctcattggcttttgaatatgattaagtcttttcaatttaaaaaatatataatacttctttctgatagcatatccctctctagccaccatccatttcttgtcttcacctcacagctaagttggtcagaagactttttatatttaattttacttcttttcttttcatcccattaactcctcaatccattctacctgagctctgattattccaccaaaattgctgttgctaatgtatccaagtaccagcctgtactaagtataatggatattgttaggtattcatcatttgtacctcttaaatggtttgaatatggtgaccatgccctcctttttaaaatatttgcttcttttggcttatgtgacttggttttcctttcaccttcctggatgccacttccctctgttcctttggcaaattcacccttctttattccacgattaaatattgactttatcaggctgtacgctctccttagaaaatttcctctacacacagtttcartcaccaccatctgtatatcaataaatcacgtttacatcttcagctgaatgctatgctttccactcgcagcatttccagttggggtctaggcatctcctattggctttctcaaaatgcatctcacagcaaactcattcaataccagatcttcctccccacaaaacacagtccccttctattgtctctgaatttggcatataatatgataacttataatttatccagttttcaagtgagaaacagaagagtcaccttgtgacatctctttacatcacattctatccaagtcataccttggacctgtaaattttactgcccaggtctctgtcacactcatctacctctttccatcctttccatctccaccaccgtcatctctccacctccacctctagcatagctcctaacttgtctgcgaatattttcttttgctccccccagcattttttccacacagtaggtgaaataatttttacaaacaattttaatcatggtcatggcctctgcttaaacattctgactgcacttaggatgaagactgaatccctggcccaccaggctgcgcacagtttggcttctcctggttgctgggcttcaactcacaccaggctccccctcactttgtcacctggccttgtcacttgccatcttcccttccagctttagaacccttatgtctgttattccttttgctctttcttctcctttttgcccaattagctcttacccgtctttcatattttaaaccaagaatcacttcctgacattgagaagtacctttcgtgatctctttgaccaaaacccattcttataggagctccaagggctttgcaccactcttggtagcacctactaaggttgctgtttcacatgtttgtgtttttatgtagggctttttaaaaaaaacctaattaggtcaggtaccagatccattatkttataccattgtgcctggtacggcaccagtaaacagatgcttagtaaacaggtgttaaaagatgagtgagtgaaaggggcatggtgtcaaaaataactagggaggatgtcattgggaggcctatccagaattgttcaactttaaagcaaggatgcctcaggagagattgcatcaggtgagagctcctgcagggggatgacttgctgcaaggtgctggaggacatgcaaattggaggtagaactcaaagagctgagtttatcaagtcaagaacattcacagtattaagaccttactgtaaaacgttaattaccatagctaaaagaggattcatgaggatgagagtagggtagaagggagggatgacttagtccagtttaagtgttagttcttgrtgtgttctccaaatgaaagttyccctcctgttttyatttccctyatagaatggcaaaattatcgaaaagattcagggtgcaaatgcaccgcttgttaataaaaaagttattaatttgatcgatgaggagagaaaaattgcagcaggtgaaatggctcgacctcaggtaatactttggattaacaacagtttgaagacaagcttatcatttagagtgaaatagaacaaaatgcactactggtgctaggtacctctaaaggctttgagtactttatgtcttttaattttaaaaaagtacattaccttttatttgatgttatcctaagttgtttaacctaattttgtaactatccaggtgtgtaaatggtgcaacttttctgggaagcattttggcaatgcatgtgtatatatatttatatacataaaaatgaaacctttcggatagttcacaraatcacagaagcatattcatggcttccctgaaagttaggaacctttgtccttctggtactttgctctttttttttgtttttaaattgactttataagtgtaagtatatagcaattatttatttgaaatttgtaagarcataaaagctatttggatgaattaaaaaatctggtactttgctctttaataggatattgattattggtttgagaaatatttttttttttagttaaggaaatatcgttttgttccaaatttgctgagagtaatggttaagaacagatcttcacacttatcaaatgcccttttgatatttaacatgattatcatgtgtttgcagttttcttatttattaatttctgctttgttcttattttatctcccatgctcttattaaattttaaggtttggctgggtgcggtagctcacgcctgtaatcccagcacttcgggaggccarggagggcagatcacttgaggtcaggagatggagaccagcctggccaacatggtgaaacaccgtctctactaaaaatacaaaaattagccgggcatggtggcaggtgcctgtaatcccagctattcgggagactgaggcaggagaatcgcttgaacccaggaggcagagattgcagtgagccaaaatagcaccactgcactccagcctgggtgacagagcaagactcctactcaaaaaaaatttwaaaaaaatttaaaaaattaaggtttgctacccttttcatactgcacatatgcattattcctgccccttccattttaaaacatccctkattttatttaagtggaaagctggagacagtaatgttagataagttcaggaactcttccactttactttctatttcttagactataaatatttactagatacaaaatttctaaaaacccactcactatcatattaaaacataactgtgttatctttgcattgcatttctttttcatagtatcctgaaattccattagtagactcagattcagaagttagtgaagaatcaccatgtgaaagtgttcgtaagtaaatttacttcaaagtaatccaagggttttctgtacgtgggcggtcatcacagcatcacttgtttcagcaaaacactggtaacaaatccatgtttattaaggaggaattattcagataaatgatgatttgggccttgcaagactcagctattaaaaagcaccttcttttcctcactcgccttacctttggttctgggcctggagcctttcagaggttaccctgtacaatggattcctgtctcctgtgacttatctggacagcagcttcctatttcatccttcatcatcttccaaatatttgtgatgataatttcttccttgatgacccatactcttggtttactttgcagttaacaatttcacgccttcactagattatctgcattggggtagtggggtgtatgtgttcatactctggagggagcagaggcaaacagccataaccaaatgagttatcttgcactaaaagctcattataagaatgtcgatacattcacagatgaatctgtcggtgatgtttacttgcatgattcacagttaaaacttcacttactggtagtactgtgctggatggatcctgtgtgtgattcttacgcatgggaattgcattcaaaccaccagggcctacctactcaatttttgtttcctctggattaaaaactcttgtaaatgtttcccctgcatgcaaatataggaactgccatttgattctaagtaggaaccctctgrtagttgaaatgccgtagtaagatacacagctatcaatgggcaacaaytaactgwtcattagaaatttacattgctaattgccagatccttcattatccagacttygtgccaagaaaatgaaattctgtctttttctaaatttttttccagaggaattatacagtattgctattatcaaaccggatgctgtgattagtaaaaaagttctagaaattaaaagaaaagtaagtaatattttccaactatgattaaattaattgcaaaataacaacctcttaatcgtcagttcaaagacaagcntaccatttagagtgaaatagaacaaaatgcactactggtgctaggtacctctagaggctttgagtactttatgtctttacaaggctcgatctattcatgcatccttctgtaaatgatcctactctaccagcatcctatgtaaattttaaaaaattatagttcttatamtagattgtatattagtctgtcttcatgctgctgataaagatgtatctgagactgggcaatttacaaaagagagaggtttattggacttacagttccacatggctggrgaggcatcacaatcatggcagaaggcaaggaggagcaagtcacatcttacgtggatggcagcaggcaaagagaacttgtgcaagaaatcttccatttttaaagccatcagatctcatgagactcattcactatcatgagaacagtgcaggaaagactagcccccataattcaatcacctcccactggattcctcccacaacacatgggaattgtgggagtttaaaattcaaggtgagatttcgatagggacagagccaaaccatatcattctgctcctggcccctaccaaatgtcatgttctcacatttcaaaaacgaatcatggtttctcaatagtcccccaaagtcttaactcatttcagcattaactcaaaagttcacagttcagcatctcatctgagacaaggcaagtcccttctgcctatgagccagttagatcaaaagcaagttagttacttcctagatacaataggggtgcaggtattgggtaaatacagccattccaagtgggagaaattggccaaaatgaaggggctacaggccccaagcaagtctgaaatccagcagagcagtcaaatcttaaagtttgtatatttttgagccacttcaaaccaagtgtcctatagattttgctgaggttcttatagaaaatgtattgaaagctggtggtttgttaagcccaaaaaacaaacttaacttgttttacatgtgatcccacgacacctggatttgaccttactctctaattgaagattaccaaagctggatttattatagaagcagagcataagacagtgctcactgaagaacaagttgtcaacttctatagtcgaatagcagaccaggtatgaaagttaaaaagaaaaaatcctctatgtgtttaaatacagtggcctccataagctttaaatctttattacagaaaagcaaattagtaagtctgaacaactaaaataagctcctggtgtccctgttggtgtccatatcatggagatgccaatgatagtggctctgaaaaaaatcttcggtagaaatagtggctaccragcaaaactggatggtctgattgtgttttgttgacatgaagacctctttatgtcaggccctccaagagcccctgcatcagtcctctggaagtgaatatccagtcattttctattgatttttattctgggttgaaggctctgtcaccagcttcacaagaatgctttaatcttttctttacctaagggcctttctctcaggctgccccsaccccaactgccccactcctgccacctccctaccccaccaactcttttttgtctggggatataatataataaaggcagtgctgtgtattagaaagtgtactggcttgggagtcaggagacctcacttctagaaatgaactgtccaatatggtagctactagatacatgtgatcatttgaatttaaattcattaagattaaattacattaaaaatgtgaagtctcagttgcactagccacattttaagtgttcaaatccacatgtggctactgtgttggaaagggcagaagagcatgtacgtcatcacataccattctactggacatcactttgtggaactgactgcaccactcatgccatctctgttggycccggcttccatgtgtgtagaaagaaagggttatgccaactgtattcgcattaactgtaaacttctgagaaaatccaattcctgggccccacctcagacttactaaatcagaaactgtaggattgggctccagaaatatgtgttttaacaagccccgtagatgacttggaaacatcctaaatttgggaatattgttaggttacctttaagataaattcctactagctttgaacttctgccacttaaaaatgtaggagactagtgactgggaagggatagggagagatttgttaaagatgtgaaccaaaagtatctgagacaggttgcaatcaatttagaaagtttattttgccaaggttaaggacacgcccatgacacagcctcaggaggccctgatgacatgtttccaaggtggtcggggcacagcttgattttatacattttagggagacatgagacatcaatcaatatgtgtaataygtacattggttcttcctggagaggtgggacaacttgaagcagggttgcttccaggtcttaggtagataagagacaatcaatagcattcttctgagtctctgatgaggctttyactgaatacacgatttacatgtgagatgacatagaggaatagtcacttatgccttagtcttgcttagtgaatctgcgtttttacataaacaactgagcagaggaagccatcagatgtgcatttgtgtctggtgagcagckggatgacttttggctctgtctgtcctctgtcccctaccagtgaagataagctatcaattatcaatttacattgccagggtgaaatccaacagaactgttttagggtaaagatcttgaggcccacaaggaatttccttgtggacaaattatgagggaggtatgtagcttttttttttttaatctttgtagcaatcttatttaggaataaaatgagaggcacgtttgcctgatggagttcccagcttgacttttccctttggcttagtgattttggggtccaagagatttatttttctaaggatacaaatttaccctgctctggttattatacattttctttattgaaacatcactatgtcccccatgaatatatgcaattatttttcaataaaaagcaaaaataaaaacccccaaacaataaaaatgtattgttaacaggagatttataagagtaacattcctttgcccagggaccatggagagggaagatttcatttgacttgggtagtgaccaccattttagtccatccatttcaggagcctgaaggaaacagtttatcattttattttgtagygtgacttcgaagagtttgtctcttttatgacaagtggcttaagctatattctagttgtatctcaaggaagtaaacacaatcctccctctgaagaaaccgaaccacagactgacaccgaacctaacgaacgatctgaggatcaacctgaggtcgaagcccaggttacacctggaatgatgaagaacaaacaagacaggtatagctcaagaccaggaattgtgtyacttgcaatgtgttattgggtaatgaagcgtagtgtaggcacctcagtacctaagggcaaatgtttttatgttaaaggcataagtatttcttccagtcaacctaacatactgtatattcagaagagctgtgtgccaggtgaagtgtcagatacctggcattggaaaaagtagttggcttgtgggttgtagggtagtaagaatttacagatgacagtgtaggtttgaaagaaaagttttgttagatagaaagagcactgcagaagagtgcagcggggctcctcagtgagagaggactgagctcgccatggtggatttttgtttagggatatttatggaccttaaagctggagcttaagggtaatttggaccttattagccacacaggtcatgataaataattgcacttgtagacatgttggtgccttgatgtcagcaagggttgcacaatgagtttgaacatgcatgcattccggagatgtatagaaattctagttacttataactttttttttaagcctggtaccagatgccagctttaaataatagggaagtctagttacttctaaattcctcagataaggagttttgcctctggatagtcagcttggtggccctcaggtgatctttgctcccctcactgtgactgccctgaaagtttatgtcaagaacactagaaagggaggccttttccctgtttgtcttcctagagctgggcataccagtctggccacaagggctggggcttgaagggtgtattggaaccatgtataatccctgccaactcagtctcctctcccatctccccaccttccccttccaccttcccggtgccctaaaaacatgaaacatgcacttttactttagatggtttgtggttacaaattactgagaacaaaacggttgtatattttttgttgatggattttaaaatattagaaaatggatataaataatttgtagaatgttggttttatgcgctgctgtttgcgcctgttattcctctgaagactcagagaatggagagtgtaacaaagcagttgtcaggctgcaccggaaagaaagtcaggtgagcaagaacatacttagagtatctgagccttgaggcttcctgggatgtgtctccccgtgcttggcagcccatctccattgcattttctggctgagactatccagaatgtcccttgttggtccttcttgacttattaatgaatcatagtggcttttcttgggtgcctacctctgttggctccyagtgatgccatatttttaggaagtgggagatcctaatatcattaattccaagttgtaygcaggataaaggaactcataaggtaaatcctgctggcaaggagctttttaaacagtagcagttactttcagggttttaagggaaaataataatgagtgggctgagggaaggtttgttgggtagggtgtgttaagtttaaaaagataccagattttatcctagaaattttgagccattcaaaaaacaaaaagcgttctaygaagcactcattaatgtgacgagtgaagtcatcattccatggggctattgtttaggtagtaaacctccattacaaccaactttgagaagctccaattgtccaatactcgcatgacaccatggacaatttaggcatgttaattggcatgtcagaaggaaatgccagcagctctccctccagaacaagggcaagcactataggggccagatcagagtgaaatgaaatgtgtacaccttgctctggcacagtctacagtatttcctttctaaacttagagtccccatgtgcctttggcccatgtttatcccaagctggccacagcagacagcatgggacagtgtggagcatgcttgtttggtgtgctcgggctcagaaactgatactcaaaatatggcgctttgacatgctgaactgaaaaagcctcacaatctctctgacttgccccagcactcccggccagcagtctctctcaaagcacaggatgaagctgaatttcttttatctgcctaagatcctcagatccgacaggaacaattatttttcttcctctccctataagaccaagaatgtaaccacatctgaacggagatagtgtacaagttaatttctgtgcgttggtccattcattctccctcgtcatcctttactgtccttcaacagaattcttctccctgctcccattacctgttttgccagatggtctataacaggggtgtccaatcttttggcttccctggggcacactggaagaagaagaattgtcttgggccacacataaaatacactaacactaatgatagctgatgaacttaaaaaaaaaaaaaagaactcgcaaaaaatatatatcataatgtttttaaaagtttaccaatttgagccgggtgcggtggctcatgcttgtaatcccagcactttggagggccgagacaggcagatcatgaggtcaggagatcgagaccagcctgatcaacatggtgaaacccagtctcgactaaaaacacaaaaattagctgggtgtggtggtgcatgcctgtagttccagctacttgggagactgagacaggagaatcrcttgaacctgggaggtagagattgcagtgagtcaagatcgagccactgcactccagcctgggtgacagagtgagactccatctcaaaaaaaaaaaaaaaaaaagtttaccaatttgtgttgggccacattcaaagccttcctgggcctcatgcagccagtgggctgcaggttggacaagcttggtctataggcttctgaacctcattgcagggtgggtactcactctgtggttctctctgtgtacatgttaatcaaatttgtctgctttttctccaactaatatactttttgtctgttgatgcccgttggtttttcagtaaaacttgagaggacagaggggaagctttcccctgacttctataatgcttgttcttattttcacagctcttgctctggagggagggcctgataggcactgtcacttccatgtgrcatctttcaagtaggtccagaatctaaaggaataaggacaaaaaactctcatgcgtaatttattcagttgttcactttcactctttattgccccctctcccctatctcccagcctgctcactctcctctctgggtggtggggatggagagggtgagacaggagagaagttaaaagcagagcaattgaactgggagtgattggtgacccctctgcgtacagagcagcggagtcccagagctttattggctggttattcctgtggagacaaacactcacagcttatgaattcacatgctgtggggaaactctctccatgccatcgatggtctgcctgctccagtggctgcagaagggtgggggaagagccagggaaacagggcagaggtacccatgtttgtcattcacattccagcttctttcatgatggctttttattacattatttacatgtctgtctctttaatcagcctgttttaagaaatcaaaggatagtgtaatttatctttgctttccagtctttctacagatcaggaaggtgtggttccattagctacattgctcagagtcacacaggtagtaactggcagagtcttctcattcattcacttattctgttatgtgttgattcattcatstagtatttattaaagacctactatatgccaaatcctagagatacaaagatggggaagaattagatgatgacctctgagctcactttcagtttaagtctttatgacagagtgaaggtgacatttccarccacctctactatattgtattcctctgtccatagaaaatrtctattctcttctcagtagcctctctatttgtccctatacatgtcatagctatagggagcttaattttttcctttatgatattctcatttaaattaaacataatagatacaattcctaaaataatccttaaaagtatttccgggatcagggaagtctgaatgctataccctgactctactcccatctgcaaagctttctttcctctccatagtcaaagggaagcttaactgataagcagctggctgtcagtgaggtctggagctctgttcaggtccctagggcaggagaagatgagggtggtgtggtgttttctccaccgagagtttggggagctcctgaactccccagaaaacaaggacctgcagacaaccacagaccctgagaataacagacttgtggacttcactgagacttcctgactcctaaagggccaggatagaactgagtagaattattgaattccttgccctagctaggtctctgggggcttttcctgattgcccctgcagaagaataatgacccactgtcttctaaagcacaagcttgtagaggtcatcttgccttccaactacagggtttccaacacatatcaaaaatcagacctaagccccagtgagccatcaaggaaaaatgagtacctgcctaagggagactggcagccagagaaaggaaggcctgtacaaaaatcacaacacaagtctagtgaaaaagaactgcttagagacagaaaaacccttaaataaaataacaataaaaaaaggacttgagattcaattgctaggtatacatttaaaaagcctttcaaacttgaattatacaaattgtgatttgaattataagttcagtggrgaattggtatgatcatcatttgagactcaaattaatgacatggaaagtcagatgcaagaaatakctgaaagtacacacaaaaaattagacaggatgagagcaraagtctgcaatctggataatatgctgaggggatcaattgctaatgagaaactgcacagagaaagaacagatggacaaactaaacaaataatgggggaatttttttcccagaataaatgcatttgtctgccaattgcaagggcttacaatagtccaccctcaactgatgccaccacacccccaccccacacacaaatacaggaacatcctgggaagaaacactgcacactgtktccagacagacagagtaagcacttgtatacttcatatgtttgaaacccagagcagatcatcttaacagcctcttcctctgtatgatgaaattatttttaagtactagttactgaatgaggcaaacaattatgctagaataaraatacagacaatgaaaatagtcttttatgggccagatgccgtggcttgtgcctgtaatcccagcatttgargtcaggakctcaagaccagcctggccaacatggtgaaaccccgtctctactaaacatgcaaaaattggccaggcgtggtggcccatgcctatagtcccagctacttgggaggctgaggcaggagaattgcttgaacccaggaggcggagattgcagtgagccaaaattgcgccactgcactccagcctgggcgactgagtgagactctgtctcaaaaaaaaaaaaaaaaaagaaaagaaaatagtctttatrtacctttgaatatataaacatatgagtataaaataaaaataaatgttacagtgtcccaaaggaaacaagtgatagatgaattgtttaattaatatttttaacaataaaacacatgtatgtctgtatatattaatctgtcacagaaaatgaagtagtttttgctttttgaaagctttaatttttgaagatttgtccatgatgttctcaaaattgatctccactctatgtttaatagaaaaagataggtgaaattcccattttacagtacattgcagaaattgcaataatgccaatagctttgttgtttttggattgattctatgtagagcaccatgtacagcacactacttatgaaaggataagtaatgaatatgtgtgaactccaagagtacataggcgcattatcactaatgttgattaggagtgctggtacatggcgctgataaaaagcaaccagacttttaattggttttattactgatttaaaattgcacttgcactttagktggatcccttccaccaactgcatacttggcagcaattgagaataagtyacttacaagggaaaaatacttgactgccatagggctcattttaggrctactggaagaaaaagrctgcaacccctgcattcttacaaagctaagatatttacctggtagagcaaatgaagatcttcaaggacatacttagcaatatatcacctatatactccttctgtggaaaatawgtgaggatatactcaaccaaatcaaaaatatgggaggaaaaaaaagaaaaacagttcktaacagtgaaccttggaatctctgaacacacacacagacacatacagtccataattctgggttttataatataacagctgatgaaggactctagaaatagaagaaaattcttctagattctaaattatctcaacaaaacctagargtttstgggtgtatgtggcaaaatggttcaaagatcaagaaggcagtattttgacagttgtattttgaggttcttatttgcagaaagggcataaatggagtattaaagttgggagatagtgtgtcagaatgcaagaaatatttgggacatacgcatctgacaacaggggcaggaaaaagacartaaacattaatgcagtggataagtatagtaaaacttccacattaacaagggaaaaacatggaatgaagagcagtttgctcagaccagcaaaataaggggaaaaaagaagaaacctcaatttaaaataaatagtctagataaagtaagatgaaaaaaataaagtcaagaatatggctattaggctaactatgaaaaggttaattttcccgtcacatatagacattactaggtaaaggttaaaaaaacctaatttaaaaaccatcatattaatgatgtgcacaagaatcatcattgggtttaaaaatattgtgtgaaaaatatatacacagtttcatataatgtccttagagattacttattaattataaggggaaaattgtagcttttcagtagataaaatggggggatatcaactacattaatatcaccaataatgggaaaaactgacatcatacacctcctatgtgatggagcaagtaacggaccaagaaggacgcaggctcatgaagatagttttcctgccaaaggttcataaccagaatgtaataggaaastactgggccatccaatagtttgaaaccatccaaaatgaagggaagtctacaaacaactgtcctggactmttcaacatatcartatcatgaaagacaaaagaggttgagtcgctgttggagataaaagcaaattaaggagatgggacaactacatgcaatatataatcctggattaatataaaaattactacagataagatggtattagaaaattggtgaaaattgaatacggactgtttatgaggtaataattttgtattaatgtaatatttcctgaagtatttagaggtgawtggttaaaatatctgcagcttactctcaaatggatctgccaagacacacacacacacacacccacacagccccccatagcccccacacacattgggggatgaaagcaggagacagaacaaatatgggacagtgttaacagttggtgaacctagatgaagggtgtaaatgggagttctttgtcctagtcttgcaacttttctattaatttaatttttttcaaaataaaaaatttaaacaacttttctcatctatattctgtttagaaaaaaaaaagatgaaaataaagggatggccaaaaaatagccaggaaaaataaagtattaacactgatcattaaaattgctaaatttgataaagacacgatgtagaaggcaacatttatgacaatacggcacccaaaaaaagaaaaaattgtggccccaccaacataacggctaagtacctaaggagggaattactggaaaagtaaggagaactggaaaaaatacctgctagcagacaagaataagtaaggatgagaggaattaaaaatacatattccataaataatatataataaattgactgggcgcggtggctcacgcctataatcccagcactttgggaggccgagacgggctgatcacaaggtcaggagatcgagaccatcctgggcaacatggtgaaactccatctctacgaaaatacaaaaaaaatattagctgggctggkggtgtgcgcctgtagtcccagctactcgggaggctgaggcaggggaatagcttgaacttgggaggcagaggtagcagtgagccaagattgcaccactgcactccagtctggtgacagagcgagactccatctcaaaaaaamactatatatatatakatagatagatagatagatagatagatagataataaattatctataatatatgaaacataaacatatatacaaccttacacattacaaataattttttcttttacacaaagaatacctcaacaaatttttaatcaaaattttaccacatatatttttctgattataatccaataaaattggaaataaacaataaaaaggtaattggaaatgttcatttgaaaatatgaaatgcacttttagataacccttagttcaaagacaagattaaaaagaaaattaaaaactatctggaaagttctacatagggaaaagaaaaatttttccttaaaaacacaaaattttattttgatctttgtttattctctcataaagtcaaacatagataatatcatgtaagtaatttttgtagtgggctcaataaaaagttgaattaagtatcatattcttggatataatagggagatgcaatttatctttacwtgacatttaatttttgttttattaaacttctagtaatttctgaacatatcagatttaatttgttggcatggttataaacctcagtttataataatcttaaattatattttggattttgacagtttacaagaatatctggaaagrcaacatttagctcagctctgtgacattgaagaggatgcagctaatgttgctaagttcatggatgctttcttccccgattttaaaaaaatgaaaagcatgaaattagaaaagacattggcattacttcgaccaaatctctttcatgaaaggaaaggtagggaatcaagcataaattgtttaagtattttatatagatgagatttgaataaaccctagtataattgcatttaaagacattgttttaaaatttaacattgaagaaaacgcaccttaagaaattaatgtattaacttactaatatcttaatagtgaataaaacatatttgtagctgaagagtttacarggtattttctaatctgtgaatttgttagagtagattttaacattgcaggaattattacataataaagatttaaagcttctatgtctgaaatgccccaattcaaagcttggatctaccataactgatagtgtgacttgaacaagatattttaccaagtttatttcttcacgtgtaaaattcagaacattaaaatgagaaaacacaaataaagtacctggcacataaagagttagttctttttaatctcatcccatattcttatagcagagtgaatatggcagaacaagaacacragtcataaattaacactattcattctttttttatatctaatatatggaaacataattaccattaatatttatatattggccttttattctctgacttgtccaactacctaggagctttctaggagctttgacgtagtttccttggcatttctatgtagaccaggatttctcaacctcagaccggcttacattttgggccagatcattctttgtccagggtggaggattgactgtgttatgtgcattgtaaaatgtgtagcagcatccttggcctctactcactaaaagtcagtatcataccccccttcccctctgccccacctctcaaattgtgacaacgtcaaaaatgtctctggaggttgccaaatgcccyttgtagggcaaaatctctccggctgagaatcattgatatacacagtaatagggtttgcaaagtgagatacttgttcctcttcatttccatctgtatgccttttatttctttttctttcctcattgagctagctagcacrtcctgtatgacgctgaattggagtgatgagaggagacatctttgccttgtacctgatcttatagcaaaagcatttggtcttttaccactaagtatgttagctgtgtatgtcctttatcagattaagaaaattaccacctcttcctagtttggagagaatttttatcaggaaaggatgttgtgtttttctcaatttttttgtatctattgatgtgattrtgttttttccttcattttgataacatggtggattattttgattattgatgttgaaacagccttgcrttctccagaaaaatcccacttggctgtcatgtattatcctttttacacactgcaggwtttgatttgctaatattttgttgagaatttttgtgtctatattcaggaggsatatgtgttgatttcttttcttgtaatgtttttatctggttttggtgtcagagtaatgcaggttcataaagtgagatgagaagcagtcactcctattttatggacgagatagtgtagaatttgagttatatcttaaatgtttactggaatttgtgagtaaaatgatttwgacatggggttctcttttttggaagattttgttttatttttgtctttttgccattttcaatgtcttttaatatttaaaaaagacaatattttcaaatacatgttatttttaaataaatagactttacagaacagttttagatttacagaaaaatcaagccaaaatattaaaccattgtagacttcgagaaaaattaagaaaaatactacagagttcccatatacctgctccctcccaccttctcctatcaacatcatgtattactgtgatacacttttacagttaattaaccaatattgttaaaatatcattaactaaagtccatagtttacattaagtttcactctttattttgttcatcctatggattgtgacaaatgcataatgtcaggtattcccattacagtatcatacagaatagaattgccaccctaacaatcccctgtgttttacctactaatctctttctctctcctaacccctggcaaccactgatccttttgttatttgatatgttatgggatgtcttagagttgatatcatacartatatagccttttcattwtatatatatatatttgtttttatttatttttattttttgagatggagtcttgctctgtcacccaggctggagtgcaatggggygacctcagatccctgcaacctccgcctcccaggttcaagagattctcctgcctcagtctcccaagtagctgkgattacaggtgtgccaccatgcccggctaatttttgtatttttagtagagagggggtttccccatgttggccagggtagtctaaaactcctgacctcaagtgatccacctgcctcgcctcccaaagtgctggatttacaggtgtgagccaccacacccggccagtagatagccttttcagattgacttctttcatttagcaatgtgcattttgtgttcctccatgtcttctggtgacttgattgttcatttctttttatcactgaataatattccattgtatgtatgcaactaagtttatttgtgtagttacctatagaagggcatcttggttgcttccagttttcagccattatgaagaaaattgctgtaggtgttcatatgcaggtttttgtgtggatgtcagttttcattttaattgggtaaatatctaggagcatgagtacaggatcatgctgtaaaagtatgtatagtttgtaagaaastgccaaaatgtcttccaaagcacctgtaccactttccatttttgttagaaatgaatcagagttcctgttgctctacaaccttgccaggatttggtattgtcagtttttgggagtttagttacattaataggtaaataatattaccttagtgttgtccttgtttacaattccctaatgacatattatgcagagcttcttttcatatgcttactaatcatctctrtatcttctttgatgatgtgttgtctctttatactttttgcccatttcttaattgagttgttcattttcctcattgttgagtagaaaggttttttttttgtttattttgaatacaagtcttttatcatgtatgtggtttgcaaatattttctccaagtttttggttcttggtttcttaaaagtggctttcacagaaaagtctttatttttaatttagtccagcttattagttatttctttttggattgcggttttagtgttgtatctaaaaactcattgctaaccacaaggtcacctagattttcttctgtgttaytctctagaaagtttatagttttgtgttttacatataggtctatcatccattttgagttatttttatgaatagtataaggtctgtgtctagacttaytgttttgrgagggtatttctaattatttcagcaccatttgttgacaagactgtccttcctccattgtattgcctttgcaactttatcacaaaccaattgactatgtttgtgtgggtctttttctgggctctctgctctgttccattaatcaatgtggctaggtctrgtagtatcacttctctaactttgttcttctccttcaatactgtgttacatctttggccttttcatataaacttgagatcagtttgtcaatttccatatccacaaaataacttgctgggcttttggttgggattgtgtttaatctacagaccaagttgggaaaaactgacatcttcatattaagtcttgttatctatgaatatggaatatctctcyatttatttagatctttgatttttttcgccagagttttgtagttttcttcatttagattctttacatattttgatagatttttrcccatgtattttcttttttagtgctagtataaattgttttgctttaaatttcaaattccaattgctcatttctggtatatagaaaaaaattgacttttgtatattaattataacctgaacctttgctataatagtctcttatcagtgcccgaagttttgtgttgttgttattgacaatgatgatgatgattctttgggattttctacatagasagtcatgccctctgtgaagaacaacaatagtttcatttcctcattctgaatcagtataccttttatttccttttcttgtgttatttctttagctaagatttccagtatgaatttgaagaggagtagtgagagggagtagctttgcttttttttccgatcttagaggcaaagcatctagtttctytccattaaggacagtgttaactgtaggatttttgaagatgttctctagtaagttgagaaagtttccctttattcctcctctggtaataatttttatcatgaattggtattaaatttgtcatatgatttttctgcatctactaacataatcatatgacttttcttctttatcctattagtggcgattatgttaattgactttcaaatgttgatccaccctggcatacttggaataaatccagcttggtcatggtttgtaayttttttatacattgttaaatttgaatggttaatattttgttaagaatttctgctcctatgttcatgagagctattggtctttagttttctttccttgtaatatctttttgaatattatggtaagyctggcctcatggaatgagttagaaagtgttccctctgcttctatttgctgaaaaaaataaattgtttccagagaattggtgtcatttattccttaaacgttttgyagaattcactagcaaaataatctagtcctggtgctgtatttttcagaatgttattaagaattaattcaatttatctaatagatatagggctaatcatattacctagctctcattgtgtgagttttggtatttaatattcagtgtatttcaaggaatgggtcaatttatctgaattatcaaatttgtgagcacaaagttgtattgcagagaaaaagtctgctgtcagcttggtttttgttcctttgtagataattcagtttttgttgttggtgrttgtggcttgatttatttagatacttgcaaaatattttccctttatttttgctcaattgtttttcaagattgtatagatatctaagaatgaactgatctttacacatttatttaactattaagcaccttacttagaaatttgcctgtgattgatgagaagtaaggtatcaaggtgtgggccaggtgctgtggttcatgcctgtagtaccagcaccttgggaggccaggcagccgcattgcttgagcccaggagatcaagaccagcttgcacaacgtggtgaaacctcatctctactaaaaatagaaaacgtagccgggcgtggtggcccatgcctgtggtcccagctgctggggaggctgaggcaggagaatcacttgaacctggaaggtggaggttgcagtgagctgagatggtgctactgcaccccagcctgggcgacagagtgagaccctgtcaaaaaaaagaaaaaaagaaaagaaataaaggaaggaaggaaggagggagagagggagraagggaaagaaagaaagaaagaaagaaagaaagaaagaaagaaagaaagaargaaagaaagaaagaaagaarragaaaraaagaaagaaagagaaagaaagaaagaaaggtcaacaaggtgttcggggctttgaagtatgatttttttatgcatcaggttattccatgaaacttctatgcaattgctagacacctttatctagaaccaggaattctgtgtgtcttcatacctgtcaccaaatatggcatcagatagtgtcactggaatgcttgaaaggatgtttgaaaattctcatggacatagtgcaagcaaaataaaatatttattattatattcatcatggaatttagagtgaagcaaagaaactcaatgccgtcttgcaaataaggcatactcaccaatattttttcaatttatccrttggacggtgaggaccctctctacacctggtttataattcctttgtgatcacctaatgagagagtgcaaattagggaaggcaatctccaggattctcaaggattgacaatcgacctactctcccattaaatctactttctttagctttatgcagatttaccttccctgaatatttttcctgagcttttatcgtgagtcatttcaagaagctrttaacattatatggcaattgcttggggattggttgtcactttttaaactgtggtcatcaggtaccctcatttgagaaatctttttacaaaattagtaatttaaaaaaaacttcagtgtcttctaagaattwatatgattccactttttcaactttcaagagctatatatcctgtgttttcctttcttttctgtgaggtagttctgaagcaaattatttcttaaactgtattaacatgcatgatactttgttttattctttccttacaattgtttgcttagttctactttattcactytatttcctgttttttggcctcgataaggagcttaaggctgttcaagatcttagtcaatatttgtgcttttgacttatccttctttgtcacaagatgacytgcacagctccaaagatcatgtccctcaaacattcaaaagcaggaagcagaagatggtgtaggacagaggttctcccygagtgcctctctcagaagagtccccagtgtatttcctataaatatcattgaccatagctggatcacactgccacactttctgtaaggaaggatggaggtgtgagtattggattttctaggcttctgtagtgggaagtaggcaagagagaagaaggttgagaaatacyttcaggtattcaatcacyttgtttatccccaaatgggacaaatcaaatcatggttattgaacataaaawttatttgyaatgacttccataattgtgttggttgattatttaggttactgtctacacacacacacacacacacacacmcacacaatcactcacattcacatgcatacacccaagaaaaagatttaatgagatacctgtgtgtgtgtgttgtatatgtgtatgtgtgtgcatgcatgattcctatacgatgaaaaattggaaatagcatcataatgagatgttaagagatactattcaccttaaattaaaacctaagaaggtatttctgcaaactttcaaaatttcgtatgagaataaagtgcattgtatgccctcatgatagtatattatgtattgtrtacataaccagtaatctaccagtttaaaacttattatgtaactgtttttatttagatgatgttttgcrtattaytaaagatgaagacttcaaaatactggagcaaagacaagtagtattatcggaaaaagaagcacaagcactgtgcaaggaatatgaaaatgaagactattttaataaacttatagaaaacatgaccaggtagaatccaggttgagaaaattcagtctgatttatttttgaatcatgtaaactttctcttaagtctggtttctatttaagctgccaaactcctcaagtctgtaaacatgttctgagtttacttctctaccagtcctgctcccatcccaatcctctgctcacctgcctgtcttctctagtcttcctggaatgttactggaatagtaggaaggtctcagaggaagttactggagtcccattgagttgaacaccagaagtccagggtgtrcaatactatgaagtttaagcagagaactgactgactctcaagagcttttgtaatcttatagttaactagttctaggaaagaatgagttgctagaaatgtgctgggtttctttctagaagaatgactgaaatagcaattgaggctgaaatcctgcaagggcatataaaccagcaggaccatgggaacaatgaaagaaacatctacaagaatcatggcactccccttcccttcctttccctgcttctattcttttatagatatgctcttgaaaacatatcaacggaaaaaaatcacagacctctgttaaaagattattttacatgttacatgtttttgatctatttaacaatatgcatttrtattgcctatacataattagctactgagctacacttcttattacctcttctttgttttctkttctaatagtggtccatctctagcccttgttttattgagagacaatggcttgcaatactggaaacaattactgggaccaagaactgttgaagaagccattgaatattttccagagaggtaggattcataccatgggtcactrtctgttttygtgggctccattttaaacacctttttagatgtagagtattggaaccacagctctagtccaagggagcttctcaggaaagctacctttcctggggacggagtggactgcttatgactggaggtccaacccagtgacagcctgaggatggccaaagattttcaagaaaccactgtgaggtgctaggcttggggctgggagctaagaggtgtatatttcagtcaacaggtcatctcttgggagaaatatccaccctacccgctatttaggagaaattcctttgagaaggttatggtggcagctgtagcttctttaactgatcatgagttttaagacaatgatgactaattgaatatgtactctacaattyagggggaacatttattgacttagcttactgattaatcttagaagtcagctaaactttgtaatcaacttgacccctggcatattacctggcacatagggggaactctttcaatattttctgagcttacctgctaggcttagtatcatctgcaggatagaaatagtatctcacgcatctccatayttggcatgaagctgatggaaacaaattgaatttcaattcccttgaattcttcttgctgattttagggtaggattcaattcaaaggaagaaaggacacccctcatactcccttcaggtgtgcaagaatatagatgctctttaaggtactgcaaacatgacatacatgttgacacaataaataacaatagttatgaagcctcacttacatgraagctgaagtgctttcttttgggtgggatacacttaaatctgacttgtgttgcattaacatgtattgccccttagttagccctactcaattatgtctttgcttatgtgccaatgactgtgaaggataataagcatagaacctctgcaagtggtgtgagcagagtgccatggaatcatttaataaaatgtggcatagagtgcaatgcatgctaccagagagagggattgctatcaacacaaggcctgtgccagtaggcacactggtctagacactgtggcaccaagtgtggaggctctcagttactgccccatctccaccccactatcatactgaaaattgccccatgttcacaattaatcttaatctttatttctaattgatccccacttttccactttccttggctccacccaccacttacggttgctttaggaataactcttyaaatggaacttcacccctttcctgtgcctgaatatcagattctatgctggcattgttttacccaaaatatgataatttgcatagaagagaagcacagcaacccctcgttgttacctgttactccctctatcccacaattcctccccggacattttccaataatcatgtttaacagcataacaggggttgggagaatgctctgcattgagtagagtaartgctcaggatgactcaggctgtttcattcaatcattgtccaaatccctaacccctggcaatcacagagtccaagggactagggctgaaggtatctccaaattagaggtgtgggaacagccaagggcagaatggaaaggtcaaggtgataaggcaaaaaaaaaacaaaaacaaacaaacaaaaccctgaatgagtcattgagacyagagagaaaagaagaggatctggaagctggggacagaaaaccaagtttccagtgatgtggagaatccacatcagtgttagcaggaaggaacattattcaccacagctggaatttgttgggttgattgccctggactgtttaaagggaaaaaagtgaaatgagcagtgagcattatttgctactgaaatatgcatagatagatagaaaaacagataaaaaggacaactgaaaaaataccaaagmgcaacaactgattcaagagatgcatgcttatttataggaaagaaagcataacaataaactgtctaatgtggatggtctggtattatcagcatcactcctgcctcttcccacaaagctgtcctgtctacttctcttttattgctgttgttgctcacctggaggtttcccttcagtatcttctggatttaatgtttataattttatatctttggtctagagtcaaatgccatgtaatgcttgataatgtgaagcattatcacatggtgaaagccacagaagaaaatttatttagagttcaatacacacaccatatatttcaaaggcatcatctgattgcatctgcaaaatcaccttctgaaacaggttttattgttgtatttatatttgagacaactaaagcacaaagaagttaagcagctccctaatatcacacagctagcaagtagtgcaacaaggattctaccctctgagctttttcactgcacagggcatctatatcagtctgttctcatgctgctatgaagaaatatccgagactgggtaatttataaagaaaagaggtttaattggctcacagttccgcatggctggggaagcctcaggaaacttataatcatggcagaaggtacctcttcacagggtggcaggagagagaatgagtgccagcagggcttgtaataccaggtgcttgtaaaaccatcagatcttctgagaactcactcactagcacaagaacagcatgggagaaactgcccccatgattcagttagctcccactaggtcctgcccatsatttgtggggattttggggattacaattcaacatgagaattgggtgggaacaaagccaaaccatatcagcattcattcctctttcatagttatctgttaatattcatcgccttgatgatttaaatgatcacatcctttcttcctaatgaccrttatccttgaaaagaagtagcatgccctaagccgccatgtacttacttccttttgcacagtgtcaagatctggaatkatttgctgttatttgataacttttgaacaacttatagaaattgtgttatattattctgttctgttctaatagcttttaaacctgacttctttttcaaagtttatgtgcacagtttgcgatggacagtttgccggtcaaccagttgtatggcagcgattcattagaaaccgctgaaagggaaatacagcatttctttcctcttcaaagcactttaggcttgattaaacctcatgcaacaagtgaacaaagaggtaaatatttaagaataaaagtgaatgtatacattttctccaaattttgtgaacatttaaaaaatttacaatcagaaaagcaaaacaggaaacagaaaattccaaaaaagaaaagttgcgatgagtactcctatccttcatttagattcaacaattaactttgtcatactttgtcttgctatctctctcacctctccctccctcatccttctctgtctttctcttaatcagaaatgatattgaattttgctgaagtctttttcagaatttatgaaaatgatgagttgttttttccatggatatattagtacggaatatcatgttaatgatatttcaaatattgaattatatccttccattcctatttacatgttgcttagttatgatgcatttttagatacgctattggatactatttgcttatattttacttggttttttttttcgtattgagacttaaaagtgagattgatctctgctttccatttttttggtttgatatctatcaggtttagaaatcaatggaatacttcataaggaatgtgaatatatttttcagtgctccaaaagagtgtaagcagcactgagattggtatttggaggtttggtaaaattttcctgtgaaaatatctgggcctgttgtttttttgtgggataattatttgattgctttctctgtttcttttatggaaattgctctattaaagttttctatcaccctttgagtaaatatagttaaattatattttcctaggaagttatctattccagctatgtaatttgtaaagtaatttcttatcattattatatttcctccatttcagtgattatttctactttaccatttcttatttcattctctttcaaacaataaaaatttaatttattcatgagttctatttttttctcttttctaactactatttttggttttatcttcatgattttctttcttctattttctagtagttttttcttatgttcttctagctttttgagttgaatattaagtttatttattttmaacttttaatttttattgataagaatttttaaggttatacattttcctttgattactgctttaattatagcccacaggttctaatgcatcgtgttttcattatcattattgattattgataattaattattgaaattttgtaattttggtttgtattttcccttgggcctttgagttattcaacaaataaattatttttaaagagattttttaaaattctggtagaagaaaaagcttgcatttttttgaaattatcgtggtgttgccgaactaccatatggcaaacttttgtgaagattctacatgtatgaggagaaaaaatattatcactagtgtcatggtgaaaagtttgaatataagataaaaccagccttacagtttgattcatcttgatttatttttccccaacttgatctgtcttgaatttgggggatctgtcagaaactagaggtatgagtcacctgttttcagtatattgttggctatatttcctgtattttctgatttataatgktggtggccatgttatttggtacatagatatttaaaactattcatggtaaatttagtttttagcattacacaaagttcttatttgtctcatttaatgccttggggcctgaattctgtattgtttgckatcaggaccacacaccctgctttcttattatttgcatttgccttgtacatttttgcccatttatttatttttagcctttttgaatcactttttttaggcttgtctcacacataaaatccataaaggcagatttgtattcatggctttctctcaaaatatatgttaaacagccaaattcactgtaataaaacagtacacaactcacgtatttttaattttttaaattgaaacataattgtccatattcatggggtacattatgatgttttgatacatgtacacattatgtaataatcaaatcagggtatatagcatacccattacttcataactttatcatttctttgtggtgagaacattcaaagtctcctcttctacctattttgaaatatacaatgcgatattattaactatagttaccctactatgcattagaacaccagaggttatacccatagacttatctctccctatttctccctgccccatagcctccccacctctagtgagcaccattmtgctctctacttctaggagatcaacttctttaggttccacatatgagtgagatcatgcagtattttgtcttttctgtgcctgacttatttcacttaagataatgtcctctaggttcttctatgttgccasaaatgacaggatttcattactttttatagctraataatattccattatgtatatgcatcacactttcattatccattcatccatcaatttttgttgataataaataggttgattttatttaggttgattccaaatcttggctgttgtggataatgctgcaataaacatgtgagtacagatatttcttcaatgtactgattttatttcctttggatatatacccatagtgggattgctggatcatatatggtagttctatttttaattttttaagagctgttgagccttttttcatgtatctgttggtcattgtatgttcaatagatatcttctgagaaatgtccattcaggtttttacccatttttaaaccagaatccttttttggggtttttgtttgtttgctattgagtttagttccttatatatgctgtatattaaccttttgtcagatgcatagcttgaaaatattttcttgaattctgtaggttgtctcttcactcttgatttttttcttcactatgcagaatttagtttgatataatcccatttgtctggttttgcttttgttgcctgtgcttttgaggtcttaccaaaaaaaatcactgccgagaccaatgctatgaagcatttcacctatattttcttctagtagttttgttgtttyaggtcttacaggaaaaaaatttagtagatgagataaactcacataatatgtttattttatgttaataatatgtttagtttaaaacatcttattattttaagttatatttactttacatgttatttttcatttactgttgttcttctctgtgtggtcttttacattttcttttgtgtttgagaaatttatttgttctgtaagccatttttattgcaatatctatcagagttgtccaagggaaagaatatagtcatgggttcttagtttctgtttctgattgggccagtaaagccccttcctcatccttcttttctgcttatcactagagacagaaactaaaaaccatggytttgggctgctaaaagcctaaaacaaaacacaacaacaaaaaaagttgggatggataggcttgaaagttcactcttcttgactgagtgcctattatttgttttctctgctttaaatgatatcctrttacctttgtgacagttaggtacttaatctactttcttatttcttgagctattctcctattttttgaacttgtgttaaatgttaaatgtactttgtcagaaaatatattatttacatatatgctggatagaaataatcctaggctcacattttttttcttggagtttcttgacagagtatctctattcttgtttcctgcatttctttcaagaaacctggtgccatatttacttttgtttcattgtaagtaatatggtgttttgccagaagaaagtgttaatttttgtttgtttctcaagtctagtagttttactaacatatgtctgagatttgaccactcttgatttctttttctagatacatgttaktctttttcactgtctagattcttatcttctcttatttcaagatggttttcctgccttatagttttaaatattagttctgttccattgttcttttttttttcttagggatttcaccagctggaactaacaggggattcttttgaagtttctgagtatttagattgacttactcaatttttagttaaaaatattctcttttggtatgatgaagtcaaatttcttaaatacatatagtaatatatattatttaattatatacacagatatgtacacacacacacctacatacacacacgtgtagacatgcttatctttgcctaacttctgtatctatcactttccctattgacttctctttctttattttgctttcctttacttggctatttttacttctgttctctatgtccttctctgtattttaagttacattagacacctagtttatttctgttattttatctttgtctttcgtgagtgcagcttttatttcacatctacttattgcttggccatttctggttttgagtttgaagttctgatttatgatttatgatttttttaatgttcaaactgcttaattcacattagggtgtcgtgttacagtttgggggggtatttgtcatccttctgctggcttkctttcttcctacctcccttcctctttctctttcttttatttatttctttaacaggggaataaattttttaattagcatagtaattttaattttatttttataatggctcagtaaagattaataagggtttgggttagctcatttcatttctcagctcagattttctcttggttttgtattaatataattaggtagtttcttaataggtmgggcctttgcagggggtgaatctgtctcactacctacagtactctctgtttgtcttgaacgttaacctgagccacttgctgtctttatctaagaactgtaagagacttttcttttccaaggtgsctcgttttaccaggaagtattgattttccaaaaactgcattagtcttcaaataccttgcttgcartgccacaatcacccactcctaccctaattcattcttcatggtgcaaaggaaattatcgttttagagcacagatctgaatatgttcttgcttagaatgctttaaatgttccttgttgtttttagaggaaagtccagatttcttcacagggcatagctcttgataatccttcttctacttacttggccaacttcatctccagtatattttcacccagtcacttcttcctgccctctgcacttggcatacattactcactctgcctgmaatgtcctttccctacttgtccacttggtgatcacaccttatttttaccatgcttaacacaaaggtcagtgtctctgtgaagtcatccctgacctctccagagaaagttaattgttttctcacctgtggttctggggaccttatatattactctataataatgatcactttctcatgatatctttataggccttgctctctgttgagacagtctctgaggaaaggtttatgttttcttccctttcatttctgcagtgcctgtcttagggcagatcctggccacctcccttccagcaggagaggtccagccttctccaggctgtctgttggttataatcatattgcctttagctcccagaccactctatgtgcttttgatctggagcaaagaagaggccgttttaccagaaagctcccagtttctcagttggttcacctttgtctctagaatgtagccctcaaaacttaggctgttggtgagattttsacaacatttgctttgtttaattccctygatggtactctgattcttcagggagaagagttcagattggctttatccttcaatccatatctagcaagaaattccttggcatttgtagtatgaaggtgaaaatagatctttattcttagcatgagagcaggtcccttccccttctactcttgtggcctactaggtgtttcaggtggtttctggaaaggtgagcctcagagactgaaaatctacattaacatactgaagttctgaatgtcaatttggtgctttggaattttaatttcgtttggcagagttttgccatgttaaaccacaatatgcaaattaaactatsattttccttagttatttcagtctacttgagtatggaggaaaagtgaagcaatctgcaatattatcaaatatttgtttttcttagagcagatcctgaagatagttaaggaggctggatttgatctgacacaggtgaagaaaatgttcctaactcctgagcaaaywgagaaaatttatccaaaagtaacaggaaaagacttttataaagatttattggaaatgttatctgtgtaagtttctgatacataattrtttgcattataaaagtggtaaatgttcattatagaaactttgaaaaatgcaaaaattaattaaaacatttcatctaatctcattcmtgaaaagacattctgctaacattcatggttcatcttttttctatttccttacctccctccctatcttcttttctctctctcmttctgtctctcctcgctccctttctttcattctttcttccttcctactttccttyctcccttyccttcccttcccttccctttcctttcctttcttttcctttcctttccttccttccttcctgtttctctaggtcttcacattagatatagaggctgcctcagttcaaaccgctgcttygccaacatacttaattgttgcctgagtttccttatctgttgaatgggaataataatagtatctatctaataggcttgttggcagggctacrtaattgatgtgttgaaagtacctagaacagtgcatgacagatattaaacacttgataaatgttagctatgattattcacatctttttttacatgtgttgataccttgtcaaactatgtatacataataacataaatattacgataagaaatacactcttttaaaacttctttctacatgatgcatctgttcctgacaacacatacttttataaccaccacatagaaattacaggctaacatttattgtttccttaattccaggccttgtgatgagctgtacacactttatttcakttgactcttataataataactctgtgaagtagttttactagaatttccactttgattttgagagaacataggaccagggctagaagttgtccgcagtcacaaaactagtgtttcgctgggtcctgaacccagggagtmtctgcttttaactgctgctttccaaaactctcttttacacagagttcataattatgtgaacatcattatcgatttactatgagttacatgtcttttctattttatatatattacacatcaaaaattttctatacagtcatgctttgcagtacaatatttcagtcaataatgaatcacatgtacagcagtagtcccataagattatcatggagctgaaaaattcctattgccttagtgacatcgtgatcattgtaatgcaatgcattaccatttgtgttcatatatgtttagatacacaaataacactgtattacagttgtctacagtattcagtatagtaacatgctatacaggtttatagcccaggagcyataggctgaaccagatagcctaggtgtgtaagaggctattctatctaggtttctgtaagtatattctaggatgtttgcactacaatgaartaacctaatgtcacatttctcagaaagtatctgcattattaagaggtacatgactgtacatacacacacacatgcacacacacacacgtgtgtataaaatacgtataagaaacctctttaattgcatrtcttctcttttttcagttcctgacaatttgtcaakgagtttaggaaggcagaatttataaagttaacaaaatttaatggaatatatgtgctattkagatataaataataagcagaagcctaggactgtaccatgacagcttagaaaactaactttcatacttattgcaggttgcattttctgggaagctggaagtttcttgttcaggctattgagtaatgatgccatgaggaagacagggcaaagaagcaggatggggatgacggcaagtcaagatgtagtgcagaccagacaacagcctctgctaaccacagctagattggtctatcagagttgtccagtattggctgagatgaccaggctgttgtatgctcacatcactcagttacttgaagtaggccatcctggcaatgaggatggcctgagcaaggctatcttaacttgaggcaatccctgaagcggttagaggctgctggacaaccataaagcaacaagtcttgaatccatgacaatgtctctatttacagacctcaaagtagcaaaataataagacttcattgacaaatattctctagaattaaattatagcacycayctagcatataaacctattagaagagggagaaatgaaaaaaagaaagtacatgattgcactgataaggacaaagaataaaaaggagctccctggcycaggctgcagtgttctgtctttagccttgtttgcagtgtcaacagttttcagtaggctgggtcttctgaaagcaccgttctttgcaggggtccatctatggtcatgattctgaccaagtggaatgctgttgcagaatggagacgaytgatgggcccaacagacccagaagaagcaaaattactttcccctgactccatccgagcccagtttggaataagtaaattgaaaaacattgtccatggagcatctaacgcctatgaagcaaaagaggttgttaatagactctttgaggatcctgaggaaaactaaagtatatactgtgaagtacgtacctgtttaattattattttattttatttgcttgttgcagtgactgaggctaggacaaacctgtcctaaaaagagaagaacttttcctaaattcctgaatcaagctttatttcctgtgagacacactgttctattgcatagtagccacacagcctcaaagctgaaccttgtagatgctgatgaccgtggggattctggttgcttgtaaccaggctggggatgctgcatccaggctggagggatggagacaacagggcaagcaacgcacccattggttcacacagcttggtcttgagctgtggtgtcttctaccatgayataaaaagcctcatgcagtccctctactcagctcctttccacttctctgctttgaatggccaaagtttctttctttttatctttatttgttctaaacaaaaacaaaacaaaacaaaccaaaccaaaacaaaaaataggatacatgcgcagaacgtgcaggtttgttgcataggtatatgtgtgccatggtggtttactgcacctattgacctgtcctttaggatccttcccctcaccccccaccccccaacaggccctgatgtaygttgttcccctctctgtgtccatgtgttctcaatgttcgactcccacttatgagtgagaacatgtaatgtttggttttctgttctggtgttagtttgctgaagatggtgacttccagtttcatctatgtccctgcaaaggacatgatccttttgatggctgcgtagtattccatgtaccacattttctttatccagtctatcgctgatgggcatttgggttggtgccatgtctttgctattgtaaatattgctgcaataaacatatgtgtgcatgtgtctttatagtagaatgatttatattcctttgggtataaacctagtaatgaaattactggatcaaatggtatctctggttctagatccttgaggaatcaccatactgtcttccacaatgattgaactaatttacattcctaccaacagtgtaaaagtgttactatttctccacagcctcaccagcatctattattcctgacattttagtaattgcctgaatggccaaagtttcagtgtacagtgtacaatgattgtacagtgtacagtgattgaaaaacccacagtcaccttgggctggtgggaatataaaatggtgcatcttctggataatcatttggcagtttcttaaaaggttaaacatagaatcattatttaacccatcagttctattcctaggtgtattcccaaaagaactgaaaacagggactcaaacatatacttgtacagtaatgtttatagaaaaatgattcacaatagccaaaaggaagaaactacccaagtgtccattaacaaaacaatgaataaagtgtggtataaagatacaacggaatattatttagccattcaaaggaataaagtattgatgcatactgcaacatggatgaatctcaaaaaaattttgctaaatgaaatgttagacacagaagaacacatattgtatgttaccacttatatgagttacctagaacaagcaattatagagagaaaaagtaaattatagcttggggctgaaggaagggtgaaattgtaagttattccttaatgggtgcagagttttcctttaagttgacaaaatattttggaaattgtttgtggtgataattgcaaaccatgcaaatgtcattartaacattgatttgtatactcaaatggttgcaatggcaaatttaatacacacaacccctgacatattgccaggataaaaaaaatagtaacaaaaatagtgaaataaggaagaatgatttctcagacaagcacaaaaagctcttgcaagagaactcttcaaaacccattccaaaatgatacaaaattaarttagtgttacatttttaaaagaaaattcatgtaatcctaacacagaaacccttaattaaaagtaagcctttatgttgggagtgtaaattagttcaaccattgtggaggacagtgtgctgattcctcgaagacctggaaccagaaataccatttgacccagmaatcccattactggatatatacccaaaggaatataaatccttctataaagatacatgcacggatatattcatggcagaactatttacaatagcaaagatatggaatcagtctaaatgcccatcaatgatagactggataaagaaaatgtggtacatatatggcatggaatactatgcagccataaaagggaatgagatcgtgtcctttgcagggacatagagttggaagccactatcctcagcaaactaatgaaggaacagaaaaccaaacaccgcatgttctcacttataagtgggagctgaatgatgagaacacatggacacatggggggaacaacacacactagagcctgtcggtgggggctgggggagggagagcatcaggaagaatagctaatggatgctggtcttaatacctaggtgatgggatgatctgtgcagcaaactaccatggcacacatttacctatgaaacaaacctgcacatcctgtacacatactcctgaacttaaaataaagttgaagaaaaaagtaggcctttaataaagttcttaaacagttagtaaataaaggaaattttgtttcaaacaaaatgtaacaataccaacaaactccctaaactctttcttgggcatctctgacctgagagtcctgctgaacccccagctgctcccccaggccaccccacaaccctcgcctttacactccagcctgtccatcgtgttcagaaggagctgcacaatctgtcctggtatttttctcaccctcttcctattgtcttcctaacctttggtttaaccagcaattctgaatccttgaacgggttgggtagaaatcttactcacaagttaatatttttaaccctgtcacaaatgtttgttcattaactcattgctctgtaaatgtttgatgactgcttacttgctcagtcaggctgtctataggtaaaggttaaggcccatctcccagctctgtgatttgtgtgcaaaacttcaatatggaaactgataaatgctgaaagattagtgtatagcactgtcatttattttattaagtgcattctttctttycctagaactttgagaagataatacatatgttcacgtcaatatacaaccatttggcacagcttcctgggaggaataataagaaaaacatgctttggaggaaaactcaagatacaaaaatgaatggctatgcataataacaataaraatgtattccccaaacaaatcttaatgtttatttttaactgatcttccggaaaagatttaaggtatataaatgcacacaatctacaacaagataattgagggaggaacacggaatgtggggaagaagasagtaggagagatcaaataaagccaggagtggagttaaatacaaatgcatactgcctaatgtatattgaaaattggtcaaagttttgactctaaattttcttgcagaaaatgaggaaaaggatgacatgtagatttatatagtttgcaaactatagtactgtccaacagtccacgcagtgtacctaactccctcatggtaagataatgcaagaaggtaataagccgattttgtttttgtttcttttcctctctcatgatgtaccctgaatgacgttttctgcagtggtatgcccttaagcccatagccagagtaatgtgtggttcccagcatgttagccgtgacaccctctttttcactcaggagaaatattagattgcacatgattgagaataaggttgctgaatgattaacttttcaatttaatttcttaactctaatattaataaaagtaagacgctcacaagctttgatccttccacattagtaacagattactcactgcaatactttcatattccaacataatgtttgagaagcatgcctgtgaacagtgttaaattatacaaaatctaattatgtacataggagttatcagtaaggatatttctcaatctttctccagaatgcagtaaaaaataaggtaaatcgattatcggcttcctttagattgtgcagagaaataagtacagtcaataccttcactttcctcacttctttcaccttccctgctcccgcaggttgaatagtattatctgatgctttccatggcctgatagtatctggatattcataatatgattgtgctgagtggcacactgctattgcctcaagaatgatccagaccttcgaatgcattggggaggggggaacaagaaaaaaaaaaaaaaactctcttaaaagtgatatcgtatttcaccagcagatggcaagctacactcagttgtgtgtatatgtgactaaagttgtgcaaagatttcatacacaagacatagagaaaggccatttctttctaattgaagtagctagaaatctaataaycaatgtctaaagagatctatccaattaagctttaagttgagttcatcttggtctcgaggggattgtatttagtgggtggaacacagcagcaagaggtaggcatgtaaggactggggttagcagtacttggaaatatcttcttgcctctgggggagaaagattttaaaaggctagaaagtcaccagggcttctgctaaatgggctggtcttgaatttcggctggactttaggtagtaaaagcatggcctggaccactgtggctgagacaagtaaggcctgaaaaatcagcaggaaaagttggagcttgaggctgagaactgtcagctgatgagatacccaggagggtggggatgtgggtctgaattcagggacaggctcagtaagtaggcaatgggacacctgtgcagaaactgcctctatcccatcagccaaatacatgaggatgacttcgctgggatgaggtcagtgtctacatgaattcccccagacagaacagtccccattctctagtactggctcagtcatgcaccttgaccctaaagccagagtctctctgatggctacacccagtccatccagcccagttccatgacaggacacccaaagcattcttgatttgagcctaatgctctccagtaccttctttggatgccctgtggaagatggacagatttcgtaaaatatgctgtcctctatttgtggccctctagctggactgtcttagtgccccttctggacactgaaagggattcctgacactgatgcctatctgaactgtgtctgaacctgctcaaccattggaagctactttggatgacctccaaagccaaacattttatgcattccaaaaagggagaaagwtgactcagcaattgtctgcctaattttcagctgctgaactatttcaatgacataatgaatattttaaatgattataattattcttaaaatgttagtgaattttaaaagtccatcagtttgaatcaacaacattattttagatttattttggtaccatggcgaaattttattcataataccattttttttgcttaacttcagttctttgcaccttgttatattattcaagttcttataatgttatgagatttaggaatagtcctctgattatatgccctccctgttagctgaatataattgttaataaacaatttaattgttttcccttttcataatatgtcatttaagtgagccatactggccattagaaagttgttctcattgagatactgcagctgcatgttttagttataaaatttttctcatacaaatatcacaactaaatatattagacttaggctgtaaaggcaaaattacacaccatggctttgttcttgacattaattacctctttacaaatattttcttacattccagtagacagaaatttctctcaggtagcaaagcaaataaatactgtaagttctgtagtggtgatcaacatattctttctttaataaattcgaaaagaaaaagacatgaaaaagcatgaagacaaaagtcgaaggcttagggattaaatagtgtatggctgccagttacagaaattgacagagacattctgttgcttgacactactttatagtttgtgctggaaaagtatggtggtcaaactttaatatttttatgattgtcatagtgtgatgagtatgagaatgtgaatcacaacctccaattgcaggggccatattgacaagggttctagctctgcaccctgaaattcactgtcacctttgcagcaagaccacactacctatgggttgctcccagtcagtgactgagcacaacaggatacttagagctatgcctgggagaagagggactcctttgacagatgactggctcaagactcccaagtaaccttgccaaactttccttagactttacagcagtctggaatgcttctacccaacctttcttctctcttccctctctccttcactcagggtggacatccattgtgctctgacagctctcccagccctacccagatccctccccattctctctcacaggcgttttgcacatttaattctgttttggcatttgcttctctgaggacccagatgaaaacacatatgatcaagggaatagttttcaaattagcatgtctaaatgtctttaaatcaaactacattctatatatatacctgtctgataatatttttgtagtatctgatagttataaaagtaacacatgttcattagacaaaatatagaaaacctttatggcttacactctttttttttttttttgagactgagtctcgctctgtcacctaggctggagtacaatagcgtgatcttggctcactgcaatctccacctccctggctcaagagattctcctgcctcagcctcccaagtaggtgggactacaggcgcccgccaccacgcctaatcttttgtatttttggtagagacggggtttcaccatgttagccaggatggtctcgatctgaccttgtgatccacccgcctcagcctcccaaagtgctgggattacaggtgtgagccactgcgcccagcctatgctttgcactctcttatggcaacattttttatggtctttagtattcaataatgaaggaaagttatttgtgtcacaaacacctatcctacactgacatgacttgggaaccacattcaaaagtccattttcacaaattattggtaaaataaactctgatacatccaagctatgcaactgtccaatataaacctactgttgcattctttagtggagcaattttcatgctgccttattaagttcatacaccaaaacagaaggaaaacccagaaggattcacaccaaaatgctagttttgacattttgagtagctactttgatattttgggtctttttgttttatttcatgtttttgcttatttctgttctttgaataataaggggggatattccattgctatccaagggttcagcgtcttctttggggtactttaaattaaagtagatgctctatcttgggtacttcattcatctggagaacatggcatgcttccttatcagttaaatcacagagttgacaattaactgatattatggctaataatatcagttaattactgatatactgttgggtggtatgcctctcactatgatgtaatacatctttcagtgtaaactgcttttcaaaagtattttccaataggaaatatggtcagcattagcataaatcagactataacaagaagcagaaatttgttatcctgttgctctttctatggtgataaataaatagtccctctagcagcccagatttatgttaccaagaagtcagtggactttggactggtaaatcaaaattcaggaaatttgagggcccagatctgcctctagctatgtgcaagaaatcagacaaacttatacaacctttctccaacaagcgaggttatgacttctgaggtcttattcaaccttttcattccatgattccaaacaatcattcttgctctttgaatggtaataatagcaggtacatccttgcagtaaaaatgtgctcttctttttcactcagggactggttaccccaaccagaaacaccctcaagctagtaaggggttttgctgtaagaatgcgatagaccatcttataggtatccaaggagagaaaccaaaagtgtgatcagactgcattggtttagagctgaaaagtaagaactaaggctatttatgtaagttctcatgtatcttaaaagaagtctagacagagagcatctattggcaactctgctatactctaattcttcagttcctgtagttaaccagttatattattaagtttgatttgttaaaaaaatagagaaggttgcataggcttttccagcagttaagaaatctgtctatctatctatctatctatctatctatctatctatctatctatctatcatctatctatctatctgtctgtctgtctgtctatctatccatccatctatctttctatccatctatctatcaatcatctatcaagccatctatttatctctatactttgaggggctcaaatcactatttcccagctgccaggagtgtaggaagtgctgagaatgttgtcagctgatggttcacagacgaagggaggagctttgcccaaggtggccaccagttccaactttacatttttaatcaatatggggaaggagaaataatcttagtgagggtttccatacaccatacacttagtgagcatttccatacattgatggtccaagcattctggggcgtaactgacaagatcaagaactttccttgctgagcatactccttggcccgaaaatgctatttaaacaaatgtatcccaaggtactaatgaaggatgtgcacagatgtttgactattgagatgtttattcagtattgtcagtgaagaaaccacctaagtatccaatagcacaacagtttgttgagtaatgcatactatggaatataacacagctgttagaaatgagatggtttctgctttcttgacaggaaaacttatctcaataaagggccaagcaaaggaggcaggttatgaaacacatgtatagcaggttcctagttttatttgttcaaatcattttataagtgcataagaaacacctggagaataatatgccaaaatactaatagtgattacctctgtgtagtggagagtaggattagataggattttatttcctttgggcgttgtgcatttattgaatgccttatagagaatacatgcttactgtgttagcaaaaggccaataaaattgttttttaaaataaatgcctccaattgtccacaattatgaaatttgttgataaaatgctgcaagataagttctttttttctgattaaagtatcccaactgtcaagtaattctcatttcagaggtggaacctcaactttcctctctgtacatttatatttaactcctctcacatgtatttaggcaaagaaaatatttaaatgaagaaaacaaaatttggcactcacatgaaggccatttttaagcttgtcaaattattctcagggtggatgtcctgggaagtaagatgagtgacatacctctcttgtgggtataaaata

SEQ ID NO: 93603 - DNA, 140903 bp, Homo sapiens
tggggttgttgctataacagataactgaggatattataaaagtggctttggaactaggtactgggcagaggctgggagagtttggagaaacaggagagaaaaggcctgtattgccatgaactgagcattaggggcagttctgctgagggatcagaagagaagaccaagggaattctgtcccagttgtggctcaaactgcctcaggtgcagcttaacctgcgtctctggaaggtaaaatgcatctgatccttgaggcaagagctgtgggggcatggctccctcacctggatttcaaagcgtgttaccagcagcctggggacccaggctctgcctctggatttacctgcatcgtatttgcgcttcgtggtcaaagttgttaagaaaggggtgagcttctggctacctaataagttggtcttggccacctgcctgcgacacttcctggaggagccatggattattggtggaggctgcagggagctggcgatggagccactggtgtcagcagcagagagggaagaaaggaaaggaaggggccacaaatggttgaagtgggcaggtgggcacccagggagttaggggaccccgccttccagctctgggcatagaagagttagtcacatacctgaggatcctgaaacaagggctgagaaaacctcattgctccagctgagaggtagtagtggatttgccatttttaaacagttgcctaagaaaaaacgttgaagaatatgcagcagacactatatgtggcctgtaaagcctagaatatttactaaaatatttacagaaaaagtttgctggtccttgtgagaacaatgcagttcaaaaaaggatacagacagaagcatcctcttaaatcaggaatgtagtttccatttgtgggcacgaaaagatggacaagagaagtaaccaaacttcaatcttaaaatatttgttgcaccagaatttcacttcggatttttccgtctagattattttcaagatgagttttgaaacaaaccaagaaacctgcccctcacccaaaattgtttaaaaagagaccactcaagggagttcattatgccgtatggagatgtctgcagtcgcagcaaatcacattccagagaaggtctcgcgtaggtgaagacagccaggtgctttctctaagagatacagggtgggtgagagacaagccagggaggatcttaattcaagagaagaattcataccaagagctgaccaagaaggcagtaaattctgtgtacttgtagcagaagaaattggactaggaacttgcccaaagctttatcaaagaaaagcattgtgttcaatcttggtagaaacatgccagcaataagtgcttatgttccatagccatatcatgggcttctcacttttaaacctcctccaggggatgttctcagacatttcacaatccctctggggacattacagtagaagagaaacacatggaactgtaccagtgctttttgcccatgttcatcctaagctccggctttaggcagtgctttctgacctgggcggagtgaagacgctgctggtggctgaggccagtaacatggggcccctgcccagccaccctgaaggctgggtaggtccctcttttcaccaccagttttccacatctgtgtactctagattaacaaactctggataaacagatatttacattttaaactcaggcctacacagagtagttttccttataaggagcatgtatcacttagcaagaaactaaaaatggcaaatgagtttttcatcctttaagaaaaaaatcagctttagaattctctgcggtcagttgtgtgcaatgcaacaaaactacctttcagtaaattacttagttatttatttcagtgttttgtttcttttgatactaagtttccctttcaataatgaatgatgtgaccaaccaaggagaatttgtttgttctgtactaaaattatattttacagttaggaattataaaaagcaagggagcatctttaaatgttttttgtttaagcgatgtcttccatccaaagtaagaataatactctcggaaggtccttttggtgtcatgtcacttgctgtatgtggcagccttacagtgccacacttgggtactgaaaaatcaataaaacgaaagttcatcatcccatggcccgtagactgtgtgggcttgcttccttgtcatctttgaatcttcttactcattagaatgatgagttgaacttgagtccaaattcagtgaaatacattgtctgagtctgacgcacactctttgcatgtgttgtgttgggtgtgcatacagtgaagcacaattgtgtggggttgtggagagggcgtccacactctctgcagctcagaaagcagatatttcacaagtagtgaccaacccacgacgttaagccattcaccaacaataattgccactctgagatgactgtttataaggtcaccattttaagtacctacttgtatatagacaaggaaaagtaataaaattaaccaatttttatgtatttaatagtaacagcaaatgctgactttatgttacactgttttgcagttcgatctaagcttagaacctttggcttatttccagaaaattatgactgtcattattaatgttacgtgttaccaatatggaggatgacattagacgctcagcatgtttctcagccgttggagaatacatagatgttctcctggagcaggaaggtgggcctgagccataacctgaaaatagatgatagagacagatgggaagggaaggggaccagctgttaggaccaacaaaaataaaggcctgagacatgccggagaggagagggaagcgcaaaaacaaaatgagagaacagagccagcaaagtgagctcaagggaggtcctcaagccattgatcgctaggaaaacaggacacagcattaagatagaactgtcgtaaataatttttgaggcagtgcaatgactatagggctttttgcctgactttaaatacgttaaaatatctaagatgttaaaagacatctaaatttttattccacttggtggaagagaagtcagtgcctatttccaacactaaccatgttgacaggtctgaaaagccatggttctgtgtttttgttttcagtctgtttccatttgtcctatgaattggcatgtgccctgtgggtttttttggtttttttgagatccggaaatgctaatggtttgcacagagggggtcgtgaggtgcaggtcacctctgtcagagtcacagtgtcttcttttggaaacgtcatgaaaagacaaaggagtgcccggctaatcccaaagcacgccttggcagagtggatctgcctggagcatccatccgtggcagcatgaaaggcaatcctgtgagagtcttcctggccccacctcgtctgggagcatgtgggcctgtgatcccacctcctcctaacaaaagaagagtgtgtctgttgatgtgttttattttgcttttagccaggctagtccccctgcccttgcgcagtccagcctctttctattaatagatctattaaggttgactgagacctgctgcaggggacgctaggggcactttggccttcgatctttgcctttcacccttgacactgtttggcaggtgaaygacatccgggctccagacttcatggccacttcaacatttctgtcaacagcctgtgtctgtttcatgtaagaggcccaaacaagaaaatcaaggcttaagaaggatttctgccttgagtaaaggactgaaacctcctcacagaacacgatggtgacaggcacaaaagacagacttcttgtttaagtaggtgaactccaaagacgagagaaaaggagtttttttcctcccgttcaaccagtcatcaaataaacatctcaggcatctggtgttttgtcaagggattgggattccagtggcccctgtgtgactggaaggggaaaggtttgtcggtggcaacgccatcgaaacacaaaggagcagctttagaatccccagtgtgggtcttctcttgtgttatttctacaacgtccttgtgccagctgttcttgctgttctctcaggcttctaattgggagtgtgaatactacctttcaccctttttgccttcatgagaatcagagtttgaagtggacagttctgaaaatattaatcatcttttttttttttttttttttttttgagacggagtctcactctgtcgcccaggctggagtgcagtggcgcgatctcggctcactgcaagctccgcctcccgggttcacgccattctcctgcctcagcctccctagtagctgggactacaggcgcctgccaccacacccagctaattttttgtatttttaatagagacggggtttcaccgtgttagccaggatggtctcgatctcctgacctcgtgatccacctgcctcggcctcccaaagtgctaggattacaggcgtgagtcaccgcaccgggcctaatcaccttattcttgcctgtcattacacaagccttaaactccagggaccagacttagcactttcttttcctaagattgctttttctcccacttggcccaagctttaatacccagattttagactcaaaacacttaaaacatttggtgggctctcctcagccttgtaaagttctttgatactggtcatggcagcacaagagaattttctggaagttcctggctgtttaatgttcaaattacacgtttaaattctctcccacctcccgtggccctgttttccatcagtgtatctatttctggcccaaatgtccttgaacatggaccatgacaggtcctgtgtttactttccgtgtttctacatttataatccagtaaagaagacaccgagtagtacatagtattttgtaaatatttgtaaactaatgaaaatctggtttctttcacaaatcacctctttaggtttctaaaatttatgaaagaaatcttttaaaatctattctaggccgggtgcagtggcttacgcctgtaatcccagcactttgagaggccaaggcaggcggatcacgaggtcaggagtttgagaccagcctggccaacatagtgaaaccctgtctctactaaaaatacaaaaattagctgggcaaggtggcgggcgcctgtagtcccagctactcaggaggctgaggcaggagaatcacttgaacccaggaggcggagtttgcagtgagccaagattgtgctactgcactccagtctaggcgacagagcaagactctgtctaaaatatatatatattttattctcaatttttgctgttctttccagatgtgcagagttgtgtgtggttttaaaaccatatgcaatgtgccgtgaagggcgggatggaacccaggcctctgagtctcagttctctgttcacttccctccaccagagtttgttaagggagtgttgcattttaaagctttatttagaaaaacttaggaaaaccaagtttacctcaagtggtttccttttttcgcaacctgttcagccttgacagaaaggaaaaagaaatcccagaattaggtagtaataatagaggcaaagtgagattgatattttctgaagccctgcttacagaaaataattcctgcatatttattttattctaaacatagcttcagattgtttttcattctaagttgtccttaaaagtcactttttaaacctcacaagaagcaccaaatgtaagggggaaaggatggatttgactacatctaaagtaagactttctgttcatcaaagctaacagatggcagactaagaaggtatttgcagtgactgaaattgaaaagggattaaaatgtacaaagtttcatgcaaaacaacaagaaaaaggaaatccaaaagaaaaaaccggccatggatattaataggtgattcacagcaggggaaacccaaatggtgaacaagagataaactaagctgaagaaatgcaaatgtaaattaagacccactaccttatgcccctcagaattgccagacttcaagtgctggcagtgatgcggggcctggacttcaatattgctggtggtggtgcaaactgcaatgcgtacccsagaagggaagctggcagcttaaaagttagcagcgtgtgtgccctttgattcagagagccacttgcgcgtggctctccggagagatttctacctgggtccatgaatggacttacggaaggattccttggtaatgattctgagtgactgtgttgatggaggcaagcaaggtcttggacaagtcaaaggcggcaggtgcgtaccatggaatactgtatagccatgagagacagacctagaactatgaacagcaagcgggtggctcttaaaaatagtgttgaatactgaaagcaagacatgagaattgttgtataatgccattatgttaatgtagggcatacggcactgtatgtcctatgaggatgtgcatattttgattcaaatacattaaaatggacgttatggggacacagattatttatgaaaggaggagaaaagataaaactgatttccttgttttagggtgacctcacatcccagtgagcccctcaattcagggccagggaggttgattggttaccccaccccaacccaacccaggctgttttcagcacrgcrgcctgataagctgtgattcagaccttgaagttgttaggcaaaagctctccactcggctctgtatttgactcaggaagaactgaagtctttataatggcctagacagccctgcaccgtggcctcccactccacacctctctgaccgcagtcctcatttctccgagactccgctccagccaccctggcctcagggccctctcaggactttccatccccctcaccctgcttcactttcccccatgatgcttatgaccttagatctagtacactctgttttcattacgttctatgtacgactctccctattaccctactagaacatgagccagggggcagggggcttttgtctgtgtgttttcatgttgtatccccaggcacaggatctgataggcggtagacattcaataaatatctgtggaatgaatgaacaaggcaggatccttaaagcgagggggaatgaccaggctgagaactgagagagcatgctaaactccacagtctggccccagggatgggggcaggaaagatggcaccacctccttgctttattagagggaaagaaggtgyttcttgtgcagaaccgtcatcataacagaaagatagcttattacacgccaggcactgttctagctctttgttagcttacataatccctgtattagttcgttttcacactgctataaagaacttcccaagacggggtaattgataaaggaaagaggtttaattgactcacagatcagcatggctggggaggcgtcaggaaacttacaatcacggcggaaggtgaagagggggaaccaagacaccttggcaggtggcaggagagagaattaatgcagaaggaactaccaaacacttataaaaccatcagatctcctgagaacactatcacgagaacagcacaggggaaaccactctcatgattcaattacccccacctggtctcccccttgacatgtggggattgtggggattataattcaagatgagatttgggtggggacacaaagcctaaccatgtcagtccccaaaatgacaccatgaggaggtgctttgattaccgtcactttacaggtggagaaacagatgtggaaaaggcacacaacttgcccaaggtaccgaactagccagtggtggggctgggatttgaacgcaggcagcctggctccattctgtactctagagctgcactgtccagtatgacggccactagccacatgaaacaggccaatctaaactgagatgagctgtaagtataaaatatacaccagatttcaggccgggcacagtggctcatgcctgtaatcccagcactttgggaggccaaggcgggcggatcacgaggtcaggagattgagaccatcctggcaaatatggtgaaaccccgtctgtactaaaaatacaaaaattagccaggcatggtggtgggcgcctgtagtcccagctactcgggaggctgaggcaggagaatcgcttgaacccgggaggcagaggttgcagtaagctgagatctccccactgcactgcagcctggcaacagagtgagactctgtctcaaaaaaatatatatctatatctgtctgtctatatatagatatagacacaccagatttcaaagacttcatgtaaaaaaaatatgaaatatctcagtttctttacattgggtacatgagacatgacaatattttaggtatattgagttaaataaaatattattggattaacatcacctgtttccttctacctttttaatgcgtacactagacaactctaaattgcctgtgtggctcacagtatatttccgtcagacggagctgctctcggtacttgcttctcaaagtgtggtccttgaatcagcagcatcaacatcactgaagcctgacggaagtgctggatctcaggcttggtctcagacctcttgaatcaaattcttcattttgccagccttccaggtcactcataatgcatgctcacatttgaaaaatgccgcttcagaccaggcagcaatttttttctctaaagggccagataataaacattttaactttgcaggccacatgacttctgtccaaaactcacctcactgcttctgtagtatgaaatgagccagaatatgcacgtgaatacggattccactgtaacctgcacggacctagggggactgaacaaagcggggcaaacacgggaataaaagacaagagacaaaagagtatattttgaagaaggggtcagggggtaccttgcccctagtggacaagggccctgagctttatacagccctccttatttattaggcaaaagagatagtgagaagcggggtggaagaaggggtcagctgctcagtctagagyaggcttgcaagactgcattcctcgaacaacaggctaaatgttgcagtagataacctcagcgccagggagtgattgcctccagcaaaccttctgtcggcaggagcagtcgtcagttttctcacatcctgcattcatgataaacagtttgctgttggatcatatagcctccagtggaatgctgcgttggtcacatcccatgggccttcggctccctgcatatccccctttctgtttatgaattaattgaaaaaaygtaaggccaggctgggcagctctcattctccgattggcagtccatccgattttacagactataaacagaagacagagacgaaacaacattattccaagaactacatataagatgttaatgtggtgccttagataggtccaagggttgaggctctccaggccttgctggaatttggtcccgtcttctaaagaaggctgaaattcttgagtttgcctatttaaatcaagaattttgttttgtaattcaccaatatcaaaggtgatgttggatgtgaacgctccctgcaaatgggctttcacaaggtcccacggatactcactttggttgtattctaagttggttacacaaatatgagtgtgattaaaatgacagcgcaattactgctgcaactgcaagctttgtacttgtgcccctaaccacagaaccgtggatttcagcattgccacttcagtttgtagctcagtgttaattttattctgaagtcgccacgcttggtcagctgtgcgcgtccagttctccacgtactgagctatttgaatagaattatgcaaagctacagaagatatcacaacagaagttactagcatgacmaagtaaacagtagcaaaaattatcatgcctaaggctctacgggcacgatgagtcagctgagttagaagtttcacaaaatgcaaagcaggtgtggcagcccaaggctcagacagattaacaggaatccctagcccagggatacsacctaaaatcatcacagtagagatattatgtgtttgcaatgtgctatgattagtgcagtgatataactggcaagatttacaggtcaattgggtattgtttacctggagctggtccttcttagctgccaaaaagacataaggattaaaaacacaaactgtaaattgagtgatgatattctttacaaatgtaaccttagaactgtgttgtgactccggtcggccttctctccgtctttgcattcaggctcagctgactcatggctcataccgggaccgggtccatggttggccaccctgggttcctccagtctcccattccatggtcgcacgcaccttgagggcacccacacagttcatccatctcctgcaaaaacacaagtataccctcttccccacattagtaaatccactggacctttccattggccttcttccggggatttccgtaacactttcggataaactttcctcttttcctctaacacttgccaatgtctttctgctggagtctttaccttccataccaggagtcagaaaatttaaagtaaggctaaatgtagttttgattgaggtggtagttggtctcctataccccctttttgttttttcaatatgcgttgtaatgtttgatgtgcctgctctataatgccttgtcctctaggattataaggaattcctgttttatgggttatagcccaaagctgtaagaaattttgaaaagcatgactagtataagtgggtccattgtcagtttttaattgtttaggtatccccatgtgagcaaatgatgacagacaatgtggccatacatgaccagctgtctcacctgtttggcatgtagcatgcagcatatgagaataagtgtctatagtcacatgaacgtagctaagcttaccaaaggttgctatgtgtgcaacatccatttgccaaatttcatttggagccaaacttcgtgggttacagccttctacaggtatagttycagggacatgctggcaagtaggacaggcttgtattatagccctagcttggctatgagataaatggaacatgcgagtaagggtggaagtattttggtgcagaagtgcatgagatgcttgagcttgccgaaacacagaaccaatcagtttgtctgctttctcattacctagagataggggtccaggaagttgtgtgtgagagcaaatatgagaaatatgaaaaggagctgcatgagaaygaataacttgttgaagtcttaaaaataaattaagcggctgggcatggtggctcacacctgtaatcccagcactttgggaggccgaggcaggtggatcatgaggtcaggagatcgagaccatcctggctaacatggtgaaaccccttctgtactaaaaatacaaaaaattagccgggcgtggtggcgggcgcctgtagtcccagctactcgggaggttgaggcagaagaattgcgtgaacccgggaggcggagcttgcagtgagctgagattgtgccactgcactatatcctaggcaacagagcaaaactccatctcaaaaataaattaattaattaactaattaagcagttctgggtctagtgtacttttaattgtggcagtttctatgcgactggctacatttacaacataagctgaatcacagacaaagttaataggatctgaggctgtgagctgtaaaacctgaatgactgcaattagctgtaagcgttaagctgaaacaccagaggtatctagcttctcctgtgttaggggcacaactgtgagagcataagtgtctgctattgaggccacccagtttgtggtgctttgtcatgagggccctaggaggcgaatatacttaccaagagcaggggacacttgagctcaataggaaaggctgtggagctttcagaggggaccgtacaggaaaacgcggtgggcagaattaacagcacgaaggcagggcctacaatgtggaaaagcacagacacagttgtgcaggctggaagtcaagttgaggagtccgcagggcgacgctccctctgagaccttgcagaatccttccttgccccttcctggtttctggcggtgaccagcgatcctcaatggtccttggcctgcagctgtgtcacttttatctctgcctcggtcttcacgtggcattttcctcttcttataaggacacctgtcatattggatagggacctgccctgatgacttcatcttaaatttactgcgtttgcaaagactcagtttcaaacaacgtcacattcagagctcccagrgttaggacttcaacataacttttgggggaacacacgtcaacccccaactggaagtcttgcttgactgagttcaggtccttctctctgctcgcatggcatctttttatcgaatttgtcattggaagtgtctgtttatatacttgtcaccctgccctctgtcccacctccaagactatgagctttccttttttttctttagaggcagagtcttgctctgtcacccaggctggagtgcagtgatgcaatcatagctcactgcagcctcaaactcccggctcaatcaattctcccgcctaggtctctcaagtggctgggactacaggtgcatgccaccacacccagctaagttcttcattttttgtaaagacagggtctcattatgttgcccaggctggtctctaactcctgggctcaagcagttctcccaccttggcctctcaaagcacagagattataggagtgagccaccgtgcccggcctgctgagttctttaagaacagggaccccacgtaatctttatttccgtgtccccatggcccagcgccctggatcatttgtagtaagcatctgatgaaaggagcttgcactcagaaagccctggctgtggcctggagtcagaaggcccagccaagccctgcctctgtcacttcaaatgtggccttcrgcaagccatgtcacttctctggacttcagtttccaatcctataaaatgtgagtaagaactcctgtcatacctgcctcacagagaggtcgaggggctccaagatgatgcgtgtgatgaaagcccttcggagccactgtctgtaaaatggagagagttgtgacattcattcttttccagcccaggactttatctcctgctccatctttcctgactcaggcctcaactgcagcctcggtcatcccgtctggaaggtttgcctcagagcccagccaaggtctgggcaggtctgggcatcccatgattggagttggaggtcacctgcagagaaacaatgtcaccacccagtggctgcgcaacccagtttagttccaacctgaactgccctgctgaaaagacaatgtgacctttgcagcataatcactgccaaaagtagtcattttatagcagaaatacagagatactgggtgaactctacaaagtggaagagacaagaaaggtgaagttttcctccacctctcattgcagctccactgttggaggggccacagggatggggtaatgggaccaatttattcccgtggatagtagttcccctgggtgtctacatccagggctcttcctctggtgtttgtctactctgggtgtttacaccctgccagagcagaggctggcttaagacctgtgggtgggcagatcccagggtccctcactctcwcacaggcaggttttagcccatgttggtgaggcgtgagtcacaggctggagaggaattcacttcaagtcagtggtttgggatggcagggatattcatttcctgattctccttgcattgcgcctctcttaataattacacctaataatgacggaacaatgttctcttgttagagaacattcacatttaatttatttggcttccttaacagctttgtgagatatgtaggggatataaaattatatctcaatctatgaaaaagaacaccaagattcagggaaaatgggacaatgccatttttacagtgaggaggaggctttgttatctaagtcaatgccccatttcctgaggggaaatctaagactggaatccaagttgcctgatgtccctggagctctccccaatgataagtcttggtcagtttggaggaagtggctccagctgctcctgacatatcaccagctctaaaaaaatgaaattaaaagggcaaataaggtcttagttttattttaaaaatagtttgatccagtggaccccctgaaagggtcttggtaactcccagtggtccccaaccatacttctagaacaacygctggcccagagcaggaaggtaaactgtggagggggtgaacagagaagcaaagtctccagtgtyccagtgttggtcacagccagctgtggctggaaggctgggaagggaacaccactcatatgtttgtctcagtcagctcagctgctatgacaaaacaccagactgggtggcataaacaacagacatttctcatggttctggaggctgggaagttcaaggtcaagatgctggccaatttggttcctggttcatagaccyrtcttttcactggacctttcctggcaaacagaaagagtgatttctctctctgcctcttcatagaaagccactaataaaataaaatcctgagggcccttcctcatgacctcatctaaccctaattacctccccaagacctcatgtccaaataacatctcattgggagttaccgctttaatgcgaattttgaagggacataattcagtccagagacgtgttcgtcctattttgctgctaacgctattgaggtctgggggctctttttcctgaaccatggcttcctctgaacatctcatcctctgcccaccatgggcacctcctggagtgcagggggctggcgggcagagcagaatttgtacctttcccgcctcccctgtggtgcagacctgggtctgggctcacaggaggctcataaataccagtgactggaacagagcagtcaggctgtgtcctcagccaaccctgagcgccctgagcaggcatctcatatgctttctgggagaccagtgaggctgtgctgggctgcagcccggagcgtgggccttgccaagcgccagcccatctctctgcagaaaagctcccatttttgtctggtgctcccccttccctgtttcagctgcatctttgagacaaggtggtcagagctggcagaagccaggtgtctgggaatgagatttgaatcagctttttttcccctctgcatgactgtgctaggtgaaagtctcccttttctctcagcaggagactttccatrtggagggggcaaaagggaagttaggagaagcagcaaaatgagaatattggcccagcttgtcttcagaatctgtcaccccatgttccgagcatagttcaaattgccagggtccatccgctgtagcccctccctacctgccccattcccagatgtcctggggctcctgcaggaggaaggattaagctggcctccctggtctgtgactctctcatgccacccagcacctactccagtctggaatgctttgctcttctttccaggtcattcctcctctcacctcaatttcctcctcctgcacatgggcgccccctccagactccatgcagcccctaccaccatctccaatccctcagatctctgcttgctgcagggtgccaggcatttgcaatgaatctcacattgctttttcttgttattgaatatgagatcgtctctctcaaatcagaatataagaagccccttgaagactacatcaagtgttattcattcctagtaccctcccttccttccgaatgttgtccttctttctcctactcccaccccacaaaacacaaacacaaacacacacacacacacacacacacacacacatcgtagacagggaggtatgatggcattctagatgcttggtgraaaacaatttggagaatgaaaagacaagccasgaacttggagaaaattttgcaaaacacattatctgataaaagacttctgtccaaaagatacaaagaacttttaaaagtcaacacccaatttttagaaatgaacaaaaatacaaaaaatagccgggtgtggtggtaggcacctgtaatcccagctactcaggaggccaaggcaggagaatcgcttgaacccgggaggcagaggttgcagtgagccaagctcacaccactgcactccagcctgggtgacagagcaagactctgcctcaaaaaaaaagtggggggcaaaagatctgagcagatacctcaccaaagatgtacagatggcaaacacagacatgaaaagatcctccacatcatatgttattagaattgcaaattaaaacaataatgagacaccactgggcatctgttggaatggctaattctaatagatggctaaaatccagaacactgacaacaccaaatgctgacaaagatgtagagtaacagcaactttcattcgctgctagttggaatgcaaaatggtacaggcacttctgaagacaatttggcagtttcttttttttcttcttctttttttttttttttcgagacggagtctcactctgtcgcccaggctggagtgtagtggcgcaatcttggctcactgcaagctctgcctcccaggttcacgccattctcctgcctcagcctcctgagtagctgggactacaggcgcccgccaccacgcccggctaattttttgtatttttagtagagacagggtttcaccatgttagccaggatggcctcgatctcctgaccttgtgatccgcctgactcagcctcccgaagtgctggaattacaggcgtgagccaccacgcccggccagtttggcagtttcttacaaaaccagacgtatttttacaataagatccagcaactggtgtttgtactccttgatatttgcccacaggagttgaaagcttaagtccacacaaaaacttatacatgaatgtttacaatagcttcattcataatagctcaaactcagaaacaaccaagatgtcttttaatagatgaatgggtaaataaactgtggtacatcccaacagtggaatattattcagcaatttgaaaaatgagctctcagccgggcacggtggcttatgcctgtaatccgaggtgaatggatcatttgaggtcaggagttcaagaccagtctggccaacatggtgaaaccccgtttctactaaaaatacaaaaattcgctgggcatggtggtgagcgcctgttatcccagctactcgggaggctgaggcaggagaatcacttgaacccaggaggcagaggttgcagtgagccaagatcgtgccactgctcttgagactctgtctaaaaaaaaaaaaaagaaagaaaaaagaaaagaaaaagaaaaatgagctatcaggccatgagcaggcgtggaatcttaaatgtctatcgctaagtgagaccggttgcagtggctcacgcctgtaatcgaagcacttcagaaggctgaggtgggagcatcactgggcaatatagtgagaccctgtctctaaacataaataaataattatgtacataattaagtgaaagagacccctcttggagagtctacatactgtatgactccaactatgggacactctggagtcggcaaaactatggagacggtgaaaagatccgtggttgccagggattatggggaagggaggggtaaaaaggtggaacacagggaatttttagggcaatgaaaccattctgcatgatgctgcaatgatggatacatttgtgaaaacccattgaatgtacaacacaaagaataagccctaatgtaaactgcggacttcagttaataataatgtgtccatactggctcatcaattgtgataaatgtgccaccgaaatgcaagatgaaaatagtagaggaaactcactgtgtatgaggggcatatgggagctctctacattttctgtttatttttttctgtaaatctaaaactgctcttaaaatttttaaagaatcataactagaaaaaagctgtcaatttgaagctaacaagtcacgtccatgtaaattagtttcaaactgagtggcacttgctgtctgccaggcattgggctctgagcacttcacacgcatacattcatttcagccttacaagaatcctatgaggtccctccctattttacaggtgagaaaactgaggcccagtgaagttaaataacttgctcagttatggttagtaagtggtggagctgcgattcaaacccaggcagtgttgctccagctactatactctaaaccacatattaccccgcattactcttccccaaacttttcattttattttatttcttttttttttttttttttttttgagacagagtctggctctgtcacccaggctggagtgcagtgacgcgatcttggctcactgcaagctccgcctcccgggttcacgcaattctcctgcctcagcctctggagtagctgggtctacaggtgcccgccaacatgcctggctaatgttttgtatttttagtagaaatggggtttcaccgtgttagccaggatggtcttgatctcctgacctcgtgatccgcccatctcggcctcccaaagtgctgggattacaggcgtgagccaccgcacccagcctatttcatttatttatttagagataggatcttgctacgttgcccaggctggagtgcaatggcatcatcatagttcactgcagtcttcacctcctgggatcaagctatcctcccatctcagcctcccaaagtgctgggattacatacaggcatgagccatcaagcctggaccaaacttttcattttgaaagaggatagaaaaggggcacccaagggactaatttttaaaatcaactttattatggagtaatttacctaaaataaagtcacccattttaagtgttcagtttcatgagtttgggacaaacacatatgctaatataaacaccaccacaatcaaggaataggccatttccatcactacagaaagctycctcatgctccttcccaggccacctcacccacctccagcctcaggccaccagtgatctgctttcagtccctgctgtttagtttagacttttctagagttttctagagttatgactggatcatacagtatgtctcctttttgtggctggcttttttgtgcatgtcagagttgggggcaggcatcctgatatgtttgagattcaaccatactgtttgctatggtttgaatgtgtccrccagagttcatgtgttggaaacttaacccccagtgcatcagagctgggtgttggggtctgataagaggtgactaggtcatgacagctctgtcctcatgaatgaattaatgttatttcaagagtgggctttttgtaaaggggactctggccccctcttgctctcttgcttgctctcccttccaagtgccatgcccttggacttcccagcctccagaaccatgagtcaaatatatttctgttcattttaaattaccaagtctgtggtattctgttatagcaacagaaaatggactaaaacagtgttgcatgtattggtagttcactcaaaggaactaatttctaattgcaagatttcagatatgttaatccccaggagaggaaagcacactttttttattattattatgactaggaccttcccaggctgcttgagttgtactgatcctggtcccacttcaaagcaggggaggcactgagtgacatcaccctgaactggaccccaaatgggctccaagcacaggaagttgttggagggattgagtcactcccaactcaagcgggtgatggaaagggcaagttagtcatgtaacctggtctcatggaatgcttctccctcccagactgaatttccttctttgctgaatacacaggactgycctgcatagccttcttcattagagaaagctatgagaagctttgagctcctccaagtaaactgtttcatactctcaaacaggctgttaatgatgatgattaataataaattaagcaaaagaaggccaggtgcagtggctcatgcttgtaatcccagcactttgggaggccgaggcaggtcaatcacttgaggtcaggagttagagaccagcctgaccaacatggtgaaaccccatgtctactaaaaatacacacacacacacacacacacacacacacacacacacacacacacaaattagctgagcgtggtgacgcacgcctgtaatcccagctactcaggaagctgaggcaggagaatggcttgaagccaggaggtggaggtttcagtgagccgagattgcatcactgcactccagcctgggcaacaagagtgaaactctgtcttaaaaaatatatgtaataacaataataataataaagtaagcaaaagaaaaggaaagggatgaagttagcacactgtggttgacagaataattttacatcctagaaaatagattaaatgaaattacacttttcaatgtaaaaacgttgtgtttccygggaaaaaggcagatgcgtcctaaccactcctgattgcatacatatgcaatttacaattgtactttctgagcagatttggaactctcctggggcttagctgacttggtctgggtctggtctcagcacccstgctaaagyctcctagggaaggtgctcgggttgacagctctctgggcctctggttccatgtctgtaaacaagatgcttggagcacaatttctcaagttacctggcggctctttagatcttaaccctttaaatctctagaattttagggtttcaaccccattggtatagcttggccctgaagagagcaagcgcacattgccgtgtgagagacagaccactaaggggcgctgcttcctcggaggaggcgggagttctcctcctcctccgcattctctcctctgatgaaaccacactcatcaaaagtggttgtgacagaatgctcagatttggaatgatgagaaacacggaagccacatcataggacctgatagatatctggccaacacaggaacactggaatatgtgatctatgtgaccatccccttcccaaggccagatcgaacacccaccccttgacatataccaacgttaattgcttaatgacacgaggaaatacattctgaaaaattcgtcattaggcgattttgtcattgtgcaaacatcacagaatgtacttatgcaaccctaggtgatatagcttactacactcctagggtatatgggatagactgttgctcctgcactacagatttgtatagcatatgactgttctgaatactgcaggcatttgtaacacagtggtaagtatttgggtatctaaacatatctaaacatagaaaagatacaatttaaaaaaatgataaggccaggcacggtggctcacgcctgtaatcccagcattttgggaggccgaggtgggcggatcacgaagtcaggagatcgagaccatcctggctaacacggtgaaacctcgtctctactaaaaatactaaaaattagccggacgtggtggcgggcgcctgtagtcccagctactccggaggctgagacaggagaatggggtgaacctgggagatggagcttgcagtgagcgaagatcgcgtcactgcagcctgggcaacagagccagactccgtctcaaaaacaaaaaacaaagaacaaacaaaaaagatagaccggtttagggaaggcatttcccatgaagggagcttgcaggactggaagttgctttggctgagtcagggagtgcgtggtgagtgaatgtacactgtacactgctgtgggctttataaacactgcacacttaggctacactcaatttatacataatacttattttttcaataataaattagcctgagcttactgtaactcttttactttataaactttttagtttttaaaacattttttgrctcttgtaataacacttagcttcaaacacaaacactttgtacagctgtaccaaatttttaartttctttagtattctgtaagctttttttctattttaaaaattatttacttttgtctgtgttgtaaacttttttgttaaagacgaagacacaaacacgcacattagcctaggcccgcacagggtcaggatcatcaatgtcagtcctccacctccacatcttggtccaggaaggtcttcaggggcgttaacagacatggagctgtcatctcctaggataacaatgccttcttctggatacttcctgaagcacctgactgaggatgttttacagttaggcttgtttttttttgttttttttttttttgagatggagtctcactctgtcacccaggctggagtgcagtggcacaatctcgtctcactacaacctccacctcccgggttcaagtgattctcccacctcagcctcccaagtaactgggattacaggcgcccgccaccatgcctgggctaatttttatattttttagtagagacagggtttcaccgtattggccaggctggtctcgaactcctgaccacaggtcatccgcttgccttggcctcccaaagtgatgggataacaggcatgagccactgcacccggacagcttttttttttttttaataagtaaaagtacaccctaaaataacaattaaaagtatagtatagtaaatatataagccagtaccatagtgatttattatcattatcaattattatgtactatacgtagtgacatgtgctagactgtcatatgactggcagcttgtatgttgtttacaccagcatcactacaaacacatgaataatttattgcatgacaatgtcacaacagctatggcgtcaataggagagagaaatttttcagctctattataacattatgagaccaccaagtgatacgggaccaccaacatatacctggaccatcattgactgaaatggcattatgcggcacgtgacaatatttccaaatcaccttcccagatggctggatcaatgtttgkttggttggttgattggttccccatttaattcaacaaatagacyatatggagcctcttctgcagttctataaatttaactactcgtttctgcatttttattcatctaagtaatcattactaatacctactaaaattattcctactttcccacttcatcagacgggccttccctggccacccctactggactagcacctgagcctccttcaccttctgtgctcaccagctttagtcttctctgtagcactctgtcaccaaccgactcccacatttcctcatttctgtgtctttgtgtcttgtcagtctcctactctggcatataagcaccatgaaggcacagaccggctacagcattggctgggcctccctggagcctcaggctatgcctactgggacatgctatgcttctttcaatctaagtcggtccagactggtaggagagtgatttggcaagagagtgcaaaagccaagggaaaaaaaagaaagaatcgcctctagcctttgactcagtaatcacattctgggaatggatcctaatgcagtaattcacatgacccctggggatggggtggacaggaggtgttgccttccctctccctgtgtggggtctgaagccctgagggacaaggagtcactgtgccctcctcaaagatgccctcctcacaacgcaacatttattgtccaagtaccatacgagggactgttctgagtctgagcccattcagtccttttactcctttggagcttttttttttttttaacagataccgctttgtcacccgggctggagtgcagtggcatgatctcagttcaaatgcagccttgacttcctgggctcaagtgatcctcctgcctcagccccccaagtagctaggactacaagcccataccaccacgcctggctaatttttatattttttgtagagacagggttttgccatgttgcccaggctggtctcaaactcctggamtyaagcaacccacccrccttggcctcccacagtgstgagattacaagcttaagccactccactcaacctcttaggagcattttgaggcgcttcttacagatgaagcatgtgaaggaaaagggagttcacatcagttaatggtggagccaagatttgaacccaggccccctgactgcacaagcatgccctgaacctactgtacgactctgcctctgcagcagtgcaggacctgagtggtggaggtggcagggtgggaggtgtatccagacttacagacataaggcatcccgccatcattttgtttcatctgggacaagggtctactgttgtcctgaagtagtctcctaggtcttgatttcaattcaacaaaagggcatcaataaaacactcagtgcaaacttcagatactctactcatttcctcttggaagtgaggacatggtaaggcagagatggacttactgaggcctccagtgtgggccactaatacttgctggacgagtcaagctccttttggttctcccagctcggccattccctgcctctgtgacgctgggaaaatcacttctctgagccagggctttctcatctgtaacaattagcaggaaccacactgtacccaatcaataaatattactttcacaggggtaattgtcatggcgtaatttacactagcaaaaagctgtaaacaactgaatatccaataatggagaaatgactccattgcacaataatttcagaccagaactgtctaaaaccattaaaaattacattgaaaaattaacacaaaatgatatagtaaaaaaaatcagaggccaggtgaagtggctcacgtctgtaatcccagcactttgggaggcagaggtgggtggatcacttgaaaccaggagttcaaggmcagcccggccagcatggtgaaaccctgtctctactaaaaatacaaaaattagccacacgtgatggcacatgcctgtaatcccagctactcgggaggctgagacagacttgggaagctgaacctgggagggggaggttgcagtgagccgagactgcgccactgaactccagcttgggagtcagagctagagtctgtctcaaaaaaaaaaaaaaaaaaaaatcaggatacaaaaactgtaactacaatttggttgaacaaatattctgaaggaaagactccaaacagtaggtgtttatgggtgataagacaccagagtgacaatttcttccttacattttacatattttctgaatatttcacaagaagtttgcttttctttataacagacaaaagattatttacaaagttggtctcctttcattttctaccttattagtgaatgctttagcaagagagggtaggactagaagtggaaggatgggagatggggaaaggggagagctcagtttcaccagcatttattgagcatctggtacgtccaggcactgtgtagggtgtgacagctgagtgaaagctcaataaccaggcattactgtgcagagaagccaagggaatgtcacgttcaaaggtcctggggtgtgaaatagaaggcttataggagcacagaaagtaaggcccagggggagaggtgagatgtggttggcagttgggcaggctggaaatgccccagaggccctgtcagcttaatcaagggattcagattacatttttctttttctgagacggagtctcgctctgtccccgaggctggagtgcagtggcgggatctcggctcactgcaagctccgcctcccgggttcaccccattctcctgcctcagcttcccgagtagctgggactacaggcgcccgccaccacgcccggctaattttttgtatttttagtagagacggggtttcaccatgttagccaggatggtctcgatctcctgaccttgtgatccgcctgcctcggcctcccaaagtgctgggattacaggcatgagccaccgcacccagccaggattcagattacattttgaggaccttggagccacggaggatttttttaaatttttaattgaaattttattgggtgtattacgttctatacaattttatcacctgtgtggttttctgtatctcaagacactgaatagttccaccaccacaaagatccctcctcctgcctttgataactacacccccttcctctgacccttgccctctactgcccaccagagtcagggactgatcagtggggagggtaaggaggaggcaacggagaagaccccatatctgcctgggagagctcacaggagtcaaggtggaccgtgagttgcagtgccaagtttggggcttgccaggttagctacggccatgggaatgtccaggtgaaagtctttcggggccaatggatttaaatatccatggcttaggagagaagcctgggctggaggtgagatttgggaggggtttgtctcctcagggagtggagtaagagaggactgaggaaggagccgcctttcaggtgacagtctacttctgcacaggggtcccttgttttgcagctcgctgcctccttgggactggcaaagccctgctcttgcttaargagccctctctgtgcagagggctctcccagcatgcccatcccccacccggagcctcagagccaggcacaggaggtccttctgcacaatggccacgcattagctgtgtcctgttcagtccccaagcacagggcttgttaatcccagccctrccattccaggaaggaccccagaggtcacggaatccaaagcgttgaatttacaaagaagaaaactagtcctcggagaagaggcttggccaaggccatagacgtgatctgctggccgaaagggggctgtttatttactggttcaggatcggttttccccctacaggaaaagggaggtgaaacccaggcgagatgggtgcaagtttctgaacactttcattcggcagctttaattgagcgtgtattatgtgccarggagggccagggttttcgggataggaggtggacaaggcacgggccctaaggctggtggataaggacatcgaagggttaaattctgggacggctgcagggaggaaagggtagaggaatctcccgaggaaaggcccccttcccggcatctcaggctccggaaacccgggcgcgaggagcctgggaagggctgccccgcaggccttggcctcccccgcggagctccctctggccctgggagtggccgctctcgaattacaacaaaagaggccggaggccgggcctgctgcggcggccgccttcggggaagggggtgggtccggggargggtttgccatcctcctctagttaaaagtaagggggaaaagagtaaacgcgcgactccagcgcgcggctacctacgcttggtgcttgctttctccagccatcggagaccagagccgccccctctgctcgagaaaggggctcagcggcggcggaagcggagggggaccaccgtggagagcgcggtcccagcccggccactgcggatccctgaaaccaagtaagagcgcttcccgcgccaccccctccccgaagcggttcgcgagaaagcgggagcgtccctatggggtctccaggcttcgtcctgcgcggggctgcctctcgacagtgcctgggggttcccaaagacttcttgcggggagcgatgcgaggacgtgcaggctaacgggtcctcctgccgccccgggcggccccgcccaaccccacctcgtacgggccgggcrcggcgcggctgctggcgcgcccggggagcgaggcgctgggtccctggatcgtcccgagcgcccgtaatcaggcgggacagagcccgtcaagtctcggtgtgtgctgggcgtcttggagagtgcagcgtggctccagggacagcgtctccggaattctggctttgaggagtggggcacgcgggggacgggtcgggagacagtgactgccctcggggctgtggttttggggatgtagagcgtgctgggctgggacggagtgggggcggggaccccgggggctgcgcccgggagctgtagcgtccactgcttgaacccggttcaacccccagcctgctcgaaaggctgttgggagcgcgggagcgccgtgagtcctgcgggagcagaggcgctctcggcacgccaggtatgcactcccaagtcgccctgcctctccggggaccagggaccctctcccgccttcatcacctagaagccctggagttggaaagaacgggcacgagcgaacccacggctacagctgatcccaatcttgagccgttggtccggtggtctgaagtgcctacaacttttacgcaggcgctttgcccaccgcgccccttctcaccagcccaaatttggaagccctctgggtgtggctgcctgctcgaggtgtcccaggaatcagcgctggaatagagatgattgggagaacaagcgaggttccctcctctccgtgcccgagctaagaccatcaaaaaacagccggagtgcggggcggagcggggcgagggtgtgaggaagagaacaccgcagaacacggcgagggagggggctgaactactcaatatggttaggaaaccccaagtcctgatgaggggagagatgtgcatgacagaaacatgctccaaattagtttcgtccctaagatcttgaaactgcagagatctcaaaaacaatactttttttttttttctcccagaggaagaaaaacgctgaggctcacggtcactgagttagtcaatgtggggactgaaacccatacctcttactccaggcccctcccctacaccactgctagcctgtccgtcctggaaccccaaaacaacatttgtcatctttggtggaatgaattagttattgatggtgtatcatgtacttaatggtcagggttggggtttagggtggaagaggaagagttcatttccctggtcagttcccagataagtgactgactcactggatcctaacttgactaaatttttaatctttctcctcacctttgtcccgttcctcttcctggtccctagtatctgccctggaatggccaccagagccatgacaagatgcgtgctccccatgggccccagtggctaccaaggctctccccaaggaaattgagtctcactaatctgtgtgtgcacgcgcgcacgtttgtgtatgcatgtgtgcacgtgtatgtgtgggcacatgtatgtgtgcatgtgtgtgtctccacacgagtgtgtttgtgtatgtgtgtgcaccggtgtgtgtttatatgcgcacacaggtgtgtgtgcgcgggcacgtgtgtgtgcacgcaatgtgtgtgcatatgtattcctgtgtgcatgtgtgcacacctgtatgtgtatatgtgtatttgtgtttgtgtgcatgtttgcatgtgtatgtgtgtgtgcgcgtttgtgcacttgtgtgtatgtgtgtgcacgcatgtgtgcacgtgtgtatatgtatatgtgtgtttgtgcatgcatgtgcatttgcttccctgtaactttgtgttagaaagtgacttagtctaaggtcacttaggcattgagtggcaaagttgagtatgaaactcaggtctgaaaacaaaacgtacttaacaccacacattggctgacattttaagtatcacagataggagattctgcaaagatgcttccttttattttctttccaactggcctctcctggcctcttcccaagtccttgtcctttgacctctagatggccagtgtggaagggctttgtgaaggaaacagattttctgtgctctagatagacatgaccatcagcgaaggtgttgagtcccagaaaacactacattgtttattttttattctcaaaaaatttcaagtatgcaaaaaaagtagagagaagggtataatgatgcctcataagcttctcactgaatttcaacagttattttgccacatgtacgtcatctgtccctttgtttctgtcattgaagtagtttaaagcaaatcctatacatcatgtcatttcattgctacatatttcagtgtgatttctaaagattttacataactatgatgccatatttagacctaagaaaactaaaaaaaaaatatttggtatcatctaatgccaaatagcagtctatatttaagcatttcccaattttcctcaaaatgtctttttttatagttgatctgagttctgttgatttgtgtaacttgttacattcctattgttatgttcttcctttcaaactacttttctgtccactatgtcatttgattcttacaaggtcccactaaagagttaggtgagtattttcaaattcatttctcagctgaggaaatggataaacagataagctgtccagagggcacagctggtgacccagggagccagggtctaacccagcctcctcatggctgggcttcggtggttctggttctccatgttactcgtggactctcagctgctctctgaagagttcttcttggctcaggcttcatcctgggcttatcacttcctatacacctgctgtcagaaatccctgtgtaaatattagtaattggacatttggtgcttgagataaatgaactgcaaaatcaggaagccagggtttgtttcctagctcattgcaaaactgtaagggctcagagctgccctctctgaactagagagcagtgtacttcctcattatttgactccaaggtgtaaaaataggatgagtgaaatgactgttgctgggattcctggaagaaacaaaggccccagaaagaaatctagtagaggacaatctcccctctctgagcatcacctgagtactctgacagctggtaccttcatgctgaagccctcaaatcctatgacagagaagtaggggtatataggcttcccattgaagcccttagtttatgcatgactttattctgcatttgaccaatgaagatatgcaacacctgatatggcttggctgtgtccccacccaaatctcattgtgaattgtagctgtcataattcccatgtgttgtaggaaagacccgatgaaaggtaattgaatcatgggggtagatctttcccctgagaagtaaatctcgtgagatatggttttataaatgggagtcccctgtacatgctctcttgcctgccaccatgtaagatgttcctttgctcttcctttgtcttctgccatgattgtgaggcctccccagccatgtggcattgtgagtccattaaacctcctccctttacaaagtacccagtctcgggtatgtctttattagcagcatgagaacagactaatacaacaccagagccttctgcttttagcattttcattacttaagtttatttgcttttgaaatggagcgaagaagaaatttctccaccttgttaatgagactcataagttggaattctcctttcttggcagatcatgtgggaaaaaggaatctcttggcacaggactcctagatgttctgctgttacgcttgttgctttgaaacagggaatgaacagaccttccataaaatagccagttagaggcagagaaactggtcaacccgattccatccaacgggaggaactccgaagtggcaagacattaaccttaaatcaccctgccttctgacggccatagattctttttccttagctaataggctgtctccatggaggaagaatttctaggtgattccacaccagcagctgcagttgcacaagcatgactgcttccttcattttaaagtttggggagccttaggaggtgttttagtccattttctgttgcttataacagaatacctgaaactcggtagtttattaaacaaaaggaatttagttcttacagttatggagactgagaagtccaaagtccaggagctgtacctggtgagggccttcttgctggtggggacttggcagtatcycaaggtgatgcaggaccatcgtgagggggctgagcatgataacatgctagctcaaktctcttttcctcttgtaaagccaccaattcccttcccatgataaccgattcatctattaattggtgaatggattcatcagtttatgagggcagagcactcatgattcaaccacttcttaaaggccccayctctcaaaactgccacattggggattaaatttcaacatgaattttttggagggacacctattcaaaccacagcaggagatatgatttcccattcccaggggctgcctggctttaaaagagcagcttgttactgtcatcgtccatttccccctggagaaaggcttttgtggtcggtctgcatggcagtcacaccctgggtggtccatgaggcctcagatgaagtggcccgaggccactctgctctaggcccacagacaaggcgggaatagcagttgcaggctagaaaaggaagggccaaccagacattcacagagatgcaaccagagcaacacacagctgagtctcttaagtcttcagtcctgtgtaagttgaagcaagacatcagaaatctctcacctgagtaattccacacatgcacccactgctgtccaatgcagtgcttgctcagcagggagcacctcttggccaagcgtattggcagcccttctaccgtgaccagcgtcagggacgtctctaggcgccttttcagaatagctggcaacatagggagacccagtctctaccaraaaaaaaaaattagccaggcatggtatagtcccagctactcaggaggctgaggcaggaagattgcttgagcccaggaggtcaaggctatagtgcattccagcctgggtgacagagtgagaccctgtctcaaaaacaaagaaagaatagccacttggttgatgatgataaaggatgctggggactgtgtagttcagacttctgtccagagttttaacaaatcttttgcactttctgtggcagaaataatattaccaggcaagtagtgtgtgtggcagatgagaacaagaactaactcagcagatgctgaggttgtggttaggaacacagttagtaggttcttcttgtccagggcttttgatcccttcacttgggataccttaagtattatatttaattatagtcttctaagcaaagagtgatgttttctttttagttttttcattcctacgatccacgtcagacaagcagacacagctggccctctggatgtcctgtggcaacagacatatcctccttgatgtgttgccaacaaagtgctgagggtatcttctgcaaaaatgatgccacttgcctataaaacatacacttacgacaagataacttatggtgatgacttgtgaacaacttaatttgcagtttctttataatatctttctggaacttggatccatgaacttcttttgcccccaggcttgtcctgatataccactggggtaccaaggtaaacacrgtatagctcttcagagtgcctgcatgactcgaagatgtagtgagaaagatacttttctaaatatctttctaaaacaattacaaatataaaattgagtaaagcacatttcttttttttctttttttttttttttgagacagagtcttactctgtcacccaggctggagtgcagtggtgcaatctcagctcacggcaacctccaccttccaggttcaagagattctcctgcctcagcctcccragtagctgggattacaggcatgcaccactatgcccacggaaaagcatatttctttcttttttttttttttttttgagacagagtcttgctctgttgcccaggctgggagtgcagtggcgcgatctcggctcactgcaagctccgcctcccaagttcacgccattctcctgcctcagcctcctgagtagctgggaccacaggcgcccgccaccatacccagctaatgttttctatttttagtagatacagggtttcaccgtgttagccaggatggtctcgatctcctgacctcgtgatccacccgcctgggcctcccaaagtgctgggattacaggcgtgagccactgtgcctggccggaaaagcatatttctaaagatgatttcacccaccccaagaatagcatatctaggtaaaatcacatgatcctaagtatatacccacataggctttttgggttgcttttgtgtttattgtggtaaaatatacgtaacataaaactcaccatcttaactattttcaagtgtacagtgcagtggcgttaagtgtgttgacactgctgtgctaccatcaccatcagccatctctggtacttttgcatcttccaaaacagaaactctgtacccattgaacactaactccrctctccccctccgaccaatccctggcagcccccattctactttctgtctctgtgactatgactgaactaggtacttcatataagtggaatatattatatttgtcttttcgtgtctggctcattttacttagcatggcttccaggttttttcacgttgtaacctgtgtcagaatttccttccttgttgagcctgaataatatcccactgtatggatagaccacatttgtttatctcctcctccactggtggacatgtgagttgtttccaccttttggtgactgggaataatgctgctgtgaacattggtgtacaaatgcctgttatggatgaacttttacaaagtgaacatgcccttgctactacatcaagaatagaacattagcaagaatgcatgaatttaaaggcaaagcaggagatttcaaatacgtttcatgcccaaacatggctgcttcaattacacctcaagatcttgggactggatattgattttctctaccatgagggggtttggaagagatatttgaaagaacacagttaataatctgtgatttgaaagagtcagtttataatcacagattagttatgagatttaagtagctcctttccttaaaacgtctagggatgggagtacaacctgttgagatttgcaattgtagctgtgttagggtatcaccactaggatcattccaggctgccccttggccattgtagggttcaaatccacctggagaactcctgcctttctggcagcttctgctggagcacaagtctaagcccattctttggccgtatcctgcctgccctcctcatttccttcctccctccttcccttcccacctgatctctctctcgtttttttgtttgtttgtttgtttgtttgtttgtttttgagactgagttttgctcttgttgtccaggctgtaatgcaatggcacgatttggctgaccgcaacctccacctcctgggttcaagcgattctcttgcctcagcctcccgagtagctgggattacaggcatgtgccaccacaccctgctaattttgtatttttagtagagacagggtttctccatgttggtcaggctgctcccgaactcccgacctcaggatcctgccgcagcctcccaaagtgctggaattacaggtgtaagccaccgtgcccagacttctctctcttcttaagtagaacgatttatcagtgactctaagagtttatgtgtgtatttagaaataaggccaggcacagtggctcacacctgtaattctagtactctgggaggccaaggttgggggattgcctgagctcgggagttcgagaccagcctgggcaacagggtaaaaccccatctctactaaaaatacaaaaattagccagtcatggtggtgcacgcctgtaatcccagctactcaggaggctgaggcggaggttacggtgagccaggattgtgccactgtgctccagcctgggcgacagagtaagactctgcctccaaaaataataaaataataataataaagtcttcagtcaagagtaatattttgatgcctggcaaccacccccaggctgcctgcatgacactttcaagtgtcatcgaagtagattcttttttaaaagactttattgagatataatttgcatatcatccaattcacccattaaaatgtacaagtcaatggatttcagtatattcacagatatgtgcaaatatcaccccagtcaactttaaaatgttttcatcaacacaaagagaagtccatatccgttagccaccaccgcctatcctcccagccttaaacagccactaatctagtttctgtctctatattgccaattttgtataatttgtgtaaatagaatcatataatatgtggttttttttttttttttttggtctggcttttttcacttcccttaatggtttttttgttgttgtttctttgttttgttttgttttgagacggaatcttgctctgtcaccaggctggagtgcagtggcgccatctcggctcactgcaacctccgtctcccaggttcaagcgattctcctgcctcatcctcccaagtagctggaactacaggcgtgcgccacaatacccagctaatttttgtatttttagtagagacggggtttcaccatgttggccaggatggtctcgatctcttgacctcgtgatccgcccaccttggcctcccaaagtgctgggattacaggcgggagccacggtgctcccctaatgtttttaagcctcaccatgtgtcagtatctcgttactttttatggccgaataatattctattgtatgggcataccgtattttgttaatccatttatagttgacagacatttgggttgtttccaccctttgagtattatgaataatactgctatgaacattcatgtaaaagttttgtttgaacacctgtttcaatgtgtttcaattttgggggggtatatacttaggaggggggttgctgggtcatatagtaattctatgtttagctttttgaggaatcaccaaattgtttttcacagtggctgtagtattttacatttccactagcaacgtatgaggattctaatttctccacatctttggggacactttttattttccccttaagaaaattccagccacctttatgggtatgaagtggtatctcatggtactttgtgtttgcttgatgacgagtgatgtatcacacctttttatgtgcttgtaagccatttgtatgtcttctttggggaagtgtctatttaagtttttgcccatttttaattgggttggttgtctttttttttttttttttttctctgagacagagtctcactctgtcacctaggctatagtgcagtggcacgatctcggctcattgcaacctccacctcccgagttcaagcgattctcctgcctcagcctcccgagtagctgggactacaggcacgcgctaccgtatctggctaatttttgtatctttagtagagacaaggtttcaccatgttggccaggctggtcttgaactcctgacctcaggtgatccgcccacctcggcctcccaaagtgctaggattacaggcatgagccaccgtgcctagcctgggtttcttgtctttttattgttaaattataaacaatttttacatattctgaattctagaccattgcagatatatgatttacaaatattttctcccattctgtgggttatcttttccctttcttgacagtgtctgttttctttccagttcaaatcacatttattcaacgtctattctgtgttgagcacaggggatccagaagtgtataagctacagatgcttaccctctagagggatcaccagcttaaaagagaaacagacatgcaaatagacaatgacaaaacagtagaataagtgcgataaatatttggtcatcacccttttttctcaccctcaccactgctgccctggttcataaagcatcttcaaaacatttttttttgatgtgcagaagtttttttattttgataaagtttaatttacgtatattttccttttgtttcttgtgcttttggtgtaatgtctaagaaatcactgccaaatccatgaagacgtactctatgttttattctaagggttttacagttttagcttttacattaaggtctttgatccattttcatttatttttgtaaatgctatgaggtcgggccccaacttcattcttttgcatgtggctattcagttgttccagcactgttttttgaagacaattctttccccattgaatggtcttgggaccttgtccaaaccaattgaccatagatatatgagtttatttctggactctcagttttatctcattgatctatatgtctctccgtatcccagtaccatactgccttgacttttgtagtaagttttgaaaacaggaagtataagtcctcttacttcgttctccttttcagaattgttttggctaatctgggtctcttgcacttccacaggaattttagaatcaatcagcttgtcaatttctgcaaagaagtcagctgggattgtgatagaaattgtgttgaattcgtagatcaatttgaggagtattctcatcttaaccatttaagtcttccagtccatgaacatgggatgttttcccatttatttagatcgtctttaatttcttttaacaatgttttgtagttttcagggtataaagtttatatttcttttgttaaatttactcccaagtattttattatttttgatgctattgtaaatgggattgctttatttcattttgaatttttcattgtgactgtatagaaatacagttaatttttgtatgttgatattgtatcctgtaaccttgctgaactcatttactggttttgatagttttttagcagattccttaggatgttttatacacacacgtgagtcgattcttaaagagtaggtgttcatgaagtggatatgtgatgttctagaacaggaaatggcaagtccaagggcaggggggtgtaaaagcagttggaaccacatgtgcacaggtcagcatggctgaagctcagggtagcaggttgaagctagtttgtgtcatgctaaagaggatggagacatcctgtcactggtagtgggagccatgccagtctggagatggagtaagactattagaatcattctttaaaaagaggcccagaagaggcatgtgatcagcaccaatgaaactgatcagcttcacaagtagctgacaaggtctgtctccctcagtaaaagcgaggacctgcaggtctctctctatatgccactaccctgtggatgacattaccttgatgaatggtccctggtgacccagcaccagctggcattgtagcagccaagcccggccagcttcagtgatgtgacacttgatgcctgctgctattgctccttaggcttctggacaggatccagatcatgggctcttagtgaacttcagaccagcactcctacctgactgccttatggagccagaaatttccagacaagctgaaaatgtggctgtggtctctgtgccagctgcccctgccatcactgggttctctgggtttggctgtcataggacaagcacaggcctaaaggattgattattagcccaggttgcattgcttggatgacagcttggcctggcagcttctggagatgcgaaaggtatacagagccaagggcgaggtctgctgtcatgagcctcacatgaggcatgtgacaagctaagcaggaagggcatagggaggatgtcacttggggactgagctcagaaggtgcctctctggccacttttgatgggtcatctcagaaaaactggttttgtactccctccagcccaggattcccaccatctttcacccagtacactcatcttatttccaaccacccaaacccctcctgacctcagtgtytgtgcctaggccaaatctcagcactccccctccaggaattttcatgccacgggccccatccctataatccctggacttgcttgcagtgatttcatttcctaycaagcttgcatgccattttggatttggcttctgttcaccttccccttgcctgccttttgtggacttcaatatcgccttgaaagtggcacagaaactcagaccratttggccatagattattagctctgagaaacagtgtgtctgagagagtgtgtgtgtagtgggggaggatgattaaagcctgttacccaagagtgcttgatgggaatgatgatacgcctcctggattttgtccagattgttgctgattttataattgtggtgactgagccagtcactatactgggcactttaacttctgatgtagcccgtgaagaacctaaaactcttccccatttgcagaagccagatttgaatctgagaccactctcagatgctggccatgtttttccaattgttatgtgttatcttatagtcaaaccatgtctcttgttttgttgttgtttgtttgttaaggktgtagggatcgggtaatatgaacccaacaggcattgatatgatttggctgtatccgcacccaaatcttatcttaaattgtagctcccataattcccacatgttgtggaagggacccagtgggagataattgaatcatggggcaacttccctcatactgttcttgtggtagtgaataagtctcacaagagctgatggttttataaggagagacccctttcgcttggctctcatattctctcatgtctgctgccatgtaagacgtgcctttcacctttcacctttcacctttcaccttccaccatgattgtgaggcctccccagcctcatggaactgtcagtccattacacctctttttctttataaattaccccatctcaggtatgtctttatcagtagtgtgaaaacagactaataaggcatccttgtctctatcactttctgaattgcctttaagcaaaatcaccaattttggattttccctgcccctttatgagctgcagagaagagatgtgtcttatagactaatgtatttggcttttgcactctgatccgatctgagagtctctggtaggcacattttaaagtctttgaaactgtaccttcagccttcccaggaaacagcctggtcagaatgagattccacccagagccagcggtgggctgcggggaacccccattggtcacaacaaattatgccaacaaagacctctttttggaggctgggggaaraaatgcagttttgtatgcttaccttctcaccatctcactgtgccctgaacattcccactttgtggccagaaatagacgagactgaagtagactctttggccaggggccaagtggatcagacagcccggaccaagcctggtgttaaagtctccattcttgtctaaggtggttctaaagggtcccatggcccccgagccacttccctcattctctgagcaaaccccattcagccaagacagcctgtttccacaaaggaatgtgttccccgtggggccagaagcagccccagaccacagctgagatcgccactccacagtgtgctctgggccatgaatgaggaccattcatctctcctgttggtccaagcaggaatcccaggcagggagggtctgatggaggagagagaccccaccctagcccctgaccccaaatgtgaatgcaggcatctggcagaaatgtcaagcggaacattctgtctggaaggaagaaattcagccgagctctgggccacactgttgcaagcaagtgtccttggcagggtagggcactgttcctggctgagaactgccaggttgtttatgagatgcttcaaatccggggcaggcaggactgttgctgggagctccagggcacaagatgtggagccagtgctgggaggaatgaatcacttccctatttactgggggcctgccggaggccaggcaagcaaagtggggtcccattgaagcctgctttgtgagagtcctatgccccacatactcatattagggaaggggacagttatgagcatcacatcaggatcaggttgtgtcagggcacttgaaaatctaaaagcatgatgtccaaacactgtataatttttacaatgtgttttcccctttatctgtgcatgactaggaatttttattgctattggcaataaaaacaattgttgctattgactaggaatcagttagtcacatggggcattattcgactgcgtgccacaaggtcaagtgtcattgatcagaggtcatgttctgggtttctcctgtgtttaagaatgaactaggaagccaattgtccttgattttccagaaggtaccattaagcaggtgaattctataacacagaatgcctttttaggtggatgatgaaatgattcaaaacggattgcttttggaggaagaaaaaaatttcagtagcttcaataaaaatcttgatactggagagttttttggagtaggcctttcacattccttcctaggcagactgactcagctatcaaggtagtagcctaagaaaaggacactaagaaaaggaccctagaaaggccagttttacattttcttcttttcctctgttagctctgctgggtcaaaattaagtgaggcttcatgaaggattttcaaacactcatccattatcaggacaatactactactgggataagaaaaatcagggattctggagtgtagcagaaagttcttagggtgacaggtgcttcaagrgctaacaatgtcttccaatgaatgatgcttgttggacaattgtaacagtactgcttatgaccaactcagaaccttgagtaagttcaaggttctgaacctctttctctccctccaacccagccctcttccccagctctcagcaagatcagcaagcactggctgatacaagccctgcttaaaagtctttttttcccctaccctccttaaaagctttacttgcagacttggcacaattttgcacatacctaatgtatacagtatatgagaagacacctttttatttagataattaagctttttgctaatattgtatattctttggagtaaatgtacatttctagtgtgtgtgtgtgtgtgtgtgtgtgtgtgtgtgtgtgagtatattttttgctttttgtttttgtttttcttggagacaagtcccagctctgtcgcccaggctggamtggagtgcagtggcacagtcactgctcactgcagcctcaacctcctgggctcaagtgatcctcttgcctcagcctcccaagtagctggaacaataggcatttgctaccatgcccagccaattaaaaaaaaawwtttttttgtagagacaggatctccctatgttgctcaagctggtstcaaacccctgagctgaagcaatcatcccaccttggcctcccaaagtgccaggattacaggcatgagcacccagcccatttctaaattttaagttgttgcaaggtgcgggatccagaaggaactacctaggctcagccttggcagctcacagttccccaaataacacctggggaagctgaagatcaaaattaaatgtaagcaactgcattatgcagcttagtatcactcaraactgtagttggtgcctgaataacctgactcgaatctagcaggcagcacctgtttgaaccaagatatattagctgctatttttattggccacctgctatggtctaggaacttaagacgcatgatctttgatttttacaacaggcctgaaaagatgtttcatatttttccttaaaaaagtttttttgtttgtttgtttgagacagagtctcgctcttgtcgcccgggctggagtgcaatggcgtgatctcggctcactgaacctctgccttccgggttcaagtgattctcctgcctcagtctcccaagtagctgggattacaggtgcccaccactatgcccagctaatttttgtatttttggtagagatagggtttcaccatgttggccaggctggtctcgaactcctgacctccagtgatccacctgcctyagcctcccaaagtgctgggattacaggcatgagccaccgtgcctggcctaaaaagttgtttttaagtacatattgtttccatttggtagatgaaatcctgagacttagaaaaatctaagtgggcctaggtcacagagctaataagctaagaaataagatttgaaccaaattctgcatgactaagccgctagtccatgccgtttatggtcagtaaagaggtggcagagcatcccgcctgtttttcctggaagggtgtgctgtgggctgtctgagtgggcccctgcattgggaggtgcccgagaccctggggagggtaagctgatcccacctgatgtttataaggaatacctcgatccccgagtccctctaatgtgaaggaattctttcctgatctctstctgataccccccgaggacacagtgcctcttgttggcaaagcttatactagaatcatctgtgtgaatgttgtaaccttgaatggactgcattgaatgtaagagggttctcagccgtgcagtcaaaagcccagtgagaccatattgggggataatttctccctttctgaagagccaggcacaaccaacttttcctggcagtctctggcttttatttgtgtcagtcagagacttcagtccttcggcaccttgccttgtccctttaattacgacccactcctgggctcaactgtgtgaataattaaggccatctgccacggcagctcccagacctcactcaaactaggtttgaacaggatactctccaaggtgggcctctcaccttgacttatgcctgcaatcccagcaccttgggaggccttccccttgcggacccttgcgtgcctgtgaaagccgcatttatttggagcgtgtggagggagctacggagatccttggcctgattctcccatgttctgctgacccagttggcagatgctctctgcttgcattcagcgtagaggagggtcctggaatttccatgatgtggactgaggtgacttcactggagcagatgcttcttagactgtcaatgttgagacacccttggaggtcttccaaggtgaatgctgagaatagatctgcctgttttctaaaaactctccccactgtggtatctccaccaggcttttttatttcttttgtgaaattaagatctctgagcaaggactaatagaacaggtatggagaagagaaatgtgtctgccatattagtctagatgtcctcaaatgtctggaagggtagatggagaacttacatatttgtttattctaagacatcgtaagagacacagagcacttatattttgttctctttctttcttttttggagagggagtcttgctctgtcgcccaggctgtagtgcagtggcatgagctcagctcactgcaacctccacattcagggttcaagcaagtctcctgcctcagcctcctgagcagctgggattacaggtgtgtgctaccacgcccggctaatttttgtattttttagtagagatgggatttcaccatgttagccaggctggtctcgaactcctgacctcaacaattagtgaataagggtgtctgctctggtatctggctggcctggttacaaattccagcttgatcactttttagcagtgtgactataggaaaatcatgtagcctttctgtctctcggtttttccttaggaaaatagggatgctgataataccttgctcagggggttgtccaaagctgtgttgtgcagtatggcagccaccaccatatggggccaccaaacacttgcaatgtgctgcttggaattgagatgcgctgcaaacgcaaagtacgtgctggatttcaaagacttagtacaaaaagaaaaaagaacgcaaaacatctcattaataatttttgtattgattccatattgaaatatattgcatcaaataaaatatatctttaacattgatttcatctattttattctacttttggaaagtggctacgagggaatttaaaatttcatatgtggctctcattacgtttctgttgggcagtgctcatccagacgagaggatgaaatacctgtcttagcacttctcacatgctgattgatactgatcaaaatcagattgatactgattaatgattaataaatataagttctgttttacttttaaacatccaactttggctgggtgtagtggctcatgcctgtaatcccagcactttgggaggctgagccgggcggatcacttaaggtcaggagttcaagaccagtctagccaacatggtgaaaccccttctctactgaaaataccaaaaaaaaaaaaaaaaattagctgggtgtggtggtgtgtgcctgtaatcccagctacttgggaggctgaggcaggagaattgcttgaacctgggacgcagaggttgcagtaggccgagatcacaccactgcactccagcctgggcaacaggagtgaaaagctctgtctcaaaaaaaaaaaaaaaaagaaaaaaaatccaactttctcttccacagaagcccaccttcaacaccagcccatgtggtgtccaggttgctgtataaaagtagaggtgatcctgttcgaacaggacgggggcgcagggagtggtaaataaatacataaaacaggcagagaataggaaagtctttatatccatgttgaaggaaactgctgtggaattgctccctccagtctttgcacgataaaattaccagaaccccaaaggttacagcaaattgcctctttgcaccttctaattcactaattcactgtccatgttgaatgctgggaaagctggaggctttttgtttgtttgttttcttgagacggagtttcactccgtctggaatacaatggtgtaatcttcggctcactgcaacctctgcctcctgggttccagcgattctcctgcctcagcctcccaagtagctgggattacaggcacctgccaccatgcccggctaatttttgtatttttagtagcaatggggtttcaccacattggccaggctggtcttgaactcctgacttcaggtgatccgcccgcctcggccttcaaagggctgagattacaggcatgaactaccacgcccggccgctggagccttttaagttactccctccttctgccttcctgagacatctatttggaaatggactcagatagggaatgaagtctgtccaactcctcgagcctcctgaaccagctgcaggtattgttggaagtaagctgagtggacttctaggaggaggtgagacttgaggaattgccgttccctgttggttctgctgaagtaactgcaggtagcctgttctcccctctgtgtcagcaacgctcactgcctcaggccttgacagcccctctggagcacccatgtccagcatgtgtttagaggctcatttccttcagggcaagcaggtgtgtgcagctgagctggcacgttgccttggaagtcagctgtgcttcgctgggatcatgccttgctctgcacctccttggtccaaccttataacccataattcctgtctagacataagccttgattatctgctagggtgagattttctgatcccagatcttcgtatcccataaattacctcgacatttgcctactgcctttactatacaagtgaatttcagaggcaaacaggtatgtaggcgagctgttttgaagggcacgggtcaggtccaactactcatgaaaaatcctaacgttcttacttctagccttgcacaataggtaaaattcatatctagaaattcacatcgggccgggcatggtggctcacgcctgtaatcccagcactttgggaggccgaggcgggcggatcacgaggtcagcagatcgagaccatcctggctaacacggtgaaaacccgtctctactaaaaatacaaaaaattagccgggcgtggtggcgggcgcctgtagtcccagctactcgggaggctgaggcaggagaatggcgtgaacccgggaggcagagcttgcagtgagccgagattgcgccactgcactccagcctggacgacagagcaagactctgtctcaaaaaaaaaaaaaaaaaaacgtaaaagtgccctcttagaaataactaatctattccttaagccttaaatgtcttaatatgaaaaatgacaaggaatgaatttgttagcttgcattccaatgtaattaggtcagagggaaaggtagtattgataggatgtgaatattggaatagaaatttatatttattcactcggccaatatttactaagtatgaagcacagagctccgcaatcaggttctaggttcaaaggaaggaaagaagcaaattaacatgactgattcgatgctgtgtgctagggatcttcacattatttcatttaaccatcatacacacacacacacccataaggtaatttctatatttggaagaagaaattgaggctcttaatatagctaggaagtggggcaggcaggattcagacagcgtgttctgattccaagacacccaacatcacctctctagggaagccctggcgccagtaagttcctcaaggaggagggttgtggagaggcaagagggcccacacgatggaagacgggaaggccacaggtcccactctactasccctttgacctaggcttatagggtcgagtttgtttaaaaccgctacggagaggcatgttaggtaccagaggaccaccaggtcagatcagctgggtgtgggtggagcagccctggagaagtcagggcccagagtaaacacacatggaattgagggtgggagcaggtgtttggggtgggttcagccatgctaatcgggtacagtcacctccaacagatgcagcacgtagagagaatggtccaccccagagaagagcatcatcagacagtcttgaaagatccaggcaggaagcattacggagttctagcagcagaatcaggaccaggaccactgatgttggagcagggtttccagagagagggattcaggtcctagacagactgaccagagcagggcagaaagacacagtttagcccataataatagtcttgttcacctaggacttttaggacttcagtggttctataaaggcccagaatagggctcccacctcctgggaaaaagtgaggataaagtcagaaagtttctcctctgctttgccactgtgttcattygctgattgcacttttttttttttttttttttgagatggagtctcgctctgtcacccaggctggagtacagtggcacgatcttggctgactgcaagctctgcctcccgggttcaagcgattctcctgcctcaagcctcctgagtaactgggactacaggcatgtgccaccatgcccggataatttttgtaattttagtagaggtggggtttcaccatgttggtcaggctggtcttgaactcctgacgtcgtgatctgcccgcctcagcctcccaaagtgctgggattacaggtgtgagccactgtgcctggccgctgattgcattttatcacaggtcagaatgtgtctacttcacagagataaaaactgaaaaaggggacatggttttctgggtgtaatggagcccactcattatggcaaccgaactataatctcagaacttctgcctgtgctcattccagctcctttgtgagctctcagttgtttataaatgacactgtggctgtctccagcatcatcagcaaggctgtggtttgcctggtcccctctgctgtctttcccagaatgaggggtctactccgagccatgcatctcctgttattatccaacccattttaattaagcagctaacgtgcaccaggcactgtgttaggcttgggggcccagtcaggtgcccattcacctataacacccacttacgtgtgagcaatgtaagcagagagaggggacaacattggtgcccatggagcctggcatggcctcgccgtccccatcctgacctgcaggaggcagcgcggtcacccagaaagcctggcagtgtttcctccctgaggttggaaggataccaatgtgaaaaatgaatcttacaaagcaacaagggaaaagctcaatagaaaaaggggtataaggcagggagacataatctccaaaaaagaaatacaggtggccaataagcacggggcaagggagagaaaaagctccacctccttagtaataaaaagaatgcttgttaaaacaaaatacccttttttgcttatcagatggaggaaagtttgaaaacatggtcatagccagagtttttgaggtttgggggaaacctacatactgctggtggaggtttcaattggcacagtctttctggaaggcggttcatatagttttgcaaaagtgttgattttgtacaaaccctttggcccagcaatttcacttttaggaatttataccaagattgtgccaagtttcagctacaacaatgtttacagcagtaagaaatttagaaacttgattattatgtatccataagattgaatactatgttataaaaatcttatgaaagaatgttccataaagcataatgtttgcaatatgctgttcaatgtgaaaagcagtttacaaagcaatacgtagaaaatgattccaatttttaaaaggaaatgtgtacaaaaaaaaaaaaaagactggagaggtttacaacacagttttgatcatggttacccgccccccagtggtattacaagttattttcttccttttattttatttttctgagacagagtctctctctgtttggagtacagtatcacaatctcggctcactgcaacctccgcctcccaggttcaagcaattattttgcctcagcctccctagtagctgggattacaggcgcttgccaccatgcccagataatttttgtatttttagtagagacagggttttgtcatgttgtccaggctggtctttaactcctgacctcaatcgattggccaccttagcctcccaaaatgctgggattacaggcttgaaccactgtgcccagcccttattttcttcctttcacttgtttgtgttttccagattttttttcaccagcttgtgtaactttcactataaagaacaacaacaacaaaaaaaaactttaagagtaatttttaaaagaagagaaaagcagctgggtttaatatgttacaatcccccagaggagggagtaggagagggccctacaaaagcggcaaaaaattcaggagcgctgttctagaaaagatttaggagttgaacactaaagcattcccacagattggacaatccaggaaaatgggtagagcagtttacagatatacaaatccacagattaagatgtctttttcttttttttttttttttttttgagacgkagtctcgctctgtcacgaggytggagtgcagtggcatgatctcacctcactgcaacctccgcctcctgggttcaagcaattctcctgcctcagcctcctgagtagctgggactataggcacacgccaccatgcccagctaatttttgtatttttagtagagatggagtttcaccatgttggccaggatggtctcgatctcttgacctcgtgatccgcctgccttgtcctcccaargtgctgggattacaggcgtaagccagcacgcctggcctaagatgtcttttaaaacgttgcgagggggcaattccaagatggccmaataggaacagcttcagtctacgtctgccagygtgagcaacgcagaagatgggtgatttctgcatttccarctgaggtacttggttcatctcactggggctcgtaggacagtggggtcaggacagtgggtgcagcccgcagagtgtgagccgaagcaaggcgaggcatcccctcacccaggaagcgcaagggttcagggaattccctttcctagtaaagggaagggctgacagatggcacctggaaaatcatgtcactcccaccctaatactgcacttttccaatggtcttagcaaacagcacaccagcagattatatcccatgcctggctcggggggtcccacgcccacggagcctcactcattgctagcacagcagtctgagatcgaactgcaaggaggcagcaaggctgggggaggggcgcccgccattgctgaggcttgagtaggtaaacaaagggactgggaagctcgaactgggtgcagcccaccgcagctcaaggaggcctgcctgcctctgtagactccacctctggggtcagggcatggccgaacaaaaggcagcagaaacctcagcagacataaatgtccctgtctgacagctttgaagagagtagtggttctcccagcatggagtttgagatctgagaacaggaagactgcctcctcaagtgggtccctgacccccgagtagcctaactgggaggcaccccccagtaggggcagattgacacctcacacggctgggtacccctctgagacgaagyttccagaggaacaatcaggcaggaacatttgctgttcagcaatattcgctgttctgcagcctctgctgctgatacccaggcaaacagggtctggagtggacctccagcaaactccaacagacctgcagctgagggtcctgactgttagaaggaaaactaacaaacataaaagtcaaccacaccacaaaaccccatctgtatgtcaccatcatcaaggaccgaaggtagataaaaccacaaagatggggaaaaaacagagcagaaaagctgaaaattytaaaaaccagagcacctctccccctccaaaggaacacagctcctcgccagcaatggaacaaagctggacagagaatgactgacaagttgagagaagaaggcttcagacgatcaaactactccaagctaaaggaggaagttcaaacccaacacaagctaaaaaccttgaaaaaagattagatgaatggctaactagaataaccagtgtagagaagtccttaaatgacctgatggagctgaaaaccatggcacgagaactacgtgacgaatgcacaagcttcagtagccgtttcgatcaaccagaagaaagggtatcagtgattgaagatcaaatgaatgaaatgaagcgagaagagaagtttagagaaaaaagagtaaaaagaaacgaacaaagcctccaagaaatatgggaytatgtgaaaagaccaaagctacatctgattggtgtacctgaaagtgacrgggagaatggaaccaagttggaaaacactctgcaggatattatccaggagaacttccccaacctagcagggcaggccaacgttcaaattygggaaatacagagaatgccacaaagatactccttgagaagagcaactccaagacacataattgtcagattcaccaaagttgaaatgaaggaaaaaatgttaagggcagccagagagaaaggtcaggttacccacaaaaggaaacccatcagactaacagcagatctctcagcagaaactctacaaaccagaagagagtgggggccaatattcaacattcttaaagaaaagaattttcaacccagaatttcatatccagccaaactaagcttcataagtgaaggagaaataaaatcctttacagacaagcaaatgctgagagattgtgtcaccaccaggcctgccctacaagagctcctgaaggaagcactaaacatggaaaggaacaaccagtaccagccacttcaaaaacatgccaaattgtaaagaccattgatgctaggaagaaactacatcaactaatgagcaaaataaccagctaacatcataatgacaggatcaaatttacacgtaacaatattaaccttaaatgtaaatgggctaaatgctccaattaaaagacacagactggcaaattggataaagagtcaagacccatcagtgtgctgtattcaggagacccatctcacgtgcagagacacacataggctcacaataaagggatggaggaaaatctaccaagcaaatggaaaacaaaaaaaggcaggggttgcaatcctagtctctgataaaacagactttaaaccaacaaagatcaaaagagataaagaaggccattacataatggtaaagggatcaattcaacaagaagagctaactatcttaaatgtatatgcacccaatgcaggagcacccagattcataaagcaagtccttaaagatctacaaagagacttagactcccacacaataataatgggagactttaacaccccactgtcaacattagacagatcaacgagacagaaagttaacaaggatatccaggaattgaactcagctctgcaccaagcggacctaatagacatctacagaactctccatcccaaatcaacagaatatacattcttctcagcaccacatcgcacttattccaaaattgaccacatagttggaagtaaagcactcctcagtgaatgtgaaagaacagaaattataacaaactgtctctcagaccacagtgcaatcaaactagaactcaggattaagaaacccactcaaaacygctcaactacatggaaactgaacaacctgctcctgaatgactactgggtacataacaaaatgaaggcagaaataaagatgttctttgaaaccaatgagaacaaagacacaacataccagaatctctggtacacatttaaagcagtgtgtagagggaaatttatagcactaaatgcccacaagagaaagcaggaaagatctaaaattgacaccctaacatcacaattaaaagaactagagaagcaagaggaaacacattcaaaagctagcagaaggcaagaaataactaagatcagagcagaactgaaggagatagagacacaaaaaacccttcaaaaaatcaatgaatccaggagctggttttttgaaaagatcaacaaaattgatagactgctagcaagactaataaagaagaaaagagagaagaatcaaacaratgcaataaaaaatgataaaggggatatygccactgatcccacagaaatacaaacaaccatcagagaatactataaacacctctatgcaaataaactagaaaatctagaagaaatggataaattcctggacacatacactctcccaagactaaaccaggaagaagttgaatccctgaatagaccaataacaggctctgaaattgaggcaataattaatagcctaccaaccaaaaaaaggccaggaccagacagattcgcagccgaattctaccagaggtacaaggaggagctggtaccattccttctgaaactwttccaatcaatagaaaaagagggaatcctccctaactcattttatgaggccagcatcatcctgataccaaagcctggcagagacacaacaaaaaaagagaattttagaccaatatccctgatgaatatcgatgcaaaaatcctcaataaaatactgacaaactgaacccagcagcacatcaaaaagcttatccaccatgatcaagtgggcttcatccctgggatgcaaggctggttcaacatatgcaaatcagtaaacgtaatccagcatctaaacggaaccaaagacaaaaaccacatgattatctcaatagaagcagagaaggcctttgacaaaattcaacagcccttcatgctaaaaattctcaataaattaggtatcgattagacgtatctcaaaataataagagctattcatgacaaacccacagccaatatcatattgaatgggcaaaaactggaagcattccctttgaaaactggcacaagacagggatgccctctctcaccactcctattcaacatagtgttggaagttctggccagggcaatcaggcaggagaaaaaaataaagggtattcaattaggaaaaaaggaagtcaaattatccctgtttgcaggtgacatgattttatatttagaaaaccccatcrtctcagcccaaaatctccttaagctgataagcaacttcagcaaagtctcaggatacaaaatcagtgtgcaaatatcacaagcattcttacacaccaataacagacagagagccaaatcatgagtgaactcccattcacaattgcttcaaagagaataaaatacctagtaatccatcttrcaagggatgtaaaggacctcttcaaggagaactacaaaccactgctcaaggaaataaaagaggatacaaacaaatggaagaacattccatgctcatggataggaagaatcaataacgtgaaaatggccatactgcccaaggtaatttatagattcaatgccatccccatcaagctaccaatgactttcttcacagaattggaaaaaactactttaaagttcatatggaaccaaaaaagagcctgcattgccaagtcaatcctaagccaaaagaacaaagctggaggcatcaagctacctgacttcaaactatactacaaggctacagtaaccaaaacagcatggtactggtaccaaaacagagatatagaccaatggaacagaacagagccctcagaaataataccatacatctacaaccatccgatctttaacaaacctgacaaaaacaagaaatggggaaaggattccctatttaataaatggtgctgggaaaactggctagccatatgtagaaagctgaaactggatcccttcgttacaccttatacaaaaattaattcaagatggattaaagacttaaatgttagacctaaaaccataaaaaccctagaagaaaacctaggcagtaccattcaggacacaggcatgagcaaggacttcatgtctaaaactccaaaagcaatggcaacaaaagccaaaattaacaaatgggatctaattaaactaaagagcttctgcacagcaaaagaaactaccatcagagtgaacaggcaacctacaaaatgggagaaaatttttgcaatctactcatctgacaaagggctaatatccagaatctacaaagaactcaaatttacaagaaaataaaaacaatcccatcaaaaagtaggtgaaggatatgaacagacacttctcaaaagaagacatttatgcagccaacagacacatgaataaatgctcatcattactggccatcagagaaatgcaaatcaaaaccacagtgagataccatctcacaccagttagaatggcaatcattcaaaagtcaggaaacaacaggtgctggagaggatgtggagagataggaacacttttacactgttggtgggactgtaaactagttcaaccattgtggaagacagtgtggcgattcctcaaggatctagaactagaaataccatttgacccagccatcccattactgggtatatacccaaatgattataaatcatgctgctgtaaaggcgcatgcacacatatgtttattgcggcactattcacaatagcaaagacttggaaccaacccaaatgttcatcaaagatagactggattaagaaaatgtggcacatatacaccatggaatactatgcagccataaaaaaggatgagttcatgtcctttttagggacatggatgaagctggaaaccatcattctcagcaaactattgcaagaacaaaaaaccaaacaccacatgttgtcactcataggtgggaattgaacaatgagaacacttggacacaggaaggggaacatcacacaccggggcctgttgtggggtggggggaggggggagggaaagcattaggagatatacccaatgtaaatgacgagtaaacgggtgcagcacaccaacatggcacatgtatacatatgtaacaaacctgcatgttgtgcacatgtaccctagaacttacagtataaaaaaagaaatgttgcaagaccacatatttttttcatttctttctgggacaggattagaggatctggaagtctctgaagaccttgggggatgggggtgggaaagtcaggggagggagagagacagtgccaggctgggggtagtagagcttcgcggtgggggacagagcccaggtcagcctgccaccaccttcagatcctggcttgcatttaccgtctgcgcaactttaggcaagttatcaaacttctctgtccctcagtttcctcccaaggataataacagtgcctaccacatcaagtgaattaaaacactagagcgttgagaacagtgcctgcacatgggggtgctctattaatgttagctgcttgccaagcactctgtgtgacctttggcaattcattggctttctgtctttaatttccacaagatggatacatttaaaaattaaaaagcaatccaaaaacttagctaggcatggtggctcttgcctgtagttccagctacacgggcagctgagtaggaggatctcttgggctcaagagttcgaggctgcggtgagctatgatcacgccactgcactctagcctgggtgacacggcaagaccctgccaggcagtgtagaagaggaaaaccttcctgaattcaaagttaggccccccctccgctggctcaggtagttcagaccatgaacaatcattgataccttgtaggcgaactccagctaggcagtcagctccatgggaaagaagacctctactcccagcagggcctgaggtatagtaggagctcaatgaattcttgttgaatgaataaatcaatttagtactgtgagctggatggagatgcatgataatagatttcctcatccaacattcccaaatatttggggattttctacttgttcttttattaatggtttatagctgaattctgttgtagtcaaacaacatattctgcataatatcattgtatcttaatatcttaatatgtttgtatcattatatgttccatgtgtccctggagcatagctgccttctgcagttgctgagtacagtttatagaaacttgtgaattaggttaagtttgttaattatgtcattcacatcttcarccccaggatttttctgtgtcttctatccgttactgacagaggtgtgtaaaaatctcccactctgattatgaatttgtctattttttccttttagttctatcaatatttcttttatatatattgaagctatgcacgwacgtttagaagagttacattatcctggtggattgactttcattatcgtaaactgtccctttttgtctctggtaatgtttcttgtgttaaggtcagcttgatcgtacaagtttccctctggttaatgtacgcatggtatatctgtttccatccttttacattaagcctctgtgtctcttctaagaaatataaagctggattgggctgggcgtggtggctcacacctgtaatcccagcactttgggaggctgaggcggatggatcacttgaggtcaggggtttgagaccagcctggccaacatggtgaaaccccatctctactcaaaatacaaaaattggccaggcrtggtggtacatgcctggaatcccagctactcgaggggctaaggcaggagaatcgcttgaacccaggaggcagtggttgcagtgagctgagatcgcgccactgcacactccagcctgggcaacasagcaagactccatctcaaaaaaaaaaaagaaaaagaaatgtaaagctgaattgttttgttatattcgttctgatgatctttgtcttttaattggagtatttattttatctaatgtaattactgatatattggagtttaaacccaccatctaatattttttctatttgtaacaattgttttatgttactttttatttgttttattgcttcaattttggattaatcaagtattttttaattctaccatttctcccccaaacccccttattaacctgttagttgtacttttctttcagtatatggttcttacaatgattcctataaagattacaacatgcatttattagacttgctaaagtctaatagacaatagtacttttaccacttcccagacaacacaagaacctcaaaccacttgagctccatttaatgccttcctgcctttcgtgctgcgcttgccatgcattttttgtgttttttttttttttttttttttttgatacagactctcactctttcgcccaggctggagtgcaatggcgtgacctcggctcactgaaacctccacctcctgggttcacgccattctcctggctcagcctcccgagtagctgggactacaggtgcccgccaccatgcccggttaattttttgtatttttagtaaaaacggggtttcaccgtgttagccgggatggtcttgatctcctgaccttgtgatccgcccgcctcagcctcccaaagtgctgggattacaggcgtgagccactgcacccagccagttgccatgcattttaatcrtacatgtattttaaaccccacaggacattcttcctgttttacacactcgatcttcattgagatttacctacatcatttcctacttcatactcttcattccttcctacgcctccttactgacatctgggatgatttttccttttgcctgaagaattccctgtagtatttccgtcttgtgggtattctggtgacagactcgctcctcttttgtttatctgggatgtccttattttaccttcgttctcttcactgggcacagattctaggcagacttatttttttcygccctttgaaaatgttgcgctgttgaagtcttgtctccttatttgtgttgaggggaccagctgttagtctttctgctgctctttctaaggtaactcagctcctctaccctgtgtttaagatttttctttctatcttgtcttctctgcagttggatttcgatgtgcccagatgtggttttccttgtaaactatactgtgtgggcttgatgtcttttgtcattctggaaaattctaggccattatttcttccattatttcctctgcacatcctttstctcctcttctttgggattccatttatgggaatgtcagaccttcctatgccctggcttctagagtgcagctcttcaggaatgcatctgagagcctggagctgtttaacaggtccctttgtccttggcaggttctgaactcccggtctccccagtccctggaggctgcctgcagctttgcttagcttctcagcctgttgatcactgctgtggaattggcgagtatcttccgggggaaagcagagacaaaagtgagcctcacctcaatgcccttcccatctctctggattcttggttccttcagtccttggtgcctcggtagctttctcgtgtyttcgaacatatgtttttaatattttaccttccttttctagttgttcttggcaggtagctttatctactgcaaggtagcctgatacatccagaggcagatgtgttgctgagcagaaatgacaaagaggtggtttctgtcccttgggcctgagggtccggtggcagagccagacatgacaacartgtaaagcaccagcaaaatgtgatgtcaaagggaagcagaaatacattcaatctgataggaggacctaggaaggtctctgtgaagaacaggaaggattgcaccaggtgccatttggaggggaggggaggggatggaggcgcgttgttctaggtgtcaaaagctgaagctggtataggctgatatgatgggaygtgtgccatgggcagggctggggtgagagaagggagacaccgtcgtgggaaccgaagcasggaaggtaggcacgtgccacacataaaggcttttgtatccaagctgaaccaggactttttatatgggatggcacattgggagtgacccattctggctttgcttgcagtaactgtgcaactctggcaaaatctctaaccctctctggttcttgattttgttgtaaaataagaatcctaataatacctgcctcttctactccccaaggttcttgtgaggcataggtaagcttgaggatgcagatgtgctttgatgggaatgatgagtggccaggaccctgattcccttcagagccacactactagggggtcaggctgtgcrttggtccgttggtcaggagctatcacaggaaccctccatcactttctggccttgtttgttagtcacaggatgagcatggctggctctcyggtgacatcagaaagctttccaaaatcctcagttctgactgtcccccaggctcyaacatctccaccccagcatcctcttcggggcactgagcactgctggtcacccaacagacatggaactgcctcactccaaggcagatcatccctccawgggcagctctggacagctctgactacaggaaagttagccagtccttcctcaaaggtagtgtgccatgaccagaagaatatgattagcctactcctctgcatagggttaaaataaaataccttatgcccccacctaagcttccacctgctcatcctggtttggggccctgcatgtttctccacaagacacacgtgtgctccttttaaaatcgtctcctcttttctctgaattacgggaggaccaagatacacgaggtctcttgctacatgatttcactcgggaattcttagaggtaggctccaccagatacgatgaccaggaccttgaggattttaaaactcatttagcattgcagccctcaaagctgacgggaaaattataattcatctagcaaatgttcctgtagtgttttggggtgccattcatttaatggagggtgggtgtgttgaacatcctgccctcaccccttcagacccgctccttctccaccggcccccatgttccaggaggctgtcccacacgggctccctcaatgggctcagctcccttgccagtggcttcgagttgaagggggctgggtttgcctaataggaggcaccagaatgattcaaagacgggaggaaagggagtcaggtatttatcctccctcccatgtccccgccgttgccatgggttggctctgagaccctccagtgagggccacagctcctaagagacagctccctctgccagtctccagttctcacccccgcaggctcccttcaagcctagggtggtcacagccccctctgagtcgccagccctagggtgtgacaccrgcctttgttagttctgcagaactctgccggcatgtccgtrgtcttaaaaaactctccttaaattaagttggagtgtgttctgttccctgccaggaactctactggaaaaagcattctagagagatgacaaggcagtaggtaaaggaggtgggacctcccagccctgcrtggtggaaatgtaggagtggggctggattggcgtcgagaatggacgagctttccatattaagccaaggggtatgaaatcrctggttctctatgtaggtctccgtagccccacgttcccatcctaacrcatctctcctctcttccagaaagctcctgctgcttctgtaccccgcctgtccctcccagctgcgcagggccccttcgtgrgatcatcagcccgaagacagggatggagargcctctgtgctcccacctctgcagctgcctggctatgctggccctcctgtcccccctgagcctggcacagtatgacagctggccccattaccccgagtacttccagcaaccrgctcctgagtatcaccagccmcaggcccccgccaacgtggccaagattcagctgcgcctggctgggcagaagaggaagcacagcgagggccgggtggaggtgtactatgatggccagtggggcaccgtgtgcgatgacgacttctccatccacgctgcccacgtcgtctgccgggagctgggctaygtggaggccaagtcctggactgccagctcctcctacggcaagggagaaggtaaacgctctgtgctttggatctgagtgctgtcacctggcaaggcccggagtggccttccctgaggtcagcctgggagaggaggctgcacgcactgcgaagtgtaaattcttggtgatgcccatccagggactggcatccttctgtgcccactcaggctgcaccctgcaggaaggcggggtcggggggcttgaggaggggcacagtaagtgaccaaccatactgatttgcccaagactttcctggctttagcacagaaagtctcacatcctgggaaaacctcaggaaaaccaggacagttggtgaccccaggtagggggtgaaatcggcctgtgctcctctctccgccccatatgccctgcctgggggctgcgtcagcccagaggaagttgcgctttactccaaatcgttccctgttaggaaagcctcttgctcttcctcacaatggctcccacatgctggagctccctgacgccccccaccttcctggcatgtggagttcatcgttttcacactaacctgctattgtgggcttggtcacaataggcacacagatgctttgggtttttcaccgttggttagcctattctttcctcccttgtgaggttcaaatttaktagtttatttttaaaaattgttttaagagctggccaggcgcagtggctcatacctgtaatcccagcactttgggagacggaggcgggatgatcacttgaggtcaggagttcgagaccagcctggccaacatggggaaaccccatctctactaaaaatacaaaaattagccgggcatggtggcgagtgtctgtagtcccagctactcaggaggctaaggcacaaaaatcgcttgaacccgggaggcggaggctgcagtgagccgtgatcgcgccactgcactccagcctgggtgacagagcgagactccatctcaaaaaaacaaaaaacaaaacaaaaacccaaaaaattgctttaacagctttgaggcaggacaaagtttgaagccctgaacctagagctcagtctgtactgacctctgacaccacactttgtaggaagacgcatgtcctctccagcctcattttccccatctggaagttgggctaagaacccctgaaaccctgacagtgtatgttcccaaataggaaagagataagggtggagggaattgtttctttttaaacatttttccaggagctaagagtttcctatctctgggtcagccaggcaaaggaagctcccacaccctcccgcccggctgagctgcagcccagacctcagcacaagtctggctactggactaaagcagagctgcctatactcctgtcctggactaaagggctaatgccatgctgactgygtaagaatcgcccaagggagcttaaaagtacagaatagcgcagacctcaacccaccataatctagtttaaaaggtctgggctggagcccaggactctgtctcttttggaagcctgcaaagtgacaggtttgggagtcattgaaattgataactgttatcctcccttccaacttttctgttattctagaaattataggagaaaggaagtcccatctcatacacatctcacctccatgcaattgaaaatttccttttggggtaactggatcaggagacagcacagagtcaaatgttctctgcagcttgctctgggcgatgagagccacagcagtgaagttagcaaatgctgggctttagaacccacttcctgtcttctttaaacaaacgtccgatacttccacatctctgtttatccggctggctgagcgatccaggggtaacctcagattcatgttttccattccaggctttccaacgctcattattttataacaaatgctttccagtgactgggtatttttccagtgacaacttaattttatttcaacctcaatttaaaacacctgttgtcagacaagggggttgtggtttttccctatcaggagcaggcacggggtagtaggagacaggtttttacccaggtgggmctttgccatccaagcgtggtgaagagtgaaaagttcyaaggagtggagggaatatgaaagggaaggattaaactcatggtccaaggagactgtgctgggtaaggagggttgtaataagtggagaagttgaaggattgtgcatagctgctgtgatcactggattgcgagtctctgttcagatggagatacaagaagtttactaaaagatgaagggagctgtgtgtgggtgcagagcaggaaaggtgaaatggagattgaagggtgggtgcaatctctggtaatgagagacctgagctatgaccatgggacagcggctggagcaggatggaggacagtctctgagagaggaggtgtattaacgaagagaccaggagtactggaaaggtcatctttgtggacatggaaatcatcaaggtttataaaaggaataacatcaaagagaggagaaagaaacagatgcttgaaaaaaaaaaaactctgtcttgtgttcacggctttacgagttaagctgcttacgtgaagtggtgcttcgtttatgacatgagagacctttttacatctaaatttatttgaatttcaccagcatcagtccaratctttatcactgggtacatggtgggcactcagtgaatattagctaattgattcattttgatttggcagaataggaaaaagagttggcaaaagagttctgggtatagtgagcacagaaagtggccagcgcccagggcttgctccggtggggcttaggggcttaacgtgccggtcagaccgtggataagrctgcccctccaggacccctcaagctcctctgaacttcaggctggagcagtgaaaccagggagggcaccagggacgttctgggttttctagcctggcctgttcacagactgttctcccaaagcatctctgagctcaggtaaaccacaggcccttttagggagttctggagggagcagctgtcctgattctcaacccctgttcgaggttatagcagctgaagctaaggtggttgctctccttcacctgtcttcagaatcaggaggctaagcctattcccagtcacatccctcattctttagaccacagcgacgaagccagcgataaccacattgttgtaaccccacagatttttttctttccttttctttgagacagagtcttgctttatcacccaggctggagtgcagtggtgggatctaggctcactgcaaccttcgcctcccgaattcaagtgatcctcccatctcagccccccgagtagctgggattacaggtgtgcgccactaggcccagctgatttttttaattctatttttagtagagacggggttttsccacgttggccaggctgatctcaaactcctggcctcaagtgatctgcccaccttggcctcccacagtgctaggattacaggcgtgacccactgcacccatttgtgaccccacacagtctaacttgaataatatccattgtcctgggctctggcattccaactgaatttcatttatgattttcaccttcctaatgatctgttaacttgtatatatatatttatctcttctttcatcaggagaggcattggaagcaaagagtaacataaaatttggcttctgattgaatggctttcttgtgtccaaagtttgactgtcatcttgtgtcccaaggacacggctttcctggcagctctgaggaggcatctactggattgtacctagaaccgccctgcttttcagcaggcagacccagaagctggttgcattggaatyggagtagtctagttaataagcactaagcctgtagagggaaaaaaaagggccctttgcagtggctcatgcctgtaatcccagccctttgggaggctgaggcaggcagatcacctgaggtcaggtgttcgagaccagcctggccaacatggtgaaatcctatctctaccaaaaaatacaaaaattagctgggcatggtggcatgcgcctttggtcccagctacttgggaggctgaggtgggagaattgcttgaacctgggaagcggaagttgcagtgagctatgattgcaccactgcactccagcctgagtgacagagtgagacactgtctcaaaaaacaaaaaaaattttgttatgaaatcaggccaaacgagtataccatgcatggtgatgctgtcttgggctaagtacagattcacatatctgccatctaagtagaaattgaccaagcatatgtggaaggggtccatggaagattattgggggtccatggaagtttcataagagagcagctctttggggcaggctccttagggtctctggtttgcagctgttctcagttcctttgatgatgcactggtcgacttccaggtccttagcgaggggggtttctctcactgcagatggaatagggtgccactgcttttcaccatctctgtcactttggcagctttgcgacagaacattccgcttagaacatggagggtcttccctgttgctagtaacttagcaagacaaacattggtttgttgttgagacagcaatcgattagggagtgtatgtttcagtggagcttgactgcttggaaaccgggccaaaatgagaagccagttggaaaacctcagcccagatgttttcaattagctctttgttctccacaatggatccaaggtgctgtcgtttgagccctgaccagcagccgtgagaacagacacgtttcagcagggcctggacgtcaggagactggccccggggtgcttatcgaccttgaagagcctccgtttctttccttggttttctaatctctccaatgggaatgtttttatttgcttttctcttacatcgtggaagcagtagaatgcattgcttttctgaaggactggaagaaggaaagggaaagggaggttgaaagcgtaccaggcacatacattacctcattgagtctccatggcaacctgtttgctcagcatcattattttgcctttagaaatgagaagcaggtgtggtggggtagtcgaccacatcacacagtgccccagtgtgtggcagatggaacttgaacccaggtttgtttgactatgtctgctgctctagactcctaaaaggagcggtgagaaaaatgagaggtttagatttgttttctttcattttgcagtggcacttataaaaatcactatttgaaaatcctstagcactttataattaaaaaaaaattatggccaaatgtacatcacataaaatttaccaccttaactttttggattttttttctggagacagggtctccctgtcacccaggctggaatgcaatggcacaatcacagctcactgcagcctcaaccttctgggctcaagcaattctcccaccttggcctcctgaatagctgggactacaggcgtgcgccaccatgcccagctaaatgttttgatttttagtagagatgaggcctcgctatattgcccaggctggtctcgaactcctgagcttgaatgatcctcccgccttggcctcccgaagtgttgagattacaggcatgaactgtgcccagcccagccttaaacatttttaagtgtccagttcagtagtgttaagtatattcacattgttgtgcaaccatcatcagcagaacttttccattttgcaaaactgaaactgcaccgattaaacaaccacctccatttctttctcatcccaggccctggcagccaccactctactttctgtttcaatgaatttgactcctctagataccccatacaatatttgtcttttgggatgggcttatttcacttagcatagtgtctttattgcagcaggtttcagagtttcctcccttctgaaggctgactaatattccatcgtatggatagaccacattttgttaatggagacttgggttgcttccacctcttggctrttgcgaataatactgttatgaacacaggtgtgtagatatctcttrgagacactgttttcaattcttttgctggatcatatggtaatkttatttttaattttttaaggaaacaccgtactgttttctatagtagctgcaccattttgtgttcccatcaacagtgcacaagggttccagtttccatacccttgccagcactgtcattttctgtttttttkgtttgttttgttttgttttgttttgtttttgagacgsagtcttgctctgtcaccaggctggagtgcagtggtgtgatctcagctcactgcaacctctgtctcccgggttcaagcgattctctgcctcagcctcccgagtagctgggattacaggcacgtgccaccacgcctgtctaattttttgtattttagtagagacggggtttcaccatgttggccaggatggtctcgatctcctgatcttgtgatccacctgccttggcctccaaaagtgctgggattacaggcgtgagccactgcctggcccattttctgtttttttgatagtagccatcctaagggtgtgaggtggtgtttcactgtggttcaccctctaacactttgcacgctgaattctctacttagtgcaagtgaggcaaaaaaacaggaggtaagcagagtcccttggcggccttctgaaacatgatgaggtggctccgtgggccagtctggctgggctgtctctgagccagcgatgggaaatattgggaagtaagaggagctgaataggaagtcaaggcccaggcttctgggttcaaggggtggtgggataatcatgccacttcgtcctcttgctatgggaaaaccaaggagatactacatgtgaaaatgccttaaaaacctcaaaccaggccgggcgcagtgcctcacgcctgtaatcccagcactttgtgaggctgaggcaggcagatcacgaggtcaggaaatcaagaccatcctggccaacatggtgacactccatctctactaaaatacaaaaaattagccaggggtggtggcatgcgcctgtcgtcccagctacttgggaggctgaggcaggggaatcacttgaacctgggaggcggaggttgaagtgagccaagatcacgccactgcactccagcctggcgacagagcaagactctgtctaaaaaaaaaacaaaaaacaaaaaaaaccccacaaacctcaaaccttcagtggcaggagagtttactttttccctgaagggtcaaagttcagcctctgctatggatggaaggtgagactggcttatgccataatcagtgtcactaaaacatcatcatcatcgtcatcattatcatcatcatcactatttttagtaactgtgaccagcaatgaactaggcacaggcttcgtagtatctctaatctgcacacagctgtgcagctgaagtgtcattgttagccccactttactgataagaaaaagggcccttgaccaaggttatacagctaagtggctgaacgagaactcaaacccagcttggtacccaaagccccgctctttccactatcccatgcaacttctgggcttaaatctaacttctatcctaatcatgttaaatctactacattcccagatcacatcaggtgcttactgtggtccaggaatccccatggtttagagttatgtgcaatatcttaatataataaaaatggatggccacacacagctgccaaaattagagaaaaattmtctttccatgtgagacactggtgccccgcaaagactcagacctgcattgacgcagcacttggtttctctcctctctgcctccttcagggcccatctggttagacaatctccaytgtactggcaacgaggcgacccttgcagcmtgcacctccaatggctggggcgtcactgactgcaagcacacggaggatgtcggtgtggtgtgcagcracaaaaggattcctgggttcaaatttgacaattcgttgatcaaccagatagaggcaagtcatgtgctcttgatgtttccttcatgcaaacatttttcctcttccatgcaactcgctttttgcgtattgatttcaagaagtgtgtgtgagcagsaaggagggtacctcacccaatgggattagatacaagggcagtttagggaaggatttctggagaagggaatcccatccatgggsaaagggcattccaggcacaaggaacagcatgggcagaggcacagaggtgtgaaggttgggctggggtaagcagagcgtgatctcagggagagtgcatctgggagtagggttaactgaagctggaaagatgggcatgaaacacctccggtgccatgctcaggagcttgccctttgggtgggaaaatgtattagttatcaattgctgcrtaacaaattgcccccaggttttgcagctgaaaagagtgaatctttattatcttgcacagtttgtgagagtcaggaattgaggaagggcttagctacttgattctcctcagcgtctctcatggagttgcactcaggctgtcaatgggggctggaaggtcccctcccacgcaggctcttatggttgttggcaggctgtggttccttgctagctgtagactgcagccctstgttcttctctatgtggcctcttcgtaggctgcctgagtggcctcaggacatggtggttgtcttccctcagagtgagtgaggcaaaggagagtgagagaaagaacacaggatggaagtcatgtttcataacttaatcttggaagtgataggccatcatttctgctgtattctatggatcacacagactaactctggtagagagtgggaggagattacacaaatgtgtgacaccaggtagggttgctggggccatcttggaagctggctaccactggccaatgtagctgagggttggaatcactttaaaaatgcaggtactgggtcgggcgcgggggcttatgcctgtaatcccagcactttgggaggccgaggcgggcagatcacgaggtcaggagatcgagaccatcctggctaacacggtgaaaccccgtctctactaaaaatacaaaaaaaagaaaaaaaaatagccagacgttgttgtgggtgcctgtagtcccagctactcaggaggctgaagcaggagaatggcgtgaacccaggaggcggagcttgcactgagctgagatcgcaccactgcactccagcctgggtgacagagcgagactgtctgaaaaaaaaaaaaaaaatgcaggtactggggcctccccactgacccgctgactcaaaatatcctgctatgggactaggttatttttctttaagcagccccagattgattctgatgttgccagactgataatttcagcatttgaaaatccacatttatggctaaatttcagggttagctttccagcaaattctttatccaaacagttaacacacacttattacattactcttatgtgcaacatatgtggggcttaggacaggaggaattggcagctaacactcctgtcctcaaggaacatgtcagatgccacccccaagggattatgggayctgccccaaatccagaccaaggaaccttcgctgtgcttcagcctccagctgaacccagcactaatgcagaagaaaggtgacttgaaattgccctacttgggttccagaggaagttctcccaagactgtggcctttactgtcatggctcacacagtccttctctctccatatatgttcccaagcgtgctgggaatttgcccaaccctgctgtatagcataggaaaggatttccaggcttctctcagctgtggaggagactgcttatggttgacacctgtcaaatgctgctattttattgaagataactagagagattgtgatggagttgatatactttcgtcagtcttcagtcactgatgacagctttgctttctttaccatgaagtttatgatctgacggatgggcttgtccaacccagtttcacaaaattttccatcttcattccttataacctcatgagcaataattagcccccacttatgtggatcttatctctcccatgagattggaagctcccagagggcaggggctatatcttatgtatcattgtatgcaatagataaattctaggtacctaatgggaacaacatctccaactcccaaattctcttctccccagaaatgtgagccagaaattattatccccttaggtggagaatctcccaggataaaatattaagctaaacagcaatgagaagcacatggaagcaaataatttcttcacagcttgttctgcctaataggaccatgagctgatttgtaacatcttagatgggcctctgttcaacctgaacctcaggataatctacttggagtgtccagtgaagacccagccttcttggcataagaaagtcattgatcattgatggcttgaaaaaaaaaaaataagacaggccaaaacatcagtgagctttgtgttgagaaaatgatgagaaggctcatctgccattaggaaaaaaaaaatgattttggaaaaaggactctgagtggcacttcattagattagattagattacccaaacaattaaattaacacacactgtttgtggaatacctactaagtgccagttccaatgcttaataattccagggcgaaataagatgggtcatttcaaaagcagaattttcatggggtggaataaacacagaaaagactgaaaaaggccgggcgcagtggctcatgcccgtaattcccagcacttgggaggccaaggtgggtggatcacctgaggtcaggagttcaagaccagcctggccaagatggtgaaatctcatctctactaaaaatacagaaattagccaggcatggtggtgggtgcctgtaatttcagctactcaggaggctgaggcaggagaattgctggaacctgggaggcggaggttgcagtgagccgagatcctgccattgcgctccagcctgagccaacaacagcgagactccgtctaaaaaaaaaaaaagaagactgaaaaaaaatatgttggagacgactttcttactgtggaagggctgagattccatgatgggaaagcttagccccacctttattctgggcatttgttgggtacctgctggtttgggataccagcagggaaagaaaacatggcccttgtcctccagcccttacaacctgcaagacaagatgtacgccttggagaaagctggagatccttccaaggcaaggagcatgggccctcacaaatctccagaaacccagagagggcaacctatggagatgtctggcttaaagggccaggtgacatccacagccttacacactctgcattttcctagaaggcctccctctggctgtcagacagatcaggctggtgaccacgagccagggggacgctttctggcccaaccacagagacttagggaactttcattgatgatcagtcccctgcaacttcttccctttggtagccgctgaaagtaggtcatgaaagggcctagacctcaggatgtctggggagaacctccttgagttgccagaagattcttgcatccagggctttgtggctaaggctcatgcttactggcagtgctggcctgatgggtagagaaccgcctggaccacctacgtgggatatttatgggatgctgagacgtttctccaaaataccttctggaatggcctgtatcagtagctgaagtcataggatcattcctcccagctaaagaaatgcctgctattaaatttttgtggataagaggaagagacatagcttgtggacgtgcagttgggtgaagtcatgaacatactgactaatgatacccagggtgaactgctgactaatttgtgtaaacagagtggatggtctctgatggtgagccctagggctctgttccggcctccccatcatgtatcaggaatgttcatggaaattaaaaggtatactgataaaatctatgggagatacaaaactaggagagattgctggagtataaaattatggaatgaactttcagaaaaactgctgtaggttgaaataatgggcccaagctgtaacatattagggatgaatagaaggtcctatatcaaagttcatggggaaaaaaacagtcacagagtgcagactttagggagagtaactgaaaaactattgatctttttttttaaaaggcctgttgggttggctcacatctgtaatcccagcactttgggtggcagaggtgggcagattgcttgagcccaggagtttgagaccagcctgggcaatatggcaagaccgtgtctctaccaaattaaaaaaattaacgtggcatggtggcatgtgcctgtggtcccagctacctgggaggctgaggtggaaggattgattgaccgtaggaagtggaggctgcagtgagccatgatggtgccactgcattccagcctgggtgacaacagggcgagaccctgtctcaaaaaaaaaaaaaaagaacaaatctttgaagcggcagtggttgactaaaagctcagtatcagccaagagtatgatagggctgctaaaaaaaaaaaaaaaaaaaaaaaaaaaagtgaatgtcaactgctttacagatagaagaattatttccttaagctccttgccttttggaccagtcgctgactgcagggttcagttctggatccagatcttaaccaggtcaccagaggaaaggccaacaggatggagacaaatctggaaaccatatcatgaggaaatgaagttttttgtcaagaaaagagatatggggggagatggttctcttcaaatacttgaactactaccatgcagaagaatgtttagaatgtatcccaactcccggccggatgcggtggctcacgcttgtaatcccagcactttgggaggccgaggcagacaaatcatgtgaggtcaggagtttgagaccagcctggccaagatggtgaaaccccgtctctactaaaaatacaaattagctgggcatggtggcagacgcctgtaatcccagctacttgggaggttgaggttgaacccgggagagggaggttgcagtgagycgagatggtgccattgcactccagcctgggcaacaagagcaaaactgtctcaaaaaaaaaaaaaaaaaaaaaaaaaatatatatatatatatattccaactcycagagccaaggcggagaggagcgtgatggaagatagatctcaggctcagtggaagccccacagtagatagctctaccctaagttagtggtgagctccttgtcagtggaggaattcaagcacgaactggacaacatcctgccaggagtattgtggtcagatgcctacatggggagggaagtgggattaagtgattgccaagtttcaagaccctkgttattcagtgtctgggaaaatgcactcatcccacatagtgtgtgcccagctggatattgacatcgcgcaccatgtgtaaactggcatcacatgtgtgtgagaacacacacacacacacasagagaagggatgccaaccagcatgtgtattgtgtgcttgggttctctctttgccttttctccagcccctgatggccttgactttgaaaccaggtgcagacttttcactcttcatatcaaagtgtgagagttaaagccctccctcgactttccccagtttggaaggggcagattcaaaagcggccaggaatgaaacgtcagtgaatgatttctctgtgtcttgtgaccctggtcgtagaccactgggctaatgaatgtgatgagggcacccgcgtcccttcccatgcctactctgtctgcaaggttgtgggctgggttctgtaacattcaccctcattaacccctggagattggggacaggtcacagatcattacagatgactctcacaacccatgcttcctccagagtgcactggaattcccaaagcagagaatggaagaaaactgcatcagtctagaccaaattcatcctactctggaatgccagaggcatgagtcactaagccctggagcctggctgatggaatttcacttaatgagctaactgtgcttccctggactcctacagctgcttggagcatccttgggggctcctgatagtttgtaaattcccctctagaggaggaaaaaaaatcacaccttcttcatataagtgaccccaccaaggtttgtaccctaacctgccttttgaccagcatccagaacaattgggcaagtgtcgagtgagttgaattcaatcccttccagctgtgacggcctgtagttcagtggcaatggtttcttcatcagaatgacatagtgtgcattcatcatttacaaggtagttttaaatattctgtaggggaaaaaaatcagatgatttctctaaaagtgctttgcagacttcgaagtgctgccctgggttagtcctaccactgaatcactcactaggcttggtttatttcatccaggaaattaaccaggcaggttctcagttttccccttttctgatacaggctgtgccatcatatcttattgtatattctcagtttcggactccagaattgaaggcagaacccccgggttccagtcccagtggagactggagctcacagctgttatgtccagtcactgacccttcttgggcctctggacactgtcctataaaacagaagtttgtctggatataaagaaaatcagttttaggtcaatcctcaaractttcttaaaaggaggtaagtaggagcaaataagcaaatgtgaaacactcttggctccaaacgaacagatctcttttaaacctggcaaacagagccccaaccaaacctcccaggatttcagagcctcttaaattgagaggctttgtttcctgcctgtggcgggtagaccagttggaaaaagcattagataaggaaagatgacaaatccagatgccctactsagtaaacctctgctccccggctgctccgcacgttgcccagtcatgtgctcacaggaagccttgtggctgggctgtgtgtcgttagatcagggaaggttttcatcttttctcttttcttcaccccatccctccccacctcaccccaccccactccacccctccccaccccaccccacctccttccttacctatcctttaaaggctcttttgcaaaaagcaattccattgccggaactgattggaaaatccccaggctgtgagatttaggtgctgcctatcccctgagtgacctccaagcctcagtttcccgtttgtgaaagtgggcagcccaggaggtcttgaggggccaacagagggacgatgaggacagaacgaggagaaagccatttctttccacccaaggggagaacctggtcccccattctctgctctctcgcgttcttctggaaggacgctgagacctgaaaaagccctttcttctcatcttaaccacagagactgaggctgctgtgaattttttaaatgccttgggtccaggtttttattagtcacagttagctgccaaatgtttcrgcattgccctcccagcagcagctctgtctgtctgggggcggcagagggtggagggcttcagcctaaaagggaaaggtctctagaaggacttctgaaaagtctgaacccttcccagccaggaatctcatccttctcctgactcccaccagagaggttgcactgggtggtttggggaaaaaagggggcctattttcacctctgtgcagtttagaagatagtggtccccccatgcctaaatagaggccccattcccagatggtcacggggtagctggatggcctctctctgtaggaggaagagaaatggtagccagggggtagtttgtgccggacttttcagcaagggcacaaggacccatggtggaggcccacagcctctgaactctcagttttgctcaactgtctggctggacaattagatgtagctctcctgggttttgtctctcgcccttcttgggcaagaggatgtataacatcctgtccagggctgggcacggtggctcacgcctgtattcccagtactttgggaggccaaggtgggggggatcacttgaggtcaggagttcgagaccagcctggccaacgtgacgagacccccatctctactaaaaatacaaaaaattagttgggcatggtggtgtacacctgtagtcccagctactcgagaatcgcttgaacccaggaggtagaggttgcagccactgcactccagcctgggcgacagagcgagactccatctcaaaaagagagaaaaagatcctgtctagccctcacattccgcgattctatttactaagagtctatatgtagccagggcttgccagctaccaaaagggacacacaaagcaagtagttctaaggtgacctattttcccaactgaaaatctgaaatgcaaaagggtgtgtatgtggataacagatgggaacctggtttctggcccaggtgttgcagatacaatgctttgaaaagtataaataccattataactctgtgagatgaaataaaccaatacataacattctatttatttgttagattgcacacatgaataaggaggcttataatttgttttagatgaaataaataaatgaacaggatgtactcaaactttgaagaatgtgattgggtgcttaatggcatggcagtttggagaagagagaggtgaatgaggaaacctgtgggacagttgctatctggaggaagtgggggcttgagctgggctggaggaagcctctccctgccctagatgggcaggtccgctctgcagggaggtctggtgatgtgactagggcagagtgggcagcggtcagcctggttctgcaatgagcctaagtggcttatttgagtcacctcagccatgctgggtgtcagtgccaaggaatcccccgaccccatccccaggagtccgttgctaaggatctgtttattcattcactcaatacattttgattcagcaccagaccctacactagacatgaggataaagggagtgatggaacggaccgtcttgcccatcctgagcttaccatccagcagtggagaaacagtctcatgcctcatgactgtgttaccatggtgatgatggctgtgaagagaactaccagattcaccatgaggttgtgtggtgggtggtcaggcctgaccaggacaggaggaactgctgggtcacaggggctggttgttggagcaggtgtcccgccgacttcctgctgacagcagggcttgcccgttctccaaaaaagcagcctctgttacctacccaagtggctgcctgcttggaaaatgaaacacagagcattcagttttccagcagtgttacaaagcttttgatttataggaggaagaccccaacagactaccggctctttcctttgggggtgtcagcatgacctcagctctccaggcctccactggcctctattgcctagagctgaggaacagaaattgttgaaatgcctttcctctgtcactttcttccatcaagaagtcacaggctaaagaatgttaccagcagcttattttttgttgagatgsagtttcgctcttgttgcccaggctggagtgcaatggcgtgacctcagctcactgcaacctccgcctcctgggttcaagtgattctcctgcctcagcctcctgagtagctgggattacaggtgcgtgccaccacgcccagctaatttttgtatttttagtagagccccatgttggccaggctkgtctcaaactcctgacctcaggtgaactgcccgcctcggcctcccaragtgttgagattacaggtgcgygccactgtgcccagtccccmagcagcctcttaaactaagagtttctgattggatcatcaaaaggggataattacaacatagccagactcctggagtacagcatgcctcatactgtgtgcagataatacacacttagccaagccatctaactgcgtgctgaggatcagacggcttttaattcagttcagtaactatgtrttggtgtcagatctcaagggaaaaggggagagggtgttagggagytcaggtgacaaaaggatgcctggacaaagcacagatgttctcctgtctatccataagtyacacaagtygtgcttatgttaggaagagagatgaggactgcataactttattttgcattaaacaaagaataaaaagagtctttattaaaatgttggacttgggcactcagcatgtctagctaagctaaactcctgttgttggattttgaaaaaatcattactggttccttccaaatatgtttggggacccactctgtgtctggctatagtgggtcctcaaacatggttggaaggaaccagtaataatttcttactgtgtgggtaatacaaaaatgaataaggcacagttttgcccttaggggattcacagtccaattgagtggcaaaaggatgtggaaaagtaaaccctagtgcaagatagtcagtataagccaagaactcaatgagtcaccagaatgccagtgctggaggaataaagaagaaatcaaacgtgtggacgtcctatttgggggcaggggagggggcttcacagagatgctggtgctgcctctcctcctctagattagggaccacatgacagygaggaccatgcctatctgtccttttagggtctcacacagcacttgggacatggtggcactggacaaatatttttgaatggatgaataacattttccctgaggattggcaggattctgatagrtagaaagaagggacagagaatggcagggtatgggcctaacgcggaggcaccaccaggaagatctgagcragacccttgaatgcactgtggtcaaagaggatgaacggatgggagaagaaaccagaggcraggagacagcacaggcctaggtgagatgacgacattatcacgcccttcttatgttcccatgattctccttgcacagctgactgggaattgggagtgggaatggcaagctgatagaagggcaaagaaggtctggctagggcttaatgggcgcatgagtgaagaagagagagggtcacgaaggtctgcaaagctagaggcaggagcatccctcaatgactcgatgaaaagaggaagagttgagggcatcttggatgtgtttggtctcaggtgctgaggaaggtgtcaagctggcagttgggacatgggtctgtatctgggaggccactgttgttgtttttttgtttgtttgttttgttttttttgagacggagtcttgctctgtcgcccaggctggggtgcagtgtcgtgatctcagctcactgcaagctccrcctcccgggttcatgccattctcctgcctcagcctcctgagtagctgggactacaggtgcccgccaccatgcccagctaaatttttgtatttttagtagagacggggtttcaccgtggtwgcagggatggtctcgatctcctggcctcgtgatccacccgcctcggcctcccaaagtrctaggattacaggcgtgagccaccgcrcccggccgaggccactgttttgttttgttttgtttcttagaagatctcgctctgtcacccaggctggagtacagtggcacaatcctagttcactgcagcctcaaactcctgggctcaagtgattctcccacctcagcctcctgggagctaggactatgggcaggtgccaccgtgcccagctaatttttttttttgttattatactttaagttctagggtacgtgtgcacaatgtgcaggcycgttacataggtatacatgtgccatgctggcccgctgcacccatcaacccatcatttacattaggtatttctcccagtgctatccctcccccctccccccaccccacgacaggccccggtgtgtgatgttcccctccctgtgtccarctgttctcattgttcaattcccacctacgcgtgagaacatgcggtgtttggttttctgtccttgtgatagtttgctcagaatgatggtttccagcttcatccatgtccctgcaaaggacatgaactcatccttttttacggctgcacagtattccatggtgtatatgtgccaccttttctttcttttttttaattatactttaagttctagggtatatgtgccacattttcttaatccagtctatcattgaaggacatttgggttggttccaagtctttgctattgtgaatagtgctgcagtaaacatacatgtgcaagtgtctttatagtagcatgatttataatcctttgggtatatacccagtaatgggatcgctggtgcccagctaattttttaactttttttttttagaaatgaggtctcattctgttgcctaggctggtcttggactcctggcctcaagctatcctcctgcttcagyttctcaaagcaygaggattatagatgtgagccaccacacccagcctgttttgtttttattatttatttatttatatttttttgaaacggagtctcagtctttcgcccaggctggagtgcagtggtgcaatctttgctcactgcaaactcygcctcctgggttcaagcgwttttcctgcctcagcctcccaagtagctgkgattacagatgtctggctaatttttttttgtatttttagtagagacgaggtttcaccatgttagtcaggctggtctcgaactcctgagctcaaataatctgcccaccttggcctcccaaagtgctgggttcacaggcatgagccaccgygccccacctatttatttatttatttttgagatagagtcttgctctgtcacctcagctggagtgtagtggcgcaatctcggctcactgcaacccccacctcccagattcaagtgattctcttgcctcagcctcctgagtcgctgggattacaggcatgcaccaccatacccagctagtgtgtgtgtgtgtgtgtgtgtgtgtgtgtgtgtgtgtgtttgtgtgtgtttagtagagatagggtctcaccatgttggccaggctggtcttgaactcctgacctcaagtgatctgctcacctcagcctcccaaagtgctgggattagaggcgtgagtcaccatgccctgccctgttttgtttttaaatagccaaagtaagaaagctgcaggctctgagaggaagatgcaggaacttgctggtggttgtgggaggctgcatgcgaggtgagcagaggctggctagagttgacactcatgcattctcgttgagatgttggcatgatgttatgtcttcccagcattgtcctgccacccctcctcaccctcaggatgacttctcaggtcagaaagcctgggctgatattaaattatgacttctagaacagggggaaggagaacaaccactgagctaagacaacgtgcctggtgctgagagtttagagcgactgtgatgtggattcatgtaggctggcttgcttgacttgcttctccttgtacctttccctgatgcaacttccagctagactttcaaaatgggtgatttttcctcattggcgacagccccagactatcgcattctggaatttgcaagtcatggacagatgctgcaaatatgaaatgtcatttaggcataaacctgagagtcagagctcagagctcccttcctctccggctgacgtgacaagtcccttgcatggtcgtgccttggttttcccttctaggaacgggtgcaaatcactcccagagtctcaggccctgccagaggatgtgatgagctctgaggaccacacatcctggagtttctgtgtctttcttggagggaagctttctggagtcctgggtgcactgttgtctctggcaagagggatagcatcaggttttagcttgaattttaatatgtgcagggtgcttgaccagcttctggcatttggggctgaattttattttattttattttatttattttattttattttattttattattttatttattttattttattttttattttattttatttattttattttattttattttattttaattttattttattttattttattttattttattattttattttatttttgagacggagtctcgctctgtcgcccaggctagagtgcagtagtgtggtctgagctcactgcaacctccgcctcccaggttcacaccattatcctgcctcagcctcccgagtagctgggactacaggcgcccgccaccatgcctggctaattttttgtatttttagtagagacagggtttcaccgtgttagccaggatggtcccaatctcctgacctcgtgatccgcctgcctcggcctcccaaagtgctgggattacaggcgtgagccactgagcccggctggggctgaattttaaactagcaagtctagactgcctttcatttaaaaaagaaaaaaaagtgtgtgtatattttaatatttcacactttcttttcacttttggggctgaactcctggggcaaaatgtatcctaacacttgtggttatggaagggattccacagcagtgaagtaaagagagaggttatgtgtgtgggcgtgttttctaagaggtctaactcagtctscrtgagctggttagctagtgtgagcaccgaatgtgtgccccagagggcttccctgcctcctcccrctggcctgaagacaagaatgctgggagcccagctctcccctcacgtacacaatccagtctgactcactgcccctcgacatggggtgctgggyttccaatgtgcacagcaccagcacccttcagctggttgaaggggacacccagaattctgagctccaggccctgccctgggtgagtcaccctcagtaccaggcaatgtattggacacaggcatgagatgaggactgctcagagaccagtggtcattatgagcctggagcacrggtttgggggtcagaactcaatttgcatacttgtttacctacttactggctgtgtgaacttggataacttccaaaagcttgccaagatttatcatgtttttacctctaaacaggtggaccatgagccatcttgaaagctgccatggggattgaataatggagtggatgtaaagttttctgtatggaacctagcctgcaattaattggtgtttgataaatgatgcccatagctgtcattattcaaagctgacacagggcgctgtggttggggtgtaaggaggaagcccagcaaggcccaaggagggcagagactgcattttgttaaatgaatgcatacggtagatttgagccttaaagactggaaaggctttggttctttggagggagaagaagagaagacggtccagtttgaaggaatgagtgcgaatggtgtcctgactgttttcctaaggccttgcaaggaacacgatcctttcagaatttcctccaccacaagacacayaaacagatgcacactttatacatacagagacccatgtgacatagacacatacagggagagtgcacagagatccacatgacacacmggcacacacacacaaccctgtcatgcatacatcatcatgcacacagacacacaatcccagagacacacaatcccagagacacacacacagagacatatacaggggctcatatgacacatggacatgcagacactcagaaacacaccatcatgcatatacccccgtgcacacacagagacacagagatacacaccacacacagaccatcaagcacacaccaccatgcacacacacagacacagagatacacaccacacacacacagaccatcaagcacacaccaccatgcacatacacagagatgcataaacacgtatgcagtgagtcggtggaagaatgaggataatgacccccggtgctagccctttctcttctccaggctgcattgccttcatcgtggagcccccggggctctccccaccagccctattcagcggaggaaactgtcccgcatcatcgcaggaacgagagcaagctcccttggcgtttgggttggtgtgtgctggcctcaggcccgcgtagctctttccagcggggtctgctgagctcctccagccaggccttcttcctcctcctgtggtggccaggtgctgggggtcacaccttccctgcagcgagcctgcactgctgcccaacgcaggggaaaggatctgtgaactgaaggtcagcccgggccgcctgccctgtgaagtgcagtcttgatgctaggcagtaactttccttctgggcatgacagttacacactggaattccagcccagcctcccgaggtgggaagagacagaagagggccggcttgtgggctgggtttagacctcaggccctttcttggctcacccctgtccacgtgtcttggtggcacgggtcctgcggcctgaatgagggctgtaaaggatccaggatccaggctggaaggcataatcctgcccctggcagcattccttctgctgtggtggaaaggaaacggagccaagtgccatcactccaggcccacatactttccaccgccttgcaggacctgagagtagggcctggctgtggaccctgaagcccatggcgaggagacgtgaatccctgggcacccaaagaatggttctgttcaaactcgtggttcatttgcatctcagttggacagggctggggcagtcggggtgctgggttcctcctgccttccagcccggcttggaccagccccacctcccagtccctggcccgcccacagtgtgtgtgtcttccactgcacctcggggtggccctagggagggaactggagtcagctggtattctcatctgtaaggtggggatggcagtagctatcaaccacctcattacagcgtgcgagggttaagtaggagaatgcaaggaagacacttgacatagggctgggtacctggtgcatgctttgcggtagctgttgctattatatactgcaattcatggtgtttgtggatccatgtgaagctggggacagtgagggggctggaggcataagtggaatcagtcctgaatggccgagagcatcttgctcaatattagggtattacatagacaaagaggagctagtcaagggacaaggttagatctgtgttttagaaagagccagctgcagtgcctcatacctgtaattccagcactttgggaggctgaggtgggaggatgccttgaggccaggagttcgaaaccagcttaggcaacatagtgagacctcgtctctgaaatatattttaaaattagctgggcgtggtgatgtacacctctacttccaactacttgggagactgaaacaggaggatcggttgagcccaggatatggagactgcagtgagccctgatcacaccactgcactccagcctgggcaacagagtgagaccctgcctcaaaaaagaataaaaattaattaattaaaagaaaaaaaaggccgggcacggtggctcabgcctgtaatcccagcactttgtgaggccaaggcgggctgatcatgaggtcaggaaatcgagaccatcctggctaacatggtgaaaccctgtctctactaaaaatacaaacaattggccgggtgtggtggcgtgcgcctgtagtcccagctacttgggaggctgaggcaggagaatggcgtgaaccygggaggcggagcttgcagtgagccgagatcgcgccactgtactccagcctgggcgacagagcgagactccgtctcaaaaaaaaaaaaaaaagaaaaagaaaaaagaggctctttggtggctggccctgtggcagacagacggaggcaggaactcagtcagggactgtcgcaagagctggtgatggctggccatgagtgatttaggggggagcttccatagagtttggagcctgttatggcatgtcttggaaaggcattaaaaagtgccactgtaactccagggaacctcttctcctctcattcagcttggcctcttgaggccccctctcctgcccgatccctgggactcaggtctaggtggtacagggatatttcagctccacgtcgagggagggggaacacccacgtggcagggaggcaggcgccttcctctcgcccatgcccctccagccctcctccacttcctcccaaagggccctgccaatgaatctttccaaccctgaccccagcctctgtcctttactccacagatagatgggtggggtgggtgtgggaagggaaccctctaaggggctcaaagtgtctcctttccttgctgtgtctccttkccttgctgcagccaaatagttgtccccaaccctacctccctgatccctgccaggcaggtgtgagtctctgcacacagcacgctcaacaccaggaatatctgcttcgtttctctctaagccctgcttcttctctcaggcctctctaaggatttttgaagagaggaatgcccacccctggggtatgaggtagtctgcagggtggcaccaccagcttcaggacatctgggggtcctctatctgaaactcaagttttactgaaagatgaatcagggagacacacacagacacactcacaggcacatacacacatactttggagtgaaatgcaaaatccgcattcaaagaacactttctctcctgtgcatttatttcgaggcctgtgcaggaggaggctgctgccctttgctctccaagatcttaggttcggatgtaggagaagcccatggggtctctgagtcttttctgactgttccaggtcaccccactccctgttgggtcctttcagcctcactatctcccatgcatagcgctttctaactgcagcttgggccgtgtgcccctcggggttgcccagagctcactgcagggcctgagggcacaggcaggcccgcggcaggcctggcccatagtcgctaaagaagtactggttgcctggtgtctctgcagccaggccagtagggtaaccctctccttccackcctctttcttcccagaacctgaatatccaggtggaggacattcggattcgagccatcctctcaacctaccgcaagcgcaccccagtgatggagggctacgtggaggtgaaggagggcaagacctggaagcagatctgtgacaagcactggacggccaagaattcccgcgtggtctgcggcatgtttggcttccctggggagaggacatacaataccaaagtgtacaagtaagaggactgcaccaaaggggtggctttgagggtatccgccctgcctaaaagagttaaaagtgtccgccctggtggtggcctttccttggccaggcayggccaggcaagctggtgtccctgcaggcagcctgcacagagcccctgggccgggccaggcgccaagttcaagggygccccgtggcatccttacccttaaggaactcacacatctacaggagatagaccctaatccctagagtagcttgtgggaaggcgtattgcagaagtgagatgcaagctgcccccagcccagagaaccccagctcagggtgctgccggccagctcagggactgcacgagctaggctagggcaataccctggccaggctgggcacagacaacaccaacttaagaagaaatatttacttgctcttggcaaatgattcttctgagaaatctggaagttgcagcaggtaattgagacactggtccgtgcagttcacttcatccaatcccagttaaatctgacaatactgtgatgatcgctaaggttaatatttcccagtaggggaaagaagtagacagggacagaacctggagtcattttgacttaaggggtgtccagtggaaggattccagcaccccaacaagctgatggctggcgtatacttggggtatacttggttggtcatggggtgttcctccctcctcttaataatgataggaatactggcttggctttaccaaagacttataatgtgccaggcactattctcagtcatttaatcctcgcaccaccactgggaaataggagtctgttttagagttgagtaaactggagaaaggtgatagaaccaggaaggggcagatccaggcctcacgcacaccctggcctctggaggtcccctgtgtccagctatagggtccacactcttagagggtgcagactcacagcactgtctctttccttccaaatcagaggaagaaaagatgtggcttccatgtcaggagacctggcttgaagccccagctgtacccaccagctccctggggtgccgggcagaccacatatccctccctgatcctggcccagccctgcctggacggggtgggccataattttgtcccagcccccagcccctcacatgggtgggtcagtgcagctgcagagctgcccatttgggtgagcacacaacaccccaggctggccatgatggtgattccagtccccagacatggcccagaccttcctgttggcaccaggagtcgccgtcctctgaatactttggagaactcccacccgactccttccttggtgataccttctcagcttttcttaccagtcggagccaagaaaagcaaaccccctccctggcaggcttcctacctggctggccctaccagtgcccccagcctggctgctgttctamgctggacagcacgcgccttgttcagatggcgtttggaagccatctcccaaccgtggccagtccagagtccttctcggcttttgaggagttgatctcaggccagtttcggcagctgggccctgggtaatcctgtcacgtgctggattggaacccccatcctgcccctcccaccctctcgtctgtggctttgccttttcaaggacggggaggataaggcttccaaggctgagagcgatccaaggagggggtggtgggtggtgctgtctgcaggatgggwgatgaagaacagaagctgctggaaaccagcccctcctgcagccttctagctggagaggtggggctgccttcctagcagaggagtgggaagggaagcacgaccttctcagcttggccctgtcattttgtgttcgtctctgggactcagttgacagttaggcctacatgtgtcccaaagagaaaggtgctgggaaggctttctgtgcctcggtgggctgtcggggctgagctgccagcaaagggctaggactcctagggaatgataaggctcagagaccactggcctaagccctgggtctgcctggaagagaacatggaagaggcctgaagggcagtggactcagggtgtcacagcccacacccagcagagcctgcaggacagcccaggtctgcttcagggagagcaccacccagcagtctccacctgctggccctgctgcagctcctcttctcccgggggtagggccagctcagaagctctggccagtctgagggttgtggcaggactggcctgggactagggatatccatgggcgctgctcagaagctgaggactgcagaggtctggaaggcagactgaggaccaccaccctgcccggcccttgaagcagtggcttgcagttgcatctttcccatgtccctttccctcttcctacagcctgyggctgctgttgctggcagcacacctctgaggcccaagaagggacccccttccctcccgccatgcagcactgcccactctgcaggaaattattttcaragtaattcccagtctggggtggagttagtaatctccatgtatccaccaaggcccgtgaaggaccttatagcctcggaagctcacctgcttaacccccgagggccccccaccttgggcccccccaccccgctgctgccttactggactggctccctctgtgaacctgctgggctggtggccactcggaagcctkagagctgccccctggccaccaactgcagctcttcctcagcacctctgcttcccctagtgatacggtttggctgtgtccccacccaaatctcatcttgaattgtggctcccataaccccacatgtcgtgggagggacccagtgggaggtaactgaatcatgggtgtgggtttttcccatgctgttctcatgatagtgaataagtctcatgagacctgatggttttataaaggccagttcccctgcacacgctctcttgcctgctgtcatgtaagacgtgcctttgttcctccttcaccttctgccatgatggtgaggcttccccagtcacgtgaaactgttgagcttattgaacctctttcctttataaattacccaggctcgggtatgtctttattagcagcatgagaatggactaataccctccagttacctgcacataccccagaggtctctgcagccacaggcttgccaaaagtagagtcaggggctcctcaccaaggcctgctctctgattggtgtggccgtggcactgacttccacaccgggctggggtgcaatgcatgtaccttaaagctaatgaagcttaaacttcaggcccccattcctggtgccaagagggagcattttgtagtcataattttgttctcccaaaagtaggatcccaatactgacatcatttaattgaaatgagctctctaagcagagattctgcatttaatgttgcagctgaggaagttagaaaggcctccagcggtttgcctggttggttggctgaaatgtggaccaaagtgtggcccacagtgagtgagtagaaatgctgaccctgcctctgttgtgtgtagaggacagaattcaaaagcttagggaggttggatgttagagtggatcttacctttaagacctcctcacccacgctgggaagctcctgaagacaygcctttcaccttgatggtgagaagtaaatatatgaaaggagctccagcctccttgaggagctgtgatcactcttctctgaaggccagacctcacagcaggaacagcagccactgaaccagtaacctgaatgcgaccggagtaattggctccagggtggcgggggccccgtggctgtagtactaccaaaggcaaggtggacgtgctgaccctattggacagtggagtcaaagcagaaatcagtctgactgctgcagacctgtggtgttggctggttgatcatgatgttcctcgaagtgaaatagacaggaagcctactaagttcgtacttaatctgtrtaagcagaaaacttctaggtcaagcaaacaaaagtctatcccaaatcataaaagcagagtagagtcatgacccctcaatccattcccgtacttgagccagttttatcagactggaagctcttgaatgagggaaaggctgggtaccctcaaggaagcaccctcgtagcctgccagaaatctatactgtattctttctcccagttctccaaagacacctttcaccaggatgagcgtgcattggagaaaaggaaataatcagatcttttggactactggccactggttctgagctgacagtaattctaggagacccagaacatcaaagtgggggcttatgggtttttagcttacgtccatctgaaacccattctgtgctatttccccacttccggaaagcatcatggaaatagatgtactcagcagctggcagaatcccacggcatctgccttcactcttggcaaggggagcaccggtcggtaggactcttggttgaatcagtccagctccgtgttcttcctacagtccagctattggcctagctgcctctttcacaggcaggcttcccgctccactccactcaaggctgcctcactcactccagtcactcctccagtctccaggtctggagcggggtgggctgtcttccaccctccgtgggcctccgtctgcagctcagaggcctgtccccagtgaaacactgggatggaggaggggaggggagggtatcccctgggaggcctgaacgtgctagagggtctgcagcacattcctgggggctgatgtcagagggatccgggctgctggggacagttgtttgctgtgggctctgcactcttcatttagaacgcaggacatctgttcctggagagggtggcgctcactgacggctggaagcagaggggttttcctgagccaaggcaggcggtgaggtctgaccaatcctcgagcagctggtgttcccccgagtatcttctccygcccctgtgtgggcgtcatggaacatgctgtaagcttccaagtgcaggggccttgcaggaagtgtgtctggagggcagtggttcctggaattattaatagccctcctgagcagttctctgccctgggctgccgctgtggtgagcacgcaccctgaatttgccaggatagtcctcagcaagattccgtgtcattgtgttcacaagcacactagaattgtaacaagtctcagatttgggttaaggagagatgataactgtgtctgtaggatttgcccttcctctgtcttcacaccccattcactctgagacaaaggaggtacttccagggctgctggaccagcagggatgggacctcgcctctgccctgtcttggggtcagcctgcccagcgagtaccctctgctggctccttctggcatcttactgggtcctgccgtgcagggacaagcacacgggccctgaaaagctgggtcgacatgagcaggtagcagggccttcctggacctcctttgtttcagatcccaccatcattcagggcccaatttaaaggcttctcttccgtaaagtctcccatcactccaaccatggaatccctccctcctgtcactcttctttttttttctttaacaaatacagttttatttatttacttatttatttcacaaactcttatgtagctcttcctatctctgggcactgttttaagtgacaagtattaactcatttaaactgtcacaacaggccaggcactgacgcatgcctataatcccagcactttgggaggcagaggtggccagatcaccagaggtcaggacttcgagaccaccctggtcccaggagacctcaacttctccagagttctagcctcttcttaaagggccagagtcatgggaacccagatggggtgagggggtctcctgccacggcctccttacaatgatatgacttggcataaatttggatactacctccaaatacagatttatggtctggcgtgatagctcattcctgtaatcccaacgctttgggaggccgagggaggcagattacctgaggtcaggagttcgagagcagcctggcaacacggtgaaacactgtctctactaaaaatacaaaattagccggatgtggtggcaggtacctgtaatcccagctacacgggaggctgaagcaggagaattccttgaacctgggaggtggaggttgcagtgagttaagatcgcgccaaagcactccagcctgggcaacagagtgagactccayctcaaaaaaaaaaaaacaacaacaaataaataaactgtcacaataatctagtgaagcagatactattactacttctgattttggacatgagaaactgaggtacagtatcctttttggtagccaatctattacttatcagttggttactgttttagaaaaaaaaaaactgaattacctgcatctatattctgcctttaaaaaaaaacatacaaaggaacactttgcacatgttaacaatacaggctaagggcttccttaggatatggtacagagacaagctcaacctcactgatcttcctgggtgcaggaagcagtagttgcattaccattataatttctattgctaggcagattgtactttgattcagcagatggagtaatttaagactgttttcattgtttctcattggaaatacaaatttaatcttgtatatcgttgggagagtttagcaatcagcttgtactgctcattgacaaagaaaaataaagctaaagaatgacaacaggcygggcacagtggcccatgcctataatcccagcactttgggaggccgaggcaggcagatcatttgagatcaggagtttgagaccatcctggccaacatggcgaaaccccgtctctactaaaaatacaaaaattagctgggcgtggtggcaggtacctgtagtcccagctactcaggaggctgaggctgcagaattgcttgaatgtgggaggcagaggttgcagtgattgcaccactgcacttctgcctgggggaatagagtgagactctgtctcagaaaaaaaaaagaatgacaacaaattttgttggaattatctgaagagttagggtaaacatggtttaccttcgactgtgaggggttttctaggaccagggatctcacctgttttaaatacgtttgtgcattctgtgttcctgggctttattattattatttcaccacattgagtgagtcctttctttcctagaatggaagctgcctgagggcaggaggccttgtccaccctctgcgtcctgtcccccagtgcctagtgtggtgcaggcattagcaggtgctcagtgaatgctggcagaatggactgagctgggaccctctgtgaagcagggctgagctccaggagcagggcccagtctctcatgttctgcctcgttgcagaaggaatcggggtaggcgtcatgatgccctggtcccctgtcccctcccatcgtctgcagaatgtttgcctcacggaggaagcagcgctactggccattctccatggactgcaccggcacagaggcccacatctccagctgcaagctgggcccccaggtgtcactggaccccatgaagaatgtcacctgcgagaatgggctrccggccgtggtgagttgtgtgcctgggcaggtcttcagscctgacggaccctcragattccggaaagcrtacaagccaraggtgaggacggggcaygaggtgtggccacttggcacctggaggggatgggagggtgttgagggagtaggcagkatcccccaggagagtgaggaagggtggcctcagcggagatcaccattgtggctgctttactctgagacctgagygccctmtgcagagaaggaccayctgggggagaagaataccccagcatcagttgtcacaggctgttggtgcgctgtccgcttacccagcaggagcagacgatgaagggttgtgcgacagggaccttgtgtccctgcacagttcccaaaggacagctggaaatgtgacccaactctgaaaagcacatgcagtcagcgacacatttgcaagcatgtttggtttattttgcaacagaaagggtaacaattttaaaaagcttccaccaaggtagaaaacctgccattatcctaagtcatctatacattagtcacattatacttatgtgaaacaccccccctctgtggggggggtgtatgtgtatgggggtgtgtgtatgagtctgtgcgtgtgtatgagtgtgtgtgtatgtgtgcgggggtgagtgtgtgggtgtgtatgagtgggggtgtatgagtgtgggtatgagtgtgggggggtgtatgagtgtgtatgagtgggggtgtgtatgagtttatgggggtgtatgagtgtgtgtgtatgagtgcatgtgtatgagtgtgtggggggtgtatgagtgtgtgtatgagtgtgggggggtgtatgagcgtgtgagtgtgggtgtgtatgagtgggtgtgttgggtgtgtatgattgtgaggggtgtctgggggggatgtgtgcgtgggtgtgtgtgtatgagtgtgggtgtgtgggggtgtatgagtgggggtgtgtgtagggatgtgtatgtgtgtgtatgagtgggggggtatgggagtgtgtggggggtatgtgtgtgggtgtgtctgtaggagtgtgtggggtgtgtttgtgggtgtgtggcggtgtgtgtatgagtgtgtgtgtatgagtgtgtatgtggggtgtgtgtgggtgtgtatgagtgtgggggtgtatgtgggggttgtgtatgtgtgtagggggtgtgtatgaatgtgtgtgggggtctgtgtgggttgtgtgtatgtgtgggtggtgtgtataagtgtgtgggggtgtgagtgtgtaggggttgtgtggggtgggtgtgggtgtgtgtggggtgtgtgtgtgtgtgtgagagagtgtgagtgtgtgtgtgagtgtattcctgaaatgcagatgaacatcttcccatataaagtaacagccccatttcaatgggccgatttcttttttcttttcttttcttttcttcttcttcttcttttttttttttttgagacagagtttcactcttgttgccaggctggagtgcaatggcatgatcttggttcactgcaacctccggctcctgggttcacgcgattctcctgcctcggcctcccaagtagctgagatgacaggcacccgccaccacgcctcgctaatttttgtatttttagtagagatggggtttcaccatgttggccaggctagtcttgaactcctgacctcagatggcccacccgcctcagcctcccaaagtgctgggattacagatgtgagccactggccgatttcctagaacaagtaaagtagtccaaccacagcaggcttgacccagcctctgacaaagagcaaatgccctatctgtctcttcttgattcgcttttctttctcctcctcttcctttttcctgtatccatcaaagggtctctgtgatttctgtgttcaggaaacagcgaatatcttgtgagtgggtgggaatagcaactgggaagaggagagggagggataggagaagtgaccgatcatttctcaggggctgatgccctgtgccaggtaaaacctcagtacttagtgcactgtttgctgacgcggcatgagtagatgagacagcatctgattagcgtgatgatcgtagtaatcatcaccttggcaggggtgagttccaggtgggctgtcaccaagtcagggataagagagagccagaggagggagaagggctctggggtgggggcagagagtgtgtcagccaggtccaggcagccaggcaggagcagcagaggctgagccaaccagctttcccccagccatgcccttttggctcctctcctgtcccctccctctttcccctctcccctccccggtctcccctctttgttgagacctgctgtggaaaggaggttattacactcctccaatataaaagggacaccgtgacaagagccggataaaccacactgggtgcccccatcccaggcttggtggagatttgaacaaaagactgagccttcagtgagaggagtgaaatgcatgctgggagcccagccctcctcaaccagagggagtgggaactatcaggagtgacttcctggcaatttcaggaggccctgcctcctcagtcccctcaagagcctctgaagagcacagaggggaccacaccatcatatgtgtgcctccaggacacgcctggacagcgccatgtccctctcctccgacaatcagtccaccaccccccaaacccccaccacaccctgcttgccccctgtgtatgatttgatggccacatcctttccacagcctcagcctgagcctctgagctttccttgtgtgtcatccagaataccagatcctactgttttggaattcctctactgtgcggtttaaagcaaaggaatcaagttcataccaaaccaattaaaacagagcgagcgtgccttacatcatattttcccttggyttctttctttcctctggggccagctgactgcttggccatagctgggctggggcgaggttatttgacctctgcctccattaagcttaggtcatggatggtccattctgtgggaagacagcttgggaagggaggtcagggaagcaggaggccaccattctacagaaaacagaggttgcagccagccagtagttatgcgtgttttgttctgtttggattttttttgttttattttgttttgttttgttttgttttgagacggagtctcgctctttcgcccaggccagaatgcagtggcgcaatctcggctcactgcaagctccgcctcccgggttcacgccattctcctgcctcagcctcccgagtagctgggactacaggcacccgccaccgcacctggctaattttttgtatttttttgttttttagtagagacggggtttcaccatgttagccaggatggtctcaatctcctgacctcgtgatccacccgccttggcctcccaaagtgctgggattacaggcgtgagccaccgcacctggccctgtttgggtttttttttaaagctagggtaaaagatcctgcagtcactggctgttttccccttttttcttctccccatactgcgggggtcagagcagtccctgaggtctgtaaatctgggtgctgtcccagcaccccaccatgccatggccagccccaaggtacaattggtagagaggcaggttcttgtatgatgccatcccgctgaaggtagctggtggacatgaatgcttgaaaaggtcatctccacccaggcctgcctcgccgtggccatcagtggtagggtgaaggcagttctgggctaaggacaacataggctagggcaggcaatgactctggtctgatatgacacacctagaatggctacacagtcttcctcactccctctgtggagttgaatgagcatcagcagtagctgagagcctcataggcttctgagcctcctccaaaacacacacacgcatacatgcagcatgcatgcaggtgagcttacacacacacgtgccacacatgcagagaaacagatgcaaacctgggtatgtggacagctggagtcaartgacccagctcccatcttgtaagacatgatgcactgtggccaagacgtagagagtcttactcctgtctaactcagtaaagcccacaaggagattaaagcttccagactgtcagtgaacactgggggtgtttaaactctaattctccaccctctctgcatagctgattgggctgcatcttctggagtcaggccaatttggacttggagtcaaattgagggaggctgggcatgcccccagccctgggacaaatcagtatgaggctccccatccattctctgagtcatggctgtatgaaggttggctttccagctgcctgtcttcccgttctgctccctcctgcctctagctggtgtgcacagcagaatcgttccagtgcctgcctagtactttggagtctctgcaggcctagactgtagcactgtgttataagcaaggttgatccaaacttgcttagaagcaaccttgttacaagaaagaattattatccatttggaatctgcagactttggagggtaggcgcttctttctgtagctctgaagcatgaggctctggagttggtgggggacgtgctgatggaaggatccttgtgccacgcaaaggttggggtgatgagtgatcgacggtccccaatgggctccccaggggaccaggacagaagctccacgcgagggctgcaaagggagcttgcaccagagctgactctatagaggaagctcccacaccccaacacacccacgacacacacacacacacacacacacacacacacacacatccatacatcaagcatagttgcagctcccagactgagtgcctggcctgggaacagggtggcagggaagggagggggcggggacagtggtcacccgctgaacgtgcatcagcgtctgtactcagcaggaccgtgtgtctcttcagcaacccctggtgcgactgagaggcggtgcctacatcggggagggccgcrtggaggtgctcaaaaatggagartgggggaccgtctgcgacgacaagtgggacctggtgtcggccagtgtggtctgcagagagctgggctttgggagtgccaaagaggcagtcactggctcccgactggggcaaggtaaggaatggggaggctagagggggcctctcttcctgggagcatggtgccgtgagcccagcctggctgctggccgtgagctctcgggaaatcctcactttccctcctccctttagtggctgcctgggagagaatcccaggcctctccctagacagagttgaaaggggccttagagaacactgagaccctattttatagatttggaagcagaggcccaaaagacggagtaaacatccaaggtgagataacatattagcagccaatgaatactcccccgtaggtctcccagctcctaacccagtgctctctgctgycttaccaaaaaacgccagggttctcaggcccctcctgcaggagagggcctccgagttcaccagactgaaccactctgtacaacaaaaggaccaaatgccatcttacttttcctccctggagcagccctgcacacactccctccctgacagcagagaaagggaacaagaagccgccctccggatgtcctcagactaattgagaaagggcctgctttttattaactgtcctgaacaaatctttcatgtgagcaaaaaaacggaagggaggctttcaagtgggtccgttggtggaaagtgatgttgcagctagaagacgacacagaagaggtcatttctcctccccaggaagccccacgaccaccatttatccttgcgagccttggtcattcaacagggggagattttaccccgaacagactgtgcggtctaggagtgcccagtcttccccgagacaactgtgacttgagtgagggaagtcatggtcatttcctggaatcttttcagccttgaccagcagggaggccgctgcagaccgtcggctgctatggctgggaagggataggtaggaagcagaataggctacagacaaggggtggggtggcctgtccagtggggaggggatatttccatagtgtcagatgttgggccatcaccccacagaaaggaatgtggtgaggtcactgatcacagcctggaagaaatgatagccctcactagcccagggcctsacaccacatccagtggttttctgtgtgagactgtagaatcctgcattgaacttaacctccagctgagtcaaagaccgtagagctttcctccttctagaagtggagctcatctgtctagtgccattggttggttctttctacggcctacccatgccctagcctgcagtgggtcagctcttacagggtgccctgacgttggaaggaagcccgcattccagtggcctcgagagagtcctgaaatgatggacagtactgctggagagacctcaggtcctctagtccaagagwtgaggagaacaagtctgaggtcaccccattcattgctggcagagaaagactgaaagccaagtcttctaactctcagacaagggcttcttccttatgcccaccttggcccagtcctgttcacattcagaatgtctctctgcctctgttctccagtctgtgcaagcttccaggtgtgcactgaagtttggaggtctggggtgcactctgagtcacatcatgccacctggcagcttccattgggccatataacagtgctccttccctgggcatggtgagctccacaggatcccctggatcttttttkgagacagagtctcactcagtcacccagcacagtggcgcgatctcggctcactgcaacctctgcctccccggttcaagcaattatcctgcctcagcctcccaggtagcttggattatgggtgtgcaccaccacacycagctaatttttgtatttttagtaaagacggggtttcaccatgttggccaggctggtcttgaactcctgacctcaagtgatccacccacctcggtctmccaaagtgctgggattatagacacgagccactgcacctggcctccctggatcttgactatccctgcagtcatttactgattggccgatgtgtgggtttgtgctctccaagggcctacaggacaaagaccactcattctgaggaataaacaggccctcratgacataaacwttccatttatcatgggtgtgtgctatgtgacctaatcatttcactgcccagagcagccagaggtttccaggggcctgcagaactctgggagaaagaggcatttggcattttggatgctgtccttgtaagaagcagtggatgattgatatctcctgtcatgctgggcagggtcaactctagtaggcagaaagggaaaagtaccacatttaatgtcaagtcacagagcagacagggtcagcccctcagccctggctctagctgatggactcagtgaccacacccacagccacgaggcatgaaagggcaatgactgtgagtcgggcaatctgagtcctcctccctgcccagccacctgcttgcttggtgaccttgagcaaccttctgggcctcagattcttcactgtgaaacaaggtggctggacgcacagcacctgcagctctgactggctccagcctcaccagcatagacatgaggtcctggtcaggctctctgctctgtgccttaggacccctgcccayatcgggaccccaactgcctgttggtgcctccatgtccctgcaaggctgcgtgccacatgaggggagcacctgtgtctttatctctgtgtgcttagtgccgagtccgccagcatgcagcgctccagtgctattcagttgtaaggaatgaatgaatgtgttccagttgaatcagtaggatcagtagaacaaatacttggtgaagaagttccaacactagaccggtgctgtctgatagaaacagaacaggactcacgcctgtaatcccaggactttgggaagcagaggcaggaggatcacttgagcctgggagttcaagacgagcctgggcaacatagtgagaccccctctctacaaaatttttttaaaaattagccagacatggtggtacacacctgtggtcccagctactcagaaggctgaggtgggaggatcacttgagccctcgaggtaggctgcagtgaaccatgatcatgtcactgcactccagcttgagtgacatagcgagactctgtctctcaaaaagaaaacaaatagaaccggaaccacgcatgtaactttgcattttctagtagccacaattttaaaaagatgacgttagctttaataatgtattttctttaaaccagtgtatccaaaatattatttcaacatrtaatcaatatgaatgctattaatgagatcatttgcatatttggtgctaagtctttgaaatccagtatgtattttacacttaacagacctctcagtttgtctgcatttctgagtagacaaactggctggctacatttcaagtgctcaatagccacatgcagctggtggctcctgtactggagggggcagctccccagttttacagcagtggcttgaaaacccttttgcatgcagtccccaagaaggaatgcatgtgacatgtaaaactccagcaaaggttttctaaacaagagcttagctttacaatatgcagaacccgtgacatgtcctattctgttctcttgtgcttcctacaatctgaatgtaaccagcttagttgacagttcagcccactcattggcctggacccatggaagccrtaacactgctctatgatgttagacgcggcttttccactgtgccctaattctgcctcacgccttgtggtcacctaggccagggtttgtatgtggagaagaacagagccaaggtggagacggggaaggcaccatgaggaggagcaattcaggggtgctccagaacacaggagtaggtgacagctgcaggtcaaggatgcagaatgccaagcccaggtcagcagaaggaaccagaagtccacagacacccagacgctgaagccagacacccagtccrgtgtccttcggagcctcttccaccctgcccaamcccccacggaactcagtggggcaggaagagagtgagccacactgggcctctttctctgtgcccttccttggacgcaccatgggtatgtgtgcttcaggagggaggccctgccccccrgagccttgtccccagatgtctgagacagccacgcaagtttacatagacgttcagccacaaggagactgaccccagatggctgagacagccacgcaagtttayacagaagttcagccagaaggagaccaaccagttgagtctgaagcatgctaggctcttaagttggctttacctgtcctgtccagtcttgagctgtagtcttagcaatccacaaacactgtttgagtgcttttcagcctggatcctggaatgaagaatycatttattccacaaatgctccgctctccaggagttcatgtcaagtggcagaaataagaaataaccttaatcaggccaggcatggtggcttgcatctgtaatcccagcactttgggaggccgaggcgggcagatcacaaggtcaagagatcgagaccatcctggccaacatggtgaaaccccatgtctactaaaaacacaaaaattagcygggcatggtggcatgtgcctgtatttccagctactcaggaggccaaggcagaagaatcgcttgaacctgggaggtggaggttgcagtgagccgagatggcgtcactgcactccagcctgggcaacagagcaagacttcgtcccacccccactccccccaaaaaaaaatcccgatctggcaaaacacatattataattaattggccttttacaaatgaggaaggtagagctaaagcttttatcactctccaaggattcaacctaatcttcaacctcaagctgaattcaatctcaggctgcctgcccagctcattgccgcttgagcaagatgtgtaaaaagcaaaagttcagacaagtgggaggtctttgaagctgcaccatggaggaggctggaggtttttcttcaaggcaggcttctccttaggtggaggcagaaagaggrcagtgcaggaggcaggagacagcgagggcttccctagagggaggagagcgtgggcgtttggaccagatcagcccagctgtttcccagacagaaccttctgctctttcctaacatagggttttctctcctgactgtctctgtgcccatgagctgtgggccttgcttgcttcctgggctctgattaggatcggtgccttgtcacagcctttccacgctagtccttcgatgcttccagccaccatcaccgatgcatttttatgcattttataaaattccaaagaattggaagcatcatcatttatgagtttccaaggaaataggaacttggctcctgcctgmtaatattggttgatctagaagttggtttttggcctcagtaagcctsgataccagctgtctccagaactctccggcagagtcgagggccctcctttaagccccagagcacctgttgtgaccttcatctttgttactgaccatgtcatatcacaagcatttgtgtaagttctgcctcccccaggaactgggagctcttcggggcaggggcctgccttacccatctttgaatcctcagcccctagcagggaggcagagggtaacgggcgtggtatctatgcctgtgtcactagctcctgagtactggactgtgctctgtgatttcccttcactccatccatacctttatttttaaaatccctttttctaactcaatccaatttgtacatgccatctgtttcctgcagggacccttgacagatacagcaatagttgtacctttgagattcataaatgcatggaatattaaagtcgggaaggaaacttatacaacttctagtccaattcctttggactagaaaaaggatgagagaaractggtattcagagaggctgagtgatyggccaaggtcacacagcaaatcagtagcaaactttatttgctcttgggggataagtgaatcccaagagaattagcactgttctctctggggagaagaggcttgggtcattgagctgattacaagaggcagtggggagagttctgaggatgggagaggcatgttcttattgtccagggctttcttgccactccagaaagtttccttccaaagctttcatagagcatgtttattctccccttgcagggatcggacccatccacctcaacgagatccagtgcacaggcaatgagaagtccattatagactgcaagttcaatgccgagtctcagggctgcaaccacgaggaggatgctggtgtgagatgcaacacccctgccatgggcttgcagaagaaggtgatgggactggacacctagaggggactgtaactgaggctgcagaaagtatagccacagagctctggggtgaaccctggaagtgaccaggtgctgctgctagtactgctgcagacattgccacttggyatttgcartgtttagttccccctcgaacctcgggcctggccctggcccggcagcaggcccaagcccctgtgtgcagtgtgagctggaaaggccctgcctccttgcatgttaacatctgaggtgagttacctcacctctgccccaccacctccaaagacaggcgtgggacyggctagccacaaccttatcaaaacacggtgcagcctggctgtgctctgctggctggaggcgttctgtttcctctattcatgttcagaaaaaaactgggctgccacacacttcgctccyttctttaaaaccctgtgctgctgccactgagaaccaaaggaacaggaaaagggaaatgcctgggctgttttaagagacttggaaagggcttgaccttccctggcatcctccttgggtgaggaggtggagagggtgaggacagaggctcctggctgaccatgaggtcccatacgctccattgtcactggtgaggtcagaccccgctcaccagaaagccacacggtttccaggatgctgacgctctacatggggctctgggaatggcaagctgtgtcctttgctgagttagaactgcwtgccagctacactgtgcgccccagtctyctgtagaaaatgagaaaagccccccagtgcatgaagtgtccagattccttccggaacagtcaaaccttctctctgtcctagaggccatcccrggcctggtaagccttaacgccttggagccttggcaggtgcccttggtgaccatgtgttttcctggccccagaggcaacgaggcagccacattccgcagccagagcctctgagacttgccttggctttaggacctagagcaggaacactgctctggctcaggcaagagatgagggagggtagggaaggactggmgggaagtggatgcattggagagaggagagataaaacccacaggtgaagaccgacaggatgtgagataagagagtgggagatgtcaagaattgctcctctgtttctggcttgaataacagcagattcaggagccaagaaactatgatatgtggccaagcccacccctcctcctggttttttattcatttgttttttgagacagggtcttgctctgttgcccaagctggagtgcagtggtatgatcatagcccactgcaacctgaaacttctgggctcaagggatcctcccacctcccgagtagcggggactacaggtatgcaccaccatacctggctcattttttaaacttatttttttgtagagatggggtctcactatgttgygcaggctggtctcaaaaccctgggcttaagtgatcctcccaccttggscccgcaaagtgctgggattacaggcatgagctaccatacccagcctcttttttaarataaagttgtatcggaacatggccacacccggtcatttagggtaaagagaaaagacarcaagttcagatttgtgatctctgagataccaagtggggttgtcaaacaggcagctggttaggtgggcctcagaccagcaggagagccatgggacaagatgccagtggctctggaacccgccaggtaggggatgtggcaaagagaaaagtgcccaggcaggagtcttgtgggattccaacatgtcaaggtcccgagggcaccatcctcccaaagagcagccccccactgataggctcrtggggagcagggtcagcttctgctgtggggctcagtggagtcacagggcctccccagctgcttagggtgcctggggtggggacctcactataagaccatgctaggcacagcgctgccaccgggggctcccaagggtgctgctgaatctgagtgtgtcccgggcagcaccacctggcttaggactccaggacactggggctgatggcagcgtagtggggaagctcccttgtccctcttggtgaccgtggcctgcctttgtgtctgcagctgcgcctgaacggcggccgcaatccctacgagggccgagtggaggtgctggtggagagaaacgggtcycttgtgtgggggatggwgtgtggccaaaactggggcatcgtggaggccatggtggtctgccgccagctgggcctgggattcgccagcaacgccttccaggtgagaagccccggcctcagaccccgcattcaccccccatgcagtctgaccacactgtcttcagtcagcccccctctcccacrtaccctccctagccgtgcaggcaggacagagcaagttgccctggacccagaggcagggagcctcgctctggccacagcgctgctccttacaggcctgagtcctcgggcaggtcgctcccatctctgcctctatttctcggctgcagaacgaggggctgggctctgcttttcatggtccactcctgctctgcacactggggttcacyctgggctcaagactgatcctgggggktcctgatgtgccttgtgcagaaggaaccaactcagtctttcggggaggtggtgacccccagcccaaggctcaacccccgctaaacgccttagcttgctcccttgaaacccgctctggtctgaacacgtttccccgctggcatctgtgcctaatgcattctcccattgacacgctagggaatctccaagccttgtcacatcagctgcacttcctcccactgccccctctccaaagagagtgactcagctgagaacagctgagctctggtcctagttcccaccctcccgcccccatcacagagcagcaacaaaataggaggctctgggtctaatcccgacgcattcccaccagctggctgtgtaatggtctgaggcaaagcagccacccttccctgcctcagttgtcctccctgtgacatggaatgaataatcccaagacctcagtatcctggttgtaaacacttccattaagcagcttacataacgggaagatgcttggagaccctgctcttgtgttgttaaccctgactccagctctccttccccagtggtccttcttggggcctaagaaaggggtttagggagagaagaggagaattcctgcatccttactgagcctgactgtctcccatgggctgggtgggtcccaggttgctccaatgggaggtcctgagccctgagcagaagctgcctgggatcccctgccctgtggctcctcattccggcatccagaagrgacaggcctttaaaatagctgcttacgccctctgggagcttggcctccccaggcaaygcagtgtttctgctaatattgtttatgacaagccagggcactctctaaatctccaaggagagtggaaaaacggtgccacatttcaagggagtcttcaaccagatatttttcttcccagtcagctcattcctaagacacctgggcctcagctggggtcttgaaataggcctgggactgacatttgtaccaaatctgccactgattacaagccccatcccttctcaagtcctcatttttttcatctggaggatggaggtgggtattggtcaagttctctagagaaacaaaaccagtaggttgtatgaatgtgtatttttgtgtgtgtgtgtgtgtgtgtgtgtgtgtgtgtgtgctatcaaccaataggatgtatgaatgtgtgtttatatatgtgtatgtatatctctcacacacacagcatgaagaaagatatttcttttaaggaattggctcatccaattatggggctggcaggtctgaagtytgcagagtagaccagcyggctggaagcattgatgttgcagctagagtctgaagtcagtctgtggtcagaatggcttcttccttgggaggcctcaggttttttgggttttttttttttttaccccttaagatcctcaaccgattggataagaattgcccatattatggagggtaatctgccttactcaaagtctactgattaaaatgttaatctcatctaaaaacagcctcacgtaagcatctagaatagtgtttgaccaaatatctgggtactgtggcttagccaagttgacacgtaaaatgaaccatcacaggagagtttagatgagatactaatacttccaaggcccttcctatcctgatggtctgtctctgacgatcccgagaagacctccctgagctctaatcctgcctcagcctccaagcccgagagacctgaggaacacagcacctgtgttctcatcccgtttctgtacctgacgatcccaattctgctcctcatttttctctgctggaaacttctctgaagtgtgagagtaaatcctaacagtatttcgaaggcccatagagcaaaggggccaaataaatcccagcatcctaagcctcggatctcctcagcttctgtgcagaactactctattaattgctctttaaactggggaaaagtctaaattcagaagttcgtctttataacatgtctaatgattgacctatgcgaatagatttcttcttctctcccaccacttccaatcaaccagtaacatcttcctggagcactgtgttgagaaggattctgagatcctattcgggcttagaggagagagtgctgtgattgattagcaatgtctgccctggatcaggactggggagtgggcaacctgagttgtgtgcacctgccattcctgacacacagccttgcagtgtytgaccacaaccttagctctacttccctgagggagagagtgacagagtccaagtgctayrstcaggagacctggattcccactcactctgccaccaactaactgcacagcttggataggtgaccctccgtgctgtytcgatctgaaaaatgggatcatgaaacattgggatttttgtgaggctgcaagttgataggatatgagaaagtgacagttwgagatgatgtacccaccatttgttttgttggttcttccaggagacctggtattggcacggagatgtcaacagcaacaaaktggtcatgagtggagtgaagtgctcgggaacggagctgtccctggcgcactgccgccacgacggggaggacgtggcctgcccccagggyggagtgcagtacggggcyggagttgcctgctcagaaagtgagagctcctcccctccctccccaccrggctcccraggggaccagagtcccaccagttattcctcaagagactctgaagccttgccatgagccaagcaatagaggaaggtagaatgaaatcctaagggagaaaaactgggggcaagagagatgaccgccaccccaaccacagatcgctgtctatgatgtagtggggagaaaagcgggagggaggggctgcagtctgtagcccggattcastcacaggaccactgctactgcagtgacccagggcagactacaygactgagagtgcctccgtcatgccagttaaatgagrtcgatgacatcttccatgggtgttggcttcctccctccacctcctctgtagagcatttcctgttttcagaccctggaggtcacttagctgcccggtggttcgctgggagtcctagagagattgagcccacagaagggaatgccagccaggattcaggatgacccacttcctgaagcctccctcccatgctgagagaagaggagcagtagacaaccttttggaatgctgccctcctgagcccaaacccagccctccctttcctggccttgtaatataaacccacacgcagccatctccattgggaggcccaggtgctggccagagaacttgagaccagaccctgccttattggctgatcttggaaaagcgtgtcagcctctgtggtctttagttgtagttttccctagaaattagaaatcaagtgtgacaattaatatgtgcaagggcttcataaacaaagatgcactgtcatcctgccatcacggagaacgcgggattgaacagcagctgcgtctcccaccaaccccttttagactcactagcatctccyagcccttgcaaagcaggacctcagggcaggcttcgctgggcagacatcacaagctatcacatccttgtgagaggagagatggcgagatcaccatcttaccagctccccgggggaaagcatcccagcaragaggaacagccacttccctgtcgggggccttttctttatttatcaatttatttatatttgcaatatcccatcttttccagaaggaaatgaagataatacaaacctaaatacaattyaagatagcataaaataaaaacagatgaaagayagacaggtgctggcaaaatggtagtggcttaaaatggagccagggaggggttaattttacaaatgtgtactagggggttctatgcatttattatgagtaggtcattcatttcacagtgagcttcctagcagccagagcaaagagaatactggtcattaatataactaacagtacctgtgagatagaaatatggctgtgagtcaagagaagcccaccactctagagattaaagggaatttctctctgaggactgagatttaygagatgagccatgccgtcagatcctcatgggagatccaaaaatgagtttcatggggcgatttctcagaatgctccacagcttaggctgaagcatcactgggagtgtgtctgcagcggggcagtaggctttggggccaggaacacagctcttggctgctctggctaaatgcacgttagagtattcagggaaataaagtaattcttcaggcaacccttcataatatcttattctcaccccaccaactgcatatgctagaaatctacacaacctccttgattctccctcttccccaccacccccatgtccagtccctcttgatttttacctttcagtattttctcaaccttctgtatgtctttccctgccactgttgctgcctgtgtccagatgaccacacagcatcactgcaaaggagatccctacagtgatacgtggccctgcggtggcttcccctcctctcccctccccaaagccagagccaaggccacgtcccacttaaatcccacccaagggtcccactgcacttccgtgaccaggggctcgcacggggcttgtgttgtccagcctcctcgctggccaccccctcccatcctcagtgactgcaccacactggctttgaccctccgtggtgccgcaggggcctggcacaggctacttgttttttgttgttgtttttttccttttttatttttatttttattttttttcttttttctttttatttatgtatttatgtatttattattattatactttaagttttaaggtacatgtgcacaatgtgcaggttagttacatatgtatacatgtgccatgctggtgcgctgcacccactaactcgtcatctagcattaggtatatctcccagtgctatccctcccctctccccgcaccccacaacagtccccagagtgtgatgttccccttcctgtgtccgtgtgttctcattgttcaattcccacctatgagtgagaatatgcggtgtttggttttttgttcttgcgatagtttactgagaatgatgatttccaatttcatccatgtccctacaaaggacatgaactcatcattttttatggctgcatagtattccatggtgtatatgtgccacattttcttaatccagtctatcattgttggacatttgggttggttccaagtctttgctatcgtgaatagtgccgcaatacacatacgtgtgcatgtgtctttatagcagcatgatttatagtcctttgggtatatacccagtaatgggatggctgggtcaaatggtatttctagttctagatccctgaggaatcgccacactgacttccacaatggttgaactagtttacagtcccaccaacagtgtaaaagtgttcctatctctctacatcctctccagcacctgttgttccctgacttttgaatgattgccattctaactggtgtgagatggtatctcattgtggttttgatttgcatttctctgatggccagtgatggtgagcattttttcatgtgttttttggctgcataaatgtcttcttttgagaagtgtctgttcatatccttygcccactttttgatggggttgtttgtttttttcttgtaaatttgtttgagttcattgtagattctggatattagccctttgtcagatgagtaggttgccaaaattttctcccattttgtaggttgcctgttcactctgatggtagtttcttttgctgtgcagagctctttagtttaattagatcccatttgtcaatttaggcttttgttgccattgcttttggtgttttagacatgaagtccttgcccatgcctatgtcctgaatggtaatgcctaggttttcttctagggtttttatggttttaggtctaacgtttaagtgtttaatccatcttgaattgatttttgtagaaggtgtgaggaagggatccagtttcagctttctacatatggctagccagttttctcagcaccatttattaaatagggaatcctttccccattgcttgtttttctcaggtttgtcaaagatcagatagttgtagatatgcagcgttatttgtgagggctctgttctgttccattgatctatatctctgttttggtaccagtaccatgctgttttggttactgtagccttgtagtgtagtttgaagtcaggtagtgtgatgcctccagctttgttcttttggcttaggattgacttggtgatgcgggctcttttttggctccacatgaactttaaagtagttttttccaattctgtgaagaaagtcattggtagcttgatggggatggcattgaatctgtaaattaccttgggcagtatggccattttcacgatactgattcttcctatccatgagcatggaatgttcttccatttgtgtcctcttttattttgttgagcagtggtttgtagttctccttgaagaggtccttcacatcccttgtaagttggattcctaggtattttattctctttgaagcaattgtgaatgggagttcactcatgatttggctctctgttcgtctcttgttggtgtataagaatgcttgtgatttttgtacattgattttgtatcctgagactttgctgaagttgcttatcagcttaaggagattttgggctgagacaatggggttttctagatatacaatcatgtagtctgcaaacagggacaatttgacttcctcttttcctaattgaataccctttatttccttctcctgcctaattgccctggccagaacttccaacactatgttgaataggagtggtgagagagggcatccctgtcatgtgccagttttcaaagggaatgcttccagtttttgcccattcagtatgatattggctgtgggtttgtcatagatagctcttattattttgaaatacgtcccatcaatacctaatttattgagagtttttagcatgaagggttgttgaattttgtcaaaggccttttctgcatctattgagataatcatgtggttttcatctttggttctgtttatatgctggattacgtttattgatttgcgtatattgaaccagccttgcatcccagggatgaagcccacttgatcatggtggataagctttttgatgtgctgctggattcggtttgccagtattttattgaggatttttgcatcaatgttcctcaaggatattggtctaaaattctcttttttggttgtgtctctgcccagctttggtatcaggatgatgctggcctcataaaatgagttagggaggattccctctttttctattgattggaatagtttcagaaggaatggtaccagttcctccttatacctctggtagaattcggctgtgaatccatctggtcctggactctttttggttggtaagctattgattattgccacaatttcagatcctgttattggtctattcagagattcagcttcttcttggtttagtcttgggacggtgtatgtgtcgaggaatttatccatttcttctagatttctagtttatttgtgtagaggtgtttgtagtattctctgatggtagtttgtatttcggcacaggctatttgttttgcccyagcctcatccttagtgttayttcctcgaatccccactcctccttcagagaaaaactaaaacacaacttctcccaaagcagcctcctgaccaccyacccgacaggttcctcccgttacaattcccatcatatctcctgccagctcttgttgcagtagtaattattatgtgctgaatatgtctgtctcttgttagtctagggtagttccacctctgccttgctcagctctgtccagagaacctagcacagagcatcgtaatactcgagccatgggtaggtgggaggatgccacctaggagttctgctgcctgctggatgcaggggaggccaagtccccaacccatggcagctgttgagattgcacatctcaggctaccagctaagcacaraccatggtacattaacratccctcgccttgcgagctggcgggagagcccaagtggagacctccatgctcagctcagaggtattcagaggggctgtcaactaataagaggctcacatgacaccctcataaaaataagcgtgcccagaacactcggtgtagggcaatgctgcatcctggcgtagcctccaagaagaaatacttgtcagtaaacgggagcctcctgatttacggcttccgtgccccaccccatgtgccatctgtgtgcaccttttccctaccctttggttccacacccaattcttgcgagtggatctgctctctagaggatgccagctccatcaggtgccagtgaactcacagggtttactgagaacccgctggactctgctgcagcctgtaagcctggagggggagggggagaagggagacagagctcmctccacgtgctggtgaacttgagggaagcaaaactcacagactctgcttgcttaaaatttataagcaattctgcaaagcagtctagggggaaaaaaatttacaagcaacttgtcaaaataaaagatggcaggatcttgtgatcactgattcatatatggcatttttctgtgtactagaagtgttcactgaaagctcacttttaaaggtaaagcctacagttaatccttttgcaaagaagctaagctttctaatacaattgtttagtaaacgtagattgtagccatcagtcattcttttaacacctgctatgtgcagtgcactaattgagtaaatcaagcattgtaaaagacaggcacctggggaaaactctcctgtggggcagcagtgtgtcctgtggaacctggaagaccctgttaagaaggcaatttggcagtaggaatcagagacttaaaaacagacaatgctttctcctagcactttcacttacagagatatattctaaagaaaaaaataagttatatgcacagatttactacagggtatttatcacagcttgtaagtgaaaaattccaaacagccaatatatctaaaaatatgagctagagctaggaattaaatcttatgtagccatgaaatgaatgtgctgtaatggatatatgtcaatgtgaaaatatgtgaagatgtattttaaggggaactgtattagtgcaccataaatccacagacaatattatacatgttggaaaatacatcattcccagaagcagcagaccaaggtattagaggtgttctttctctctgggtagcacaatcacatcgttattgttgtttttgcattttattatggaaaacttgaagccacttgaagtagaataatataatcaacccccacgtgctcatcactcacattcagtgcttatgaggcacaggatctgttaacgtaccataatctgtgcttcgctcgtagcctaggaccaggtgtgtgagattttaacatctcgctcatctgcaccgataactgaagagttgtcaaagaggastcacagcagaggaaaagaggaattcagggtcttgctaaacaagaaggtgaccttgaggagcccttgagtcattccagaaggtggcggtaggcaggagagggggtttgtcccagctcaagaatcagaagtagaagccctggggaggggtctcttgccttgttgaccagcatgccrtcctccgcagccgcccctgacctggtcctcaatgcggagatggtgcagcagaccacctacctggaggaccggcccatgttcmtgctgcagtgtgccatggaggagaactgcctctcggcctcagccgcgcagacygaccccaccacgggctaccgccggctcctgcgcttctcctcccagatccacaacaatggccagtccgacttccggcccaagaacggccgccacgcgtggatctggcacgactgtcacaggtaggcctggctggccaccctccccactaagctgcccggcggacatcctgcaggcctcagatgggagttgagagttgccagggtcacttagagccaagaggctgcatggcctggggataggatcctcctaagtggggggcttgcatctgccacactggctgtcagatttcccgaagccattctccactccaagttcccctggcctgccacccttcttcctgcctccaatgcttctaacatcaggaaacacactttgttttgagcgcccataccctcctcgttgaccttcagcccatggtttccaagtgtgtccacaggtttgtgtgctgccaggtactccaggctgtgcagttgctggactctaaattcctttagaaatattcccagcctggcgcggtggctcacgcctgtaatcccagcactttgggaggccgaggcgggcggatcacgaggtcaggagatcaagcccattctggctaacacggtgaaaccccgtctctactaaaaatacgaaaattagccggtcatggtggtggatgcctatagcctcagctacttgggaggctgaggcaggagaatggcgtgaacccaggaggcggaggttgctgtgagctgagatcacgccaccacactccagcataggcgacagagccaggctctgtctcaaaaaaaaaaaawatatatatatatatatattccacgtactggtatgtattttaaatacctctaggaagacaatgggtgtggagactgaagtctaggcccaagagtcctgagacctggtctctaaacgcagccgtgcctctagcgagctgcatgatgtcaggtcagctgggcggcatcacctgggacctcgcctgtcccttccagctctgtcagtctgtggacctgatcccagcgctgcaaatcccagacaaggacagaagaacagggtgaaatcctacagccagacctggctagagccaccacaagccatctgctcatcctcttaccttccctctgtttctttgttttcccttttttgcctggactcttaatctaatccagagcctgctgtctctgtatgtccagggatttttttgctcagacctgaactgggtgggtagagggaagagaagcaggcacacccttggaaaggaagggagacaggcctctaccactaaataaagcaggaagcccccgaggggctacaggcgtggcctagtcattgcccttctccacacttggatgggccatctatacaacctggcctttgcaccacatccctgcttctcaaagtgaggtccttggaccagaggtatctgccaccacctgagagcctgggacctgctcaatcccagggcccgtggcagacckacacatcagcatctgcatttggcaggattctcaggtgaccgtgtgcacactgcagtgtgagaagccgttgtctagatgatgttgaggctccgctgcagctccggaatgtggtcatcactgttatgggcagaactaacatgtcctggccccttctaagtgtcaggcctagggaaccttcgttctcctagaaaaggacacagaggcttggagttgtctcttgcccaagataatgctaggagttgcagagagcaggaatcccggctcgggcctgtctgactccaaactacatgctctttcttttttgtctgctgactcttcatcagaaatctatctttggcttttttttttttttttttttttttttttttccatatcgcagctgatgacctagtcacattcaaatcagttttgggatagttgttccactagtctcacaagaaaggactatggtagaattcaggggtgctgattttccattcaaacaattgaatattctgaacgtcctaattagcccaagaaggtgtggtctttatagagaagcaggcyagtcttcttcaggttgtaagtcagtagagttaaagtcatgacggttttggtgcttggctcccttcggggaacrtgtgggtggaagccctgggcggcgggggctgacgctgcctatgggtctataagcagaagataattgcatcccagccctgcatatggcagcccacccacagattacatggtaggaacctccctgtgccatacacttacgctccaaggacttggtctcctctaagaataggcacatggtgacatcctggaaatgttcttctgatctggagaccctggctccctgcctgctccccaaccccctgctcccccacttttcctgtggtctattttatttctttgtttacagatgttctagtcagtggcttgggaggggatgggagggaaggaaggacatgctgagcacatgtaccttctggtctccccctcctggtccacagctgagaaacaatgaccataagatcctagggaccttaagaggagtacctcgagctccaggtgacttctscaggtgctgtgggaggaacaggatcctggcctcaaacatctgttgggttccttttggaagctgatgagagctggcccttcctctcctcaaaacaaatatttctagaagtttaatagcctatgtcagcagatttgcagacactctgaaggccatctggagccaggcttgagaaccctggctcaaattagtgggaatgggaaaaaatgccatttccagtttaattgacgctacctcggggaagagagctctgttctttgaaagcccttggctgaaacacaaagattggcccccttggaaatttcctcgaaaaccagacctggaggaaagtgcccccggagttattctgtctcatgtgcactgtgccctggccgatggtctccatgcctctctctcctgcctcttgtgrggccaccgctgctcaactggcacgatgtgccacgctctgacaggacaaagcatggggcacagatgcacaacaggctccacaggccaaggggcttggctctcccacctcgggggaatcccaggagaggagctaggagttggagaagcagggcgtgtgggctccagctcagatgacagtcctccgggtcagggatggcattgctgcaaagaggagagactccctttcactccaccctgcctaccacatgtgcggctcagcttcctgggaggatcaaagcccacagatgtgacgtggcccctgggagccaatctgaggccctcatcgcatctgtggggcttgctcctgccaaggggctgcctggcacagggggatgggggcgtggagctagcagaagggcctctgcctttctggcagctccttctgggatggaaacatccccactgttttctgaaacgaggacaggagtgttgcccccaccgtggcagagcacctccaggactgtccattctggatgccccgcggacacgtggctggggtgggaaaagatgtagagtgcaagcatctcctctgcaaagggcaccaaggctctgactgggagtttcattggggccaccaatgacctaggacagcaaagaacatacctgcttctcccatctttctctgaaccagctttatctgccatccgttttgcatccaacacctcctcccttgacgagtgccatgtcttaaaacactgagctctgggatggacgcagtggctcacacctgtaatcacagcactttgggagacggaggcgagtggatcacttgaggtcaggagttcaagaccagccttgccaacatggtgaaaccccatctttactaaaaatacaaaaatttgccaggcatggtggcgtgctctgtagtcccagctactcgggaggctgaggcaggagaattgcttgaacccgggagacagaggttgcagtgagccgagatcataccactgcactccagcstgggtgatggagtaagactccatctcaaaaaaaaaacaaaaacaaaaaagyattgagctctggagtctcacggtagaaggctgtgtcttcttttgtccagatcacagtgacctccgccaagtgtcaggctctctctccccttagcgttctggattttccttccaagtccatgcytccctaactctaccccagggatccagccccctcctagatgcccaagggtcacgacagctcagcctgcaagaggaggaataccttcctcgccaggactcaccrtcccatcttcccagagtcctgctctgtatttcctggggggaatgggtgggtagtgctggtgggcggggggtgtgggggggctctaggctctaatccaggcagctgggaaggagatgtggccctagggagggatgwccgcatacgcctaagaggcaaagcgagatgcccaggacagaagccagggaaaactgggaggccatgaaaccagctgctcccctgagtgtttgcaggggaaaaactgaagctgaggaagatttaaatcaagtctgcaggaagcccagcagtgggacggggtcatccttacaagagtctgtctgtgcgctccgtctgaattctgtttagacaacggagcatcaacctatttctcttcagtctttccagctggtaaacatggtcacataagcccctctctgagcgatgcagacattttttaggcagtgagtcagacctcatgtctcttcttgctccttcaagaagccaaaatagactttctcaaagtcgtcacttccacggccacaaaatgcctccttgtgaatgttctcagtggaacccgggcttagcgtcattttacccagaaacatgagtgaccgagggaagcccaacttagcaacttctgatattatttttagcacaggcaaatgcaggaggaagggaaaagagcctcgaatttcctcgcaggaaacctatcctgttcattgctgtcttccccgttccccgtgcccccactgcccgtacacagcagagggaacctgaggccaagggcagggggctggggaagtgaggagctcctgcctgccgttgtagcagcagtgttagtggatgtaataaaaatcctgccaccgtgactgctatgatgggagtgtcacgaggaaggggacaggtatgtcaagtgctgactaatgtgctaccacttcgcrttagttatttgacgccgttcatcttattcaatcttgcggcccygagagcgggcaaagccaccctcccctctttgccgaagaggaagctcagatcctgcagcaacaaaacaggggactctgctcccatgacttggcaccttgttcctcagtttccctcattttccaaatgtccctgtaatggcagagacaagcrtatagaatagttgcagacacttgygacatgctcgttgcaggttgggatcrggctaagacaacctccttccttcagccccgggcctgggcagtgcaggcttcgggaaggccctgcagcaacaggcgacagcccygtttcccttgtttattctgaaacaagggctattctaaaccaagcgcatgtgttccaagactctgcatctgttctcaattcctcccgagggaagagagggagcctcgttatgtaaaccagcggcaagggatttgcagcctgcttgcacaagctctcctgcagaactcttttctggaacccccggggacgtgcctccctttgccgctgctgtgtgcccctgaggatgagtcartgtctccctcccagagggcctcccagctgtctttctgctcctccctgctttatttgcacaatgcgaggagcacagacttgctgctcacctcccagggccagaggcgaagctgcaggcccttcctgaccaggtctgaagcacaggcacgaccttggggtacctgtgtgtgtcctgtgcagggcacatgttctattcsttactattcctgttctttctgctgctcccccttaatcatgcttcttaccctttggtttttctccctaccatattccatttcaaaagacgtcaaaatgcggagttttttaattaccctgaagaaagtgcatcaaacaggaaggggctgtgagagccagttgcacgcttattaaaaacaatagctggagttctgtgcttatcatatgcagtgctggctaakctgctcacctccctggtacccacagcaccccatgcattacgatgatcattcccattcagcagaggagaggacggaggcttagcaaggtgagcagtggtctgactccagagccctgaagctgcctctgcagcaccggctttcctttcctcaggcctctcatccactcctctccccacccggccccctctggtcccctggaagtattcccagaggcaaatcgccagccaggcctctgcttgcaagcagcagttgctccagaaactgacctccaggccatctctctctygctccaggcactaccacagcatggaggtgttcacccactatgacctgctgaacctcaatggcaccaaggtggcagagggccacaaggccagcttctgcttggaggacacagaatgtgaaggaggtatctgagcggagtgsggggatgggaggcctcagagggactcgaatgcctctgcctccacratcacctggctggagcccaggcctggcactgaccctgtgtcactctgaccactgccacctttccccacctggaccttcctcagctatagtgaggcgctgggggcatgggcatgacctggttccaagggcacccggattccccagagctgtgctgacaggcactggtcggtccacagggcctcctggacaagatccagactctggggaccctgctccatctgggcttagcagcctagaccctgatgcgtatgcccctcccactctggctgccaccaaccttttttctggtgtcccaatgcyaagtgtccctaccacaccaggtgtcacccttcaattatatctcaaatgccctcctctgaagcgcccccccgtcccggcaggtgtggcactctgctcacacttctggtaggtcaccacacctgccctgtgatcacctgttagtgcacctgcagccctgggggctcttcatggggagacatgtcagttcttcttgctagacccactgtttacagcagtgtccaggcatggcagcttctcagtaaatgtgtgtttaatttgttattcattgaagcggcccgccactgacttgccrtgaaatcacacagcagacaggtgttgacctcttaccatgtgcagataacatgtaagtgtcagagagacatgggcctacactctaattgccgatcctccagaggagacagacagtatgaccccccacgttttgctaaaccacaggcaccagagatttcctcggtccacacacacgcagttatccccaggctgaggatgtcacagaaaggccagggtggatcagagtggtcagggagggcttcatggaggaaggggaacttgagcctggcctgagagaagaggcaggatgtgggtagggaattgagtggggggttctactgaaatgagaacagatgagcagcccacacagtggggtgggatgccgagcccagatgaagcagcggtaggggccttggaagcaggaagagggtgcggcagtggggccatggttccctggtgatgagctctcctctaccctgcccgcagacatccagaagaattacgagtgtgccaacttcggcgatcagggcatcaccatgggctgctgggacatgtaccgccatgacatcgactgccagtgggttgacatcactgacgtgccccctggagactacctgttccaggtgaggtgggtgggaaggggttccagccctgcagggggaggaggggaggccacctccacaggctccttcccattggtgtccacacaggggcatggaagtcaggctgtctaaagggcaaggtgctacccccagaggccatcacggtccatcagttaacccaaagatrtcaggcatgggggcctgagaaatagggcgtgcacaggaccagagacaccacagrcattcacatttgattgagttaacacctggtgcatgcaaatcaaaactcatcagcaggctagatttgctcctccggccagtttattccatacatgctcaggcaacccacacctcttgtctcctatggagctcttgtctccaccatccccatttctcctagtgccctaggctgccttggtctgtgctttcaagactgaaagcaaactcataaagagccagtcacttgcaaatatctgtgacttagctcttccggaaatatctgcctcatagaggaggatctgcagaaggggccattctcaatgcaaagtgaatctataagaataaaatactgaacacgagacacagcctggccaggtgacttctttgtcagaggggttgccgagatttgtttccacatactctgggtggaaggccagccctgaggaggaacaagggggccttggcttccctccttcctgaaaacagcggcatgttctggccagggctctaactgggggagaaaaggggcrttgtgtccctagtgtctctcccagtgcacgggtacaygtagcctgcagaagctttatctcaccctctcactctctcctacgtcctcacccatctcgttttccagcttgccctgttggctagcaaagtggatgaccagaaatgtgtcattccaccttgaaagctttcctgagggggcattcagccagcccagggcctggcccacggtccccacctacagacagtcctctgaagaaacaacaccttcagagaagtcaccacagaggggctttcagagaattcctgggcagtttcagaggctggaaagcagacagccaagcacttttccacccacaagcccagaaccacagacttggagaggcctaaccagagagttatttattttaaaagatgaatagccgtggccatgtgcacgtatacagtgcctggtggttkctgtttgaggtttgctatcattttgctgggtgagtgtgtatctccctgtattctggccagtgccatccacttaataactactatcaattgcctaagcctggggaatgcattgtttgatttaatctcccaaggaaggggcatcatcattaccctcatttcacggccacccaaccccagacatatcaactctttattttgttttctcaacccctaaacaatacaattagcaaatggactcattaggggcatgttaatacctctgattaatcaaaaagaacattccccttaagatagacatggagcttctttaggtgccacaagcaccggcctggggactcacgggacacaagaggtggtcttcacttcagacatcagtggtgctgtgaaggacaggaggagggagctgggcgaggaggaagtgaccgtccacgcagagggacctgtgcagagctcagaggcaggggtgaaggggcctcctggctcctggtggccccgctttatccgctttctcatcatttcctagattcacagacayacagaaacctaaagccacttcccgcaggccctcgtgagatgtcggtctgcagtagatgagtggggtgaaacagtgggggacacacatttccagcyccgcctccaccccacacgtaacactggccctcgtgtcccsaacacgagcccttgctgcatccagccgycctcacggctgcactgtcgagacgcctgggcggccaaggagctgcctaggcctgcacagctggaggccttggcatgtggagctgtgtttgccccatgccatgtgtgggccaggaacgagggggcagctagaatggttgggtggaaaagaaaaaactcaagccgccccggagcagggcatgtacctccttagctaaaggcacagggccccagcgggacacagctgagccaggtgcaggcccccagaacagccccgctgggccagagcagagggccggctgccaggctggccttggcttcccacagcacctctttgggcaagcccagcggcctgctaaaggttcgtgtccaggcccttctggggccccaaatttagagaatgttcctgaacgagcagcctgtacccgcccccctgctgtgggtcgcagcccttccaaatgtggcaggaccctcgagggaaggcctgtcatctgtgtcctctgcccctctgttcaccactgttgtctcttctccctctccctccctttctcttttctcctcgggtcctcaccgtaaacctccccttttctgttccctcacagacactctcccagaatatgtccttcctattcctgctgtagctggggggatgcggatacaggggtgggtggaaggatggggagagggtgcaacttctccagcagccccagagccaggccctcggccagcagagcagacagggacatggatccccaagtcccacctgtcactttacagagagaggaagggacatgtccacagtcacacgcctgtgacgagtgtcycatctccaacgcccaggcagccctcttccaggttcccacacyrccaggtcctccctgcacccttctgcttctcttcagcatcttctttttggggcctccccagaccccaacttctgccttccccagaactcccaggagtgggtgacccccttccgaaggcccaccctgggtagaggggtgtgtgttacacggatatggacagagggcagggtttccctcttccaggccatgcttcctctgctccctgactcatctcttcccctccccaaggactttgttgagacccacagacccccgtcttgggtcccggcacctgccacgctccccttccctgaggtgctggtctctcagagccccaggcctgggtggaggtggccgcagagggaacaagcagcctcctctgccctgcttctccctaggttgttattaaccccaacttcgaggttgcagaatccgattactccaacaacatcatgaaatgcaggagccgctatgacggccaccgcatctggatgtacaactgccacataggtaaggccaggccgcccccactccaggaagcaggcgggagctgccctactttctcaaggacccagagrcagcttcctaatttgggtaaagagctcggggaatgcagccagcatcacatttccacattcaggacagaagccacagacacacaggcctggatggagactgagtttttacagccagctccggccacggatagaggatggtacaggaccaggccagcccagtgcagaccccaaggctttttaagggttggagctgaggccactggctcattatgtatgtgacctcaaaaatgtgggcatcagcaatctgtgggctctgcctatcaggtttttctgtcgagagctggaagctagcaaactactgttatttctagtctccaataaagacacttttttccttggatgataggacttggggaacaaaagggaaggcagagctttttcctctgcaggaaaagtcatgggcctcactcttggcaaaaggttaaaattaaaggcgctatatttattcactcgttcactcaactttgacagagcacctgctatgtgcccagccctagagatggccagtgcctggcacctgtccttttgaggagggcacacacaggtggccccagcagcccctgaggcccactcccctggctcagggtcaggcaaggcccgagcatctcatttgtccactctctctacccgattctcgctcttcaggtggttccttcagcgaagagacggaaaaaaagtttgagcacttcagcgggctcttaaacaaccagctgtccccgcagtaaagmagcctgcgtggtcaactcctgtcttcaggccacaccacatcttccatgggacttccccccaacaactgagtctgaacgaatgccacgtgccctcacccagcccggcccccaccctgtccagacccctacagctstgtctaagctcaggaggaaagggaccctcccatcattcatggrgggctgctacytgacccttggggcctgagaaggccttgsgggggtggggtttgtccacagagctgctggagcagcaccaagagccagtcttgaccgggatgaggcccacagacaggttgtcatcagcttgtcccattcaagccaccgagctcaccacagacacagtggagccgcgctcttctccagtgacacgtggacaaatgcgggctcatcagcccccccagagagggtcaggccgaaccccakttctcctcctcttaggtcattttcagcaaacttgaatatctagacctctcttccaatgaaaccctccagtctattatagtcacatagataatggtgccacgtgttttctgatttggtgagctcagacttggtgcttccctmtccacarcccccaccccttgtttttcaagatactattattatattttcacagacttttgaagcacaaatttattggcatttaatattggacatctgggcccttggaartacaaatctaaggaaaaaccaacccactgtgtaagtgactcatcttcctgttgttccaattctgtgggtttttgattcaacggtgctataaccagggtcctgggtgacagggcgctcactgagcaccatgtgtcatcacagacacttacacatacttgaaacttggaataaaagaaagatttatgaaacgtgtctgtgtttcctttgacccacagcacctgggccctgagcagcaggcttcctatgttcagtggccagaagcagagcttcaggtacattcgtggttttctccggtggacatgggtcctcagatcccctccagcccagtgtggccaccagggcacctccttcaatagactccaaaaggggcagctcctaccatctgggagaagcaatctaaggagatcacaaaaagtaacggaacaggagtcataatctttcttgaactcctgtggtttttactgaaacttgtcagaaggcataggagttgtgcgagggctggatgggaagtctagatttaacaacagccaccaggcagcttatcaaagcaagagggcatccgttcacaggacaggggctcccagcaattcccagtggcagtgggggggtggctgggccaagccagccactcacccagacacaggggacttccccttgtgtcaacagcatgctagggcccagcaaactagagggtaggtaggaccaccttggcaccaactccactcaaaccacaattgaatgagggcgtcggcrcgcattcagatctcacctcttgcctttgtttacatttattttgcaggaactggcactgactgacaggtaagaccaggaccagcccaggggtcccagaactgtcccacagcacaggccagaaggctggatacctgaactgccaaaggagtgtgggcaggtgctacacagcaggtgcaacccagctcccaaaattgggcaggctgtgcacagaggccctgcaggcccagtggggatcctcccggctaagctcaagtgaccttccttcagcagctgcccacctgcactgcaaggtggaatagcaccccctagcgtcccctacagaccacatttcaaagtgatcacattagaacaacgtgagtttttattttttctccatttctgggactaaactaaagcccaccacaccccatggtgaagctcgagggtggtgcggggctgctctggcgtctgtgaaggcttatggtgttgggggcgccagctacgtcgggacgcagatccaggccagttgggtctccaggcctcagggcggcagcggaccccggacagcaggccgctctttctttttgtgttggagtcccagggcccgggccaccagccgccgggccacagtcgcatttgtctgtggcctctccttcaccagacgcaggagttctagaaggaaagccccacagtggggacctaaacacaaggtcgtggctgcctctcccccagcaacacagcagccgtacaagccatcagagccagcctctcatgtgacacatgtggggcctcggcccagctgtgcccgtggtgtggccggatgctcatgagagggggccaacttagggatcctggccccccaggggatgctgacccaaacttgtcgcctctacatgcccttgtttctctgtctctacagtgagggggctgaggggttcatcctgcacacctccctgctttttagggtcctttgggaggggtatcaagtcaggatggaacacccagagctcacagacctacggacaggatatttattgttccaagaaaccctggaccatgttggctacgtaaccacccacgagagcacagctggcctcggcaggcctcttgcaggtccattttactagttactactttgaagtcatggaaaactcgtgtctaaaatctctcaccatggtttctggaagtagaaggggaaaaggaggcgctataacggttatctggtaccttctatgtgccctcagggctccaggcaggtatgccaggctctcattcaatccttcagactgaagagtctgcttattttacagaagaagaaaccaactcacacactgagtgacttcctcagtgtcactgagaccaactgaagtaactgacagagccatttgggggtcccggagcggaccccaaagcccaggcccttcccggccctatgggatacggtttccagggccctccagaagaaggaccaagcttttccctgtgcccagaagagggtatgagcaggagagcctccctgcacagcagctggcagacgccactccccaagggagacccctgccccagaccccccctaggcctgctagggagggggaacacagccccactggctactgcagcccagggctcccaaagagcagagaagtcaagcgggaagaattaacagaggggaagaccctgcccaaaccagacacacacacacgcacacacacacatgctcgcacgcacacacacacacacagcctccctattcagggacatgcgctttccttacttggcctctgcaaggctttgagctttgactgcttggttccctgygtgaggggccggatcttgagcaccgagaactcccgggtcagggcttccgcagctgtggaaagaaagcaggcgtggagccactccctcctcctcaggacccmgcggcacacccaccaccccgaacccctgcagccgtgttgtgcacctattcaaagctcagggcagggctgctccgacaccgccctggatgggcaagagacgactgccgcctgcttgcctcatcccccagagccccacaggcccgcacagggacacctgcgctcagaggacactcccaccccaggctggtcagggagagcactggggaggctgtgattctgacatcagaagaggcgggctcccagtttccaaagccccagggctaaacacaacctctccccctttcaccactcaagaccctccagggaacatgcgttcactgccctgagtcatgcctggtgttgcagcaccccgactatttacagagtatggcagagcagagctgggagaggcttcaggtccaagctgcccactgttctacagaagaggaaactgaagcaagggaacctgctctcaccatagtctgtggagatcagaacgccatggccaaccccagccacagctcattcctctcgcagcacagggcagcctcttggcctccctccctgccttcctttccacaatctccctctctggggtttgagaccccaccctgccctgttccctccctaaatgctgccagggccctccctcctgaggactgggccccagcagcaatggcgctcccaggccccagctcgggttttcagaaggctgtttctgggaagaccagtaaagggggcgtggcgcgggtaactataaattataccaaatgtaagcacggtggtgtggcagggcaatgcaggcaagtgactgagggagacaggagcactggagtcatgaggcagtgtggtgccccgagctgtgacactgagaggctgtgtaacttggagtgtacccctgacactctgggacccttaagtctctccagctgtacaatggaggtaacctgacctacatcttgaggctgaagcgaaaatcgagtaagaatgtgtctacttgaaccacatgaaatctccagaattcaaatgcttttggccgttaaagcagcactttgctgtggtttcatttaacacagggacatccgttgggcttggctcacgaccttcctcagcaaaggtcgcctgaatctgatgccttttcattgaaagcactaacacaataggaagggcttcttcattaaggcgcattactatgggccagagaccgctcagctccccctgggttttaggctgggaacaaaacccccagagcctactggctcagctgagcctgcgcccaggagatggtggcctctacccagggaaccaagggtcctccctctcaacagggatccgagcaagggctgggcccactgggggtgccttacctgaggccmggcagggaaagatgccgagtgcgtgagtatcatccacccactgaatcctgaaccccttctctctgtgcggcgagagaggagacagcacattcaggaaagcaagcagtcaaactcctcttcgaatcccgcagccacaccccctcgcctccagcccgcagatgccaccagcctgaggcaaggtcccatctcttctgggacggagacaatcatttgcagcaaatttcctctgaagcccatatggttggcttcagaaagacaaatgtcactcctgtcaatgtcaggcaggtcaccagtttctagaactaaagaagccaggactcaaagagctcatatggcacgacaccaaggaggaagagactcttcaccaggcctgtctcagcccagccaaggccatggtgtctgaggctggggaagaaagggtttctgtggtgggggaggggtataggacctcaaaccagcagggccaccatgctcctgtcagctttattcctattgctcaggaaggtgccacctaccctgcagcttgtgagaggcctaaggcagtgtggccccacccgggcagagaaaggcacagcggccccagcctggctgcaccatcaaggtagagaacagaagagcagaacgtgttgcccctagccaccccttcggctctcctgctcaggagcagagcacagcggaaggctttaggaagcagagttaamaagggccacgtggaaaggggtttctttttgtttttatttttattttttttgagagggagtctcgcactgtcacccaggctgaagtgcagtggcacaatctcggctcactacaagctccacctcccgggttcacaccattctcctgcctcagcctcccgagtagctgggactacaggcgcctgccaccacgcccagctaattttatttttttgtatttttagtagagacaggcagggtttcaccatattagccaggttggtctcgatctcctgacctcatgatccgccctcctcagcttcccaaagtgctgggattacaggcgtgagccaccgtgcccagccacagaaaggggtttctaaaagcctaggcagagctgggcacggtggcacatgcctgtagtcccagctacttgggagacgaaggtgggaggatcacttgagcccaggaggttgaggctgcagcaagctgtgatcgtaccactgcacccctgcctggacaaaagagcaagatcctgtctcaaaaaaaaagaggagaaagaaagcctgagcaggaacaaagaaggggaaggggagaaggcaaaatgagaaaaaaaaggaaaagaaaaaagaaggaaagacaggagggtggatctaaaggcatgtggggaagctgaggaggagggaagtcgtgtctctcaatacagcctctggccaccattccgacctccactctgccccagcaggctgctcagtgcaccctagaaacagttcccacatggagctggcccgtagcctgctggagacacactgagcagccgctgggaggcaggcaagaggagaagaggaggctgccatgtcccttgagactgagggagggcgcatggcatcctggcaggcgtgtggccatgcaggggggcagcccaggtctagggcctgcagggtgtgtctacaaccaacaaatcagtgctctctttcccgagggacggccggcagggagaactgcccaggaatacagagcccaggcaacacacccactttctgtctctcttgctgaagcattaggcactgggtgtggggcaggcaagcacccccagctacagagaagtatcttagctcctctctgaaggcagcacctccccagccaccactcactggaactcagaaaacgttgccagcaggtcctccgtcttgagcgctggttcaaagtcatagatctctacmacgtgggcaaggtccttctctccaggcagctcctccaygaaggaggaygtgtccaaatggatcttctctatctgaatctccttcttcgtcaggttgtctgtgatctaggagagatcggacccttagcaaggggagcttggacacgcagagctcccaaaccactagcccacgcgctgagagctctgcagggagaaggggcccacctggcaaaagtctgggaaaggcagcagcaggcagactgggctgcaaggtcaagacgtcaagacgcatgggttttacgggagggcacttacttgtatggagtccccactaagtgactggcaattacacacataatgttccatagaatcctgaaaactatattctagaaagctgttttacagatggggaaactgaaggcccaagagttaagtaatttttcccaaagtgcaaagtcagtaagaggcagagctgggcaagtccaagaactttccctcctctactagtgatgtgatatttggcaggtctgtggtctgcattcttcatgtataaaatagccataaaagatgccaccctcccaactgaacccacagccagtctcaggggcagtcgcacggtcccaagaaaacaagatttataagataaaacttcaggctaaagagtaatttccatgactggcatccgtaacacaagaygatgtacttgcacacagagtccatctccatgacctagtgaaggctgtattatcaactggttttagtttcagatgaggaaactgagactcagccaaacaaaataacttgcccagggtcaagcagctcctacatggctgggctgggacccaaatccacacctcatctcctgagttccctaaggaatccctgtcacccaacacccagccctacctccccttgcacatcccctgctctccacaccataacccttggtccccatccacccasggccacacccacctcacctccgccctcccttttygggctcaagagcctcatcacctcctgcagcagctcactgtaatcgtcctccgagcagctgctggggccatcctcttccacctcctcttcgtcctcttc

SEQ ID NO: 93604 - DNA, 55564 bp, Homo sapiens
agtctccaactcctgacctcaagtgatccatctgcctcggcctcccaaagtgctgggattacaggtgtgagccaccataccagcctaggtacaacaattttatgaagcaagtattattttgcagaagaggacacttggactgaataatagtaacaacagaaacttattggatgtttattgtgtgccaagtgctgctctaagtactttacaataatcgtattgttcaatattcacagcaaaccagtgaagtaggtacctttattattcccatttagaggagaaatttgctcaagcttacatagctagtatagtggtggggctggaactgacacccaggtttgctaatttcaaagcccatgttattttcattgtgccatactacccgccaacatttatgcaaagatctataaacttctagaatgttctttgatgaacccatttcctatattaaggacatatttccatatacctaataataattagtctctaagtcctgctagtcattcctatgaaatctttttgttaatttgttcatttgaatttctactaccaccatatgccagaatacagccttcatactacttcctctaaactggaagacattctaaaatggaagacattcctctaccattttttaccatattaatggtgattaataaacaaaacaaaacaatatttttattttgtcttgccattactgactaaaatatatctgaaggcctgtctggtgtttgaggctctccgtatttgcaccccaccctaggattcagtagcaattttccccttccctttcctgcaacgtgactactcaacacatgtgcttatgttggtttcttcatctttgtcacgcttctccacatctttcaagcctggctcaagacagactcattcgctcacgtccccttctgtgactaccccagcccccacgtcctctcctcccaccctaaccctgtgttgcaggtgtgtggtgagaattcaatgaatggcccagtataaaatgcctaatatgtgactgacacttcataaatattagtttctattccctttcttttgcctccttctatttgtaatttaatagcatttgccatctgaaccatacacttaatacttaattatgcagcatttcatatcattgtatagattatagatggcatcatgagttttcattcatctttctaggtagataacaaacttctagagtttaggaactgtcttactcttcttcttaaccaccaatgggaaaaccccagggctggacatgtagtacaaagtcagtatgtacttgttgacttcataggacacagaagagaaaatgtcttaccagaaatatgacataaacaactgttaagaaagaaaggcttgattctcttccccatttttgtatactttattatgctgtaagtatttgatctgagaagcaggttctaaacatttctccttccttttagatttcacaagagagaggttaaaagaaaattttacccaatttccaaggctttaatcaatagacttgagagaagagagaggactttgttcttttctctggcagttaagctgtgcccatcttccacttccacttccagtctaaagattattaacaggctggtcacggtggctcatgcctgtaattccagcacttagggaggccgaggcaggtggatcacttgagatcaggagtttgagaccaacttggccaacatggtgaaaccccctctactaaaaatacaaaaattagccaggcatggtggcacacacctgtaatctcagctactccggaggctgaggtaggagaatcgcttgaacccgggaggcagaggttgcagtgagccaagatcacaccaccgcactccagccggggcaacagagtgagactctgcctcagaaaaaaaaaaagattcttacaaatgtgatattacagagtgttagcttcaatcaaccattagctctgtactcttggtcattgtaggagggaaaacaggtttttaagaacatgctcatactctggaactcgtgcttagaataactgcttttaagccactcttgaaaaaaattatccagataattctttttttgtttttgttttttttttttgagatggagtttcactcttgttgccttggctggagtgcaatggcgtgatctcagctcaccacaacttctgcctcctgggtttaagcgattctcctgcctcagccttctgagaagctgggattacaggcatgcacaaccatgcccagttaattttgtattttttagtagagaaggggtttctccatgttggtcaggctggtctcgaactcccaacctcaggtgatccgcccgccttggcctcccaaagtgctgggattacaggcgtgagccactgctcccggcccagataattcttaaattcatccacccaactttcccatctccactgcttcccctctggtctaggaggccactgtctcttaactgtggttctaaaaaaaatgctcctatcttccagcttccactcttgctgccttccaatcaattcctcactcagcagtaagcaacatcttttacttaatttttttaattttttgagacagagtctcactctgtcacccaggctggactgcagtggcacaatctcagcttcctgcaacccccacctcccccacctgattctcctaccgagtagatgagattacaggcgtgtgccaccacacccggctaatttttgtatttttagtagagatggggtttcacctcccaaagtgctgggattccaggcatgagccacccagccagaaacatctttttaaaacataaagaaaatcagatggtcaggcgtggcagcgcgcacctgtcgtctcagcttctcggaaggctgaggcaggagaattgtttgaacctgggaggcagaggctgcagtgagccgagatcgctgccactgcactccagcctgggatacagagccagactccatgtcaaataaataaataaaaataaaaaagaaaatcaggctgttttctgcttaaaatcctcctgtaacttcctactgttatacatgtggaagtccatgtggcctaaggacctccccatcctgccaccccatctgtaccaccatagtaggggtactatgctccaatcacactggctgtgtatttcttcctcaagagcaccaaatgcttccaaatgcttgaggtcttcttaactgctgtctatcttgctgctctgctgctccaccccgcctcttcctgtgcccgtttttgtttttttgagtccttgttcaaatgtttcctcctctgagcccttcttgacacccgaactaaaaacttgactccctgctctgcctctcattattctttatcacaacagcttgtttcctgtgtaaggcttaccaacatttgtcattatttatttttcttttacttatttattgcatagctcttctactagacttcaagccctatgaagtggtaccatagaagtaggccaacaaatagatgctcgataaatctttttaagtgactgggtgaagtggtagcaactcaggagtagcttattttttgtgaaagcctgagactaaggagaagtttaataaaaagacatcaataagctcctttatatgccttgttatggcacaattgctaggtagttttgcttcaaggtaggggcaggaccagatgcttcactgacattctctcagcactgagattctgggagtctaaatgtcgagaatcccacaagcccctgtcagtctgagctagcagctgctttgcagaggggagaaaataaagttaccaggcagatggggtgggggaggggtgggaagctgaaggcagtcattgctaatggggtatgacagagctgtggggagaggttcgggggtgtgggaggaccttggccacaggaatgcctttttccccaggacaaagagggcagtgacgcagagcacagggaagagcagcatttgattcaaccaaaggagtggtcagtgcagcatggcgtggttgccttcggaagagatgcctcaaccagaggcagaactaaaatttcaaaacaaagagcttccaagcagcagatctattgctctgcttccaggccttttggcctggaacttagcggattagtggactttcaaaccctgacagaggtcagaggcagaggcaaagagatcatgcctcctaattttaaacaaaagatcgcttgaagagaccccaaagctctcttaattgcaggttctgcctggatcatgaaaaatcgccttctgactgttcatcctgcaacttccttgcagctgaggaatggcaccttgtcatcctcagtaggcataaccggtttgcaggccccagtccctgtttcactggaagacatcagaatcccactctcagtccgctcagcagccacacggaagctgcagcacagccagcttcccactgacccaccctggcacacctctaagaatctataggtccagaccagggcataaatcatgttaagttatatcttcaataaagttatcatttaaaagaatttaaagtgtccccacccacaagaaagaaagtctggacttctcttgaataagatacccctcagaactgaatcaatatttcttttccttaaaaaaaaacaccttgtcattgggatcaaaccaagaggagttatatgtttctgcaacaacactttgagctttcctgtttgaatttactttgttttaaaggaggtgatggcgttgtaattttaaaaatttggtcctaactacagaattgacttaagtagtagagttaagtgattcctggataaactatctagcaaatggtaaccaggagatttattcctttctttaacgagtgtagatttgaatctgtcagcaacaaagatagagggagaagtgattctaaaaagagatcagagaaggacaagaggatggagcaacagggaagtgtagctgtccaacaagaactgcagcctcgctggtgggtgggacctggtggaggaagtgatggtctgattcctctgtcaaccagacccatttccaattggctttgtgaatcctaggtggtaggtccaacaaaaggatgatggcatttatttgcctttatattattttaatacctgtccggggaaaatgcaacactctgacaacagccttagaaatagcatcccatctggattgttaagaccacagcaactggcacattcgaccaagttcttagggtgaagtctcagtaggccagtccaggtgtaatctcactctggtgggttcagagcgggaagcaagatgaaaaataaggagcagatctgaataataaatcactgttactgggcaccataacacagacgagaaattttccccatcctcagcgggctcaccctcctgcacaaggaatgaactacaggacatgatctcaaacacctacagatgcatcttgcaggaagcgtgcacccttcaaggaaagatcctcttctggactcgctatgcagctcagctgaaatggatcaggtctcaaacctggtaaagatgatctttccccttgattcttgggtggggagtgggaggtgagacggaggtgggcctgagtttattttttcaaatcgtttattctcttggttctgtggaaaactgcaaccgcatctcctcttccccttcactctctttcccgggctccctcccgaaggatgaaaggatctgaaagccgcatttctccccctcagctaagcctgccctttctccccttcccagccagcggcacacagcacctggagccacagcatcgccgacgtccgaccccggcaggcgggcgcagcgagggcgccgagcagcagcctttctttttccagctgcactggagatttaattttaattaatcgtgagagcttcagccctgaggattgaatttttgaaatagagcacaccctgcttgtttctttcttcttctttttttttttttgcatttcccttccaccctccccaatggcatcgaaatttaaagaaacgaacgagcagtctcacccacacctgcccagggaccgacgctggcggaggttgcggacagccggcggggagcggttctgctccgggaggatgcggctttgccgcggccggcgggcggggcggggccgggccggggagggtgcggggttctggtggtcacgtgggctcgagcaccgccctgtccgcccgcccgcctcgaatgtccctgagacccagaagggcctgcgctcagctgctctggcaccccgctgcagggatggcctcctgggctaagggcaggagctacctggcgcctggtttgctgcagggccaagtggccatcgtcaccggcggggccacgggcatcggaaaagccatcgtgaaggagctcctggagctgggtacgtgagcgggccgctggtgcagagaggtggctgtggtgacctggggtaacctggagacgggagccaggagctctcggcggggctgagggagtgtggagctgcagagcaaagacggggcaggtgtgggcgaaattacgaccaccagggagacagaagagagcagctcttcctaaggaattgtggagccactcgttaaaaactgaagagaccactcaggccaaagagactgtgccccaggtaggcagtaagaagagcagtgaaacatgctgtgcaattagttttatattcagatttaaaattaatccattctatatgcttaatgtgagtgattaggaaacgtgggaagacttcatttaactggaaaaagttgtgaacatagtgagtctctcatagtatcttctcacatctcttaaccacagcaaggaaatatgctgaatatttaccttaacttgggtgaaggaaggcctttgtaaacacataagtgagggaataaaccacaaaggagaacataaatcaatctacctgtatgaaagtgtaaatcctcattgaattaaaaaaatatataaagtttaaaggcatatgaagaaaaatatttgcaacataagataaattgtttgttggttttgagatagggtctcactctgttgcctacgctggtctcgaacacctgggttcaagggatcctcctgccttgcctctgagtcctaaagttttgggattacaggctgagccactagattcggccaacagccttatacataaagagctcttacaaataaagaaaaaatccaacacactgatagaaaaattagactaatggtatggactaagcgttccaaaagaagaactacagacaggcaagaaacatatgaaaaaataatcaactttattggtaataaaatatgaaacagtaagatttaacttttctaacaaaattttgaaatgttgggaaaaattaaagtgttgatgcaggaatgagaaggcaggaatgtaaattattacaaactttctggaaggcaatttggaaaaaaagatccaaaaaccttcacaatgtttatgctctatgacagtaattcctttttcaggaatttaaggaaacggagtcaagcaaagattttcatgcaaggatgtagtcttgagwagtgaaaaaatggaaattacctaaaaatycaatataaggaaaatagttaaatcaataacaatgaaatataatgcttccrtttaaatatcttgctattgktcctggygcagtggctcacgcctgtaattccagcactttgagaggccgaggcgggcagataacctgaggtcaggagtttgagaccagcctggccaacatggtgaaactccatttctactaaaaatacaaaccaggcatggtggcgtacacctgtagtcccagctacttgggaggttgaggcgcaagaatcgcttgaacctgggaggcagaggttgcaatgagctgacgtcaagccactgcactccagcctgggcaacagagcgagattccatctcaataaataaataaatatcttgctattgaagacttacttggagaaatgcataccatattattgggaaaagtagaattctaaacctaatagcattccaattttactttttttttttttttgagatggagtttcgctcttgttgcccaggctggagtgcagtggcgccatcttggctcactgcaacctccgcctcctgggttcaagcgattctcctgcctcagcctcccgagtagttgggattacaggcacgcactaccttgctaggctaattttgtatttttagtagagatggggtttctatatgttggtcaggctggtctccaactcccgacctcaggtgatccgcccgcctcggcctcccaaagtactgggattacaggcgtaagccaccgtgcccggcccaattttacttttaataaaatatatacatgcagggccgggcacggtggctcatgcctgtaatcccagcactttgggaggccgaggcgggcagagcacaaggtcaagagttcgagactagcctgggaaaacatggtgaaacctcgtctctactaagaatacaaaaattagccaggcatggtggcgtgtgcctgtaatcccagctactcaggaggctgaggcaggagaatggcgtgaacccgggaggcagaggtttcagtgagccaagatcgtgccgctgcactccagcctgggcgacagagcaagactcagtatcaaaaaaaaaaaaaagtattacatatgcaaaaatggactggaaggaagtttataagatttttagccatttttctgaaaataatgttaattatgagtaattaaaattgtcttcgtcttttaaatattttttaatgaacatctaaattatctttggttacgactgtgtttccaacatmtggcacagtatgaactaaaaaaaaaaaatctatgtttttagttaaaaaaaaaaaaaaaagcaaaaacatttcctagtaaggccatgatgtaacctcatcaccattactgcccagtttattctcaacaccaagctctatcctctttcaggaatatctgtaagaaaatcagaatcagttatcaattcatgcataggtcagatactaggcttctcagcagattcgtaggaccctagtccactttgaaggatttttaatagatttttatgtatttgaactttcatcctgttgcataagtgtgctatttgaactttcatcctgttgcataagtgtgctatttgaactttcatcctgttgcataaatatgcattggccaaaaactacacccctggaataaggtgatagactatatttttcttaccacaaactaaaacattaggacattggtcttgtaatcttttggaagacatgaatctgtctgagattctgatgaaagtggtggcgtgtcttttgagaaaaagacatcatatacttaaaaatatatatacacaattattttgttgtattggaaatggatttccttcagtgaaagaatattaaaaatctttttctttttttttttttttgagatggagtytcgctctgtcgcccaggctggagtacagtggcgcaatctcggctcactgcaacctccacctcccaggttcaagcaattctctgcctcagcctcctgagcagtatttttaatagagacggggttttaccacgttggccaggctggtcttgaactcctggccttatgatccatcccccttgacctcccaaagtgctgtgagccaccgggcctggccataaaaatcatttttataattactttttcctctttatttttttatgccagaatyaatggctatttccacgacattgtcatatttttactagagatggggttttggcatgttggccaggctggtcttgaactcggacctccagtgatctgcccgcctcagcctccctaagtgctaggattacaggcatggaggccccgcgcctagcctccagttttctttctagtcagaaggccactgttttttgtttttggttttggttttttggtgtgaactatgtctttttggcatgaactttgaggcatggtttttaaaatgatgatatttttgcttttttttttttttaacgaaaaatacaggtgttttcttttttacttcatactatgccagatggtaaccaaagataatttagatgttcattaaaaaatatttaaaagacgaagacaattttaattactcataattaacattattttcagaaaaatggctaaaaatcttacaaacttccttccagtccatttttgcatgtataatccatattttttttttttttttttttgagacggagtcttgctctgtagcccaggctggagtacagtggcacgatcttggctcactgcaacctctgcctcccaggttcaagcgattcttctgcctcagcctcctgagtagctgggattacaggcacatgccaccatgcctggctaatttttgtattcttagtagagacaaggtttcaccatgtttgcccaggctagtctcgaactcttgaccttgtgctctgcccgcctcagcctcccaaagtgctgggattacaggcgtgagccactgcacccggccctgcatgtatttttttttgagatggaggtcttgctctgtcacccaggctggagtgcggtggcgcgatcttggctcactgcaagctccgcctcccgggttcaagccattctcctgcctcagcctccctagtagctgggactacaggcacccaccaccacacccggctaagtttttgtatttttagtagagacgggggtttcaccgtgttagccaggatggtctcgatctcttgaccttgtgctccgcctgccttggcctcccaaagtgctgggattacaggcgtgagcctcggcaccccggcaaatattttttattaaaagtaaaattgggccaggcgcggtggctcatgcctgtaatcccagcactttgggaggccgaggtgggcggccacctgaggttgggagttcgagatcagcctgaccaacatatagaaaccccatctctactaaaaatacaaaattagccaggcgaggtggtgcgtgcgtgtaatcccaattactcggaggctgaggcaggagaatcgctgaacccgggaggcagaggttgcagtgagctgagatggtgccattgcactccagcctgggcaacaagagcgaaactccatctcaaaaaaaaaaaaaaaagtaaaattggaatgctgttaggtttagaattctatttttcccaataatatggtatgcatttctccaagtaagtcttcaatagcaagatatttatttatttattgagatggaatcttgctttgttgcccaggctggagtgcagtggcttgacagcagctcactgcaacctctgcctcccaggttcaagtgattcttgtgcctcagcctgccacgtagctgggactacaggtgtgtgccaccatgcctggctaatttttgtgtttttagtagagatggagttttactatgttggccaggctggtctcgaactcctgacctcaagttatctgccggcctcggcctcccaaagtgctggaattacaggcgtgagccactgcaccaggaacaatagcaagatatttaaatggaagcatgtatatttcattgttattgatttaactatttccctcatattgaatttttaggtaatttccattttttcacttctcaagactacatycttgcatgaaaatctttgcttgactctgtttccaaacattgtggcacatgtggtggcatggcacatgcttgtagtcccagctacttgggaggctgacacatgagaattgcttgaactctgaaggcggaggttgcagtgagccgagatcacgccactgcaatctggcctgggtgacagagtgagattccatctcaaaagaaaagagaagaaaaaaattggctaacattttcttttttgctcaatttgggtttatataacaatgtctttcacttccacaggattttgacttttcctttttctgagaggacacagaaagctttagctcacaaaagcaggatattgtaggcagaattagatctcctttatacctttgacaggtgctgttaggcagagagaaacctgatttcatcaaggaaaacctagcatcgtcaagttgaattcatatcagatgtttttttatcttcaagttaatcattcactttctgttactacagtagaacataaattaggtatagtagataaaatgcaattaggaaatgccggtggaaattatgacccaagacaacattttttcttgctctagtctagtctaactagcctgttaccaacaccagggaccaagaaggtgctgaataaatgtagtattctgagttgaagatggaaagggatcagtatcagcctaagcaggaacgcagcatactggggctacaagcctctgatgttgaaagaactccttatccacaagctacttctatacctattctaagcaggtcagttgagctttctgcatctctctagctacatataaacaaaaataaagtctattgaaatgatttagcatgaaaggcaaggattatatataatatttttctagtttattataaggtagcataagaggtttgcaataaattaaaacagtatagaagtgtataaaagaaaaaaatgagctttacccattctgccctttttctaaattcccttcctggtgattttctacaaatttaatgtgcacatgtatacacacgtatatatattttgttttctacaaaattgggatcacagtattcttactgctctgtaatggttttttttcctacttaaatatcttgttttttctttgttttgttttgttttttagagacaggatcttgctctgtcacccaggctagagtacagtagtgtcatcatagctcactgcagcctcgaactcctgtctgaaatgattctcctgcctcaacctcccaagtatctaaactataggcatgtgccacaatgtttggcaataaaaaaatttttttagagacaaggtctcatccaggatggtcttgaactcaccacaagcgactctccaaccttagcctcccaaattgctgggattacaagcatgagtcaccatgcctggcccatatcttgtgtttttcaatggtagtattgtagtcatatctcattcattttaaagctgcatagtattccattgtgtgggtctgtaataacttatttaaccatttcctgaatggccatttaggtttttattttacccagcattgcattgtttttccctgtaatatgtttgcaccctagttcaagtttgtctatagtggaaagttctagcagtgaaagtaaatggacttgtaaagttgtatttcagtgcatctttacttgtagtagacaactgtcctgaagtcttgaggtttcagatagtaactagttataatttagtaaacttctatttagataatccatgtgaatcatcctatttatattctcaacatattttttactcgaggtcttggacaaagttaggcattaatcaccttggtgttcttgttttctctctctctctcttccttccttccttcctttcttccttccttccttccttccttccttccttccttccttccttcctttttttctttctttctctctctctttctttcttttctttcttttctttctttttctttctttcttgacacagtctcactctgtcacccaggcacaatcttgcctcactgcaacctctgcccccaggttcaagcaattctcgtggcttagtctcctgagtagctgggattacaggcgtgtgcctccatgctcagctaatttttttgtatttttagtagaggtggggtttcaccatgatgcccaggctggtcttgaagtcctgaatacaagcgatccaccggccttggcctcccaaagtgttgggattacaggcatgagccactgcacccagcctaggtaaagtttttcatccctgccctatagagcctatgccctactctgggaactagagcaaaaaatgtgtatgttgaaggcagaaatatcaaagaaagaagtgggtggaggaagtggtggcttgtcctggggtgcttatttctctcctttccatctcactgataagctcagctrtttctcctaagtgacagaaacctaactgagtgttggattagtctagaagtatatacagtcatgtgtcacttaacacagggaaatcttctgagaaatacatccttaagtgatttcatcatagtgtgaacatcatagagtggtaggcaaacctagatggtatagcctactatatacatggtttatatggtcaatagcctattgcttctaggctccaaacctgtacgggaggttactatgctgaaggctgcaggaaatagtaacacaaaggtaaatatctgtggtctaaacatatctaaacatacaaaagatataataaaaatatggtatttttattataaaattatataaaaacatacaaaagatataataaaaataaaagatatagtaaaaatatggtataaaatataaaaaatggtacacctgtatagagcactgtataggacacaggagcttacgggactggaagttgctctgggtgagttagtgagggagtgataagtgaatgtgaaggcctaagacattattgtttactattgtagaatttataaacactgtacacacaggctaaactaaatttataaaaaaataaagtaattgcagctatgacattacagtggctacagcaccactggatgataagaatgtttaacttccactttaatcttatgaggccactgccatacatgtggtctatcattgaccaaaacattgttatggggtgtgtgactgtgtttcagttatttttcctgctggaagaagagggccctcctggaaacaaaaggagaaaggagtaagcttctcctaacagtataacgtatgtttttgttgcacattatatattttgataaattaaattccattttaaagttaggcaaggcttacaaggaacttatggtgaatctttccaatttttgctttataaaaccctcagattgcacacgagaatttccaaaagttgttaccatttttagtttactaaattataacctaaactttaaacatagtttttaaaattgtcttattttgtacaagctctatggaaaacagtatggagatttctcaaagaattaaaaatagaattgccattcaattcagcaaacccactactgggtgtttacaaaggaaaataaatcactatatgaagaagacacctgctctagtatgtttatcacagcactattcatagtagcaagttaagaatcaacctaagtgtccatcagtggatgattggataaagaaaatatgttatatataccatggaatactactcagccatgaaaaagaatgaaatcttgtcttttgcaggaacatggatagaactggaggcctttatcctaactaaaataattcagaaacaaggtcaaatggtgcatgttctcacttataagtgggagctaaagagtgggtacacatggacatacagagtagaataacagacattggagactctaaaaggtgggagggtagaagcaggggagtgagggttgaaaaattacctgttgggtacagtggccactattcaggtgatggatacactaaaagccccatgtaacaaaactacacttgtcccccctacatctataaagataagaaataaaataaagtgccttattttcatatgcagtagctagcttatcttatacaactaaaatagttcaggccaaatggagagcctttgtactctgtgcctttgtgaactttatttattccacctgtatatgctggactgtgtgttagcctaacaaatagagcaattacagggtccctacctcccaggggatgacagtgagtggagcagactgttaaattaacaggtaattatgatacagtgaaatgctgtattagggtgaaaacagcctataactgtatcacctcacatagaatttaacactgaaaaaccactgcaatccagcctgggcaacacagtgagacctcatctttaaaatatatatgtaaaagaaccacttaacagttcataggtagtctttgcttttgcatggcattgtggcattgtaacaatgatcatgcaagctgaaaccattcaaagcaaaaatagtcaatgggaaaaagtacaattatttcatgaccttcaaaaatttttgtcaaagtggcacccaaacgggactttcagggacaaacagagacctgaagggacctaaagaggcctgcagggacaaatagagataagtagggataaatagaaatagaggtagagttaaatagagacaaatagagagttttgggcaaaagtcatcttaacttgcagggcgttactgtagccccaggagttgttgattttgattgtgaagaggaaattccagtagtggtaatgtcacaagaactttgggtttttgaaccaggagaatatattgcacaactattgcttgttccctgtaagttgcacccttctccacgaagggagaagcgagggaatcaaggatttgaaagtacaactaggagagagatttatctatcacaacccataacatttaatggactcacctgtacagtacaaattgaaggcttaatgattttttttytttgctatactgttgcacgagaaggatgagcttcaatttgctttccatgtgccttctgttaatcagagagagcctgcctctccttatcaatgagaagtttaccccgtggtaattaaccaaagaggcagaagctgagttacagcttgtggagcagatgctttggcaacggcatgcctcctggccacagccacaaaagcctttgcttctgttttggtagatttactgacgtggggataagggtacgcttgcgtttttgcaggagatgaacaaactgtgtgggtgccctcaaggtgtgtgcgaccacagaacgggagactagagcgacccatggatcccaaccatgggcccggttcccccagtatgagctgaatgcgaagacggaatgaaccaccaaggctgcacattttgcaattacctgtctcaattaattcaaaaacaaaaagggagagatgttgcaggctgaaagagtgagggtcgtgatcaactcagtataccrctggagggtatatgagcaaacagcaaactgttctcataaatgcagaatgttggcaaatgacaaactgcgtctgccacccttgaaggaatgctgagggcagtcacgacccaggcgcaagtgtttcttgtgatgaggcacatctgaagcctgttagcaataatgtgaacctgtgatcagttaagcagctgaccaaatgttacctgctcctccctgctctttctacccaataaatacaaaaggccgtaggagctcraggttgctgcctttactcagtagaagcagggaaccctcttcttcttcccctggccccttcctttaaaacagtttcttttgttttaagttttcatttctgcgttcatcctccttcgttcagtgtcgtaatgaccgtctcaaatagtaagtagtaacagtagtaactgtcgtagtgacggtctcaagtagtaaccatggcagtctgccacagagggacatgaaaaaaataataaaagtagaccwgtttcactggggagatgttggtcaaagagtacaaagtttcatttagacaggaggaataagttctgatgatctattgcacagcatgatggctatagttagtaatgcattgtgtatttcaaaattccgagaatagtggatttagctcaaagtggttcttagctcaaagaaatgataagaggtgatagatacattagcctgatttcatcattccacaatatatttatatatcaaaatatcacattttaccccatagatgtatagttatttgtcagttaaaaataaaaatttaaaaacctcagtattgaaaattaaactgttttattttcatgtgaagtgtgtcgagtcattcgattagtgcttgccttctcattgtataccttatgatatagagcaagcrtttttttctgtaccttgttaaattattgtactcctttctatgtttcgatcagcttccaacattttatcctttatactttcaatgtcatgaaatatttccaaaagtttctttttttttttttttgacagagtcttgctcttgtcacccaggctggggtgcaatggcacgatctcagctcactacaacctctgcctcctgggttcaagcaattttcctgcctcagcctccggagtagctgggattacaggcrcccaccaccacacctggctaatttttgtatttttagtagaaamggggttttgccatgttggtcaagctggtctcgaactgctgaccttgtgatccgcccacctcgacctcccaaagtgctgggattacagaagtgagccaccatgcctggccccaaaagtgtctttaatctgaagttttttgtgggcatcacttcctctgggatatcttcatcttctttgtcacaggcactttcctcatgatgttaagtttgccttcagtaagatcttttggctttctgtagtttctagactggcagcagtgtcacgcattccccttttataattcccctgacatgcattctaatttcgcttccagtgttacaaattttcatttcttggtctcacttttcatgtttgttggccagtccccscttagatcatgtgtttttataaaatgtcacttgggtttcttgttgaaagaccaggaggtgacacagctatattatttgctgtctgagctcttctgaactgaagaagagatgcacagtgggcattcactgatagacgctggaagaaatgacatgattaatcactgatcttgatgtgcatctgttatttatgatttgtgggttgaaaagctagcagtaaagtttgcattttatgcagttacagttaatataccatggttgttgaaatttgaaccatgttgttgagagactggtgtctttaagctaagctaactgaaatcagagcatattrgagcagagcaaaagaaggaccgtctctacttccatttccccttcttagccattgtgctattattctcaaggagaaggagggaatcattttatttctacatatgttataaatcttacaatatgttgttattatttttgctttgaactatacctttaaagagatctgaatagaaacaagaaaagtctttatatttactcacataattactatttctgcaacatagacctcatctctactaaaaaaaaaaaaaaaaaaaaaaaaaattggccagatatggtggtgtatgtctgtggtcccagctactcgggaggctggggtgggaggatcagtggatcctggaaggtcaaggctgcagtgtgccaagatcgccactgcacaccagcctaggcaacagagtaagaccctgtctcaaaaacaaacacacgaaccatttttagttctctttcttcttctgtatatttttagatttttatctggcatcattttccttctacttgaaggacttcctttcatcttttttgtagtgcagatcaccttgatgaattcttccagctttcatatgtgtgaaaaagtctttattttgccatcatttttgagagatattttcactgggttaagatttctaggttcaccatctttttcattgctttccataccgtaaagatgtttcagtgtcttctggcttgcattgtttctgaaagaagtctttatctttcttgttgtatacttaatgtgttgtttttctctggctgcttttaagatttttctcttcatcactggtctatttaattatatcatcagtgtcatttctggttccggttttttttttttttttttttttgatatggagtcttgctctgtcactcaggctggagtgcagtggggcgatctcagctcctgtaacatctgcctcccgggttcaagcaattatcctgcctcagcctcctgagtagctgagattacaggcacatgccaccaggactggctactttttgtatttttagtagagacagggtttcaccatgttggtcaggctggtctcaaactcctgacctcatgatcggcccgcctcagcctcccaaagtgctgggattacaggtgtgagccactgcgtccggcctgggtctgtttttattaattgacttttctcctaattatgtgctgctattttcctgttccttggcatgcctggtagttctttttgttggatgccatatactgaatttgaccttgatggatgttggctatttttatattcttataaatattcttagacaggcgcaagagattgggaccaccctggccaacatggtgaaaccccatctctactaaaaatacaaaaattagccaggcctggtggtgcacgcctgtagtcgcagctacttggggggctgaggcaggagaatcacttgaacccgggaggtggaggttgcagtgagctgagatcatgccactgcacccyagtctggcgacagagtgagactccgtctcaaaaaaaaaaaagaaaaagaaaaaatatgtatatattcttgagctttgttctgggatacagttaggtcacttgaaaacaatttgatactctaaaagaggcttgatctgagcagcctttagtctatggtgaattttgcctcactgcagaagccatctgcttctgcatattttaccgaatgccccgtgaaaggtttttttctggtgggcacactaaccattcccagtgctgtgtgagtgccagggtttgatctccctgcccatttttggtagttctttcctctttgatttattcccaagcatcgattggtactcaggtgaagattccagagagactctgcagatctctggagttctcgctctctgtatatcttttctccctatcccctgggcaatctcactgccttggctccctagactcccaacttcatctcttccgccagggagactttggtctctgaatgtgttcccctcccttgctgcagtgtagaacctttctccaggcagcaagctggggcaatccaagggctcatgtttgatttcactgtcccagagatgaccatccagtgctactagatgtccagtgccagaaaaccatcatttcatatattttgtccaattttttagttatttcaggatggagggcaaattcagtttctactactccatcttgtccagaagcaaaaatcctaattcagcttttttttaagacataggaacacgcatggccaggtgcagtgacttgtgcctgtagtcccagaactttgggaggccaggtgggaggattgctttagcccgggagaagttcaaggttacagtgagctatgatcaagccactgcactctagcctgagcaacagggtgagaccttgactctaaaataaaaaatactttaaaaaatggaacacatgatatattttttcaatattattattgttggaatttggacaactcatgaaggcatatttatttgttccctggcggtttacttttcaaggtgtaatgtggtcattgcatcccatgaaggcatatttatttgttctctggctgtttctcctcagggagtaatgtggtcattgcatcccgtaagttggagagattgaagtctgcggcagatgarctgcaggccaacctacctcccacaaagcaggcacgagtcattcccatacaatgcaacatccggaatgaggaggaggtaatggagatatatctgtatcatttattcattcattgtaatttgcagtagtgtttcttaaacctggctatgcttcaggttctcctattgtagctgtcttagatgaggctcactagaagcagaggctgtgaaagagattctcatgttaatgatttactgagccggcgaatcctggagaaggagaggaagggaggcaagaatgtggtccagctaaagatggccttttgtcctttaagtcttcatttttatttttatttttttgagacaaagtcttcctctgttgcccaggctgaaaggcagtggcactatatcggctcactgcaacctacacctcccaggttcaagcaattctcctgactcagcctcctgagtagctgggactataggtgcatgccaccatgcccagctaatttttgtatttttcataaagacgggtttcaccatgttggccaggctggtctcaaacttctgacctcaggtgatctgcctgcctcggcctcccgaagtgctaggattacaggtgtgagccaccgtgccttgccctttaagtcattttttaatgttcattttaatctgatttcatcactgtttattctgggttggtagctgtcaaattaatatatgacagaggcctgccctactcaagggtgttccaggcccttggatatatcttgtcgtcaaaattacagttttagctttgtgatctgtgggtattgggtgctggtacattactcattggtgtaggatttttagtcttattcattgctgcatgttcattcattgtggcacttggagtgactgttcactgtgagagattgcaaactctgtctagagcaatcaatcaggcgaggtagcaagttaggctattaaacttttccttttagtaacttctactkttcttctttaggtgaataatttggtcaaatctaccttagatacttttggtaagatcaatttcttggtgaacaatggaggaggccagtttctttcccctgctgaacacatcagttctaagggatggcacgctgtgcttgagaccaacctgacgggtaccttctacatgtgcaaagcaggcaagtaccatcagtatccacaagtcaacatgtctttatttagagatctcaggattcctattagggactcagaagccccatgtcattaacatttattggctggattttctcacttacaacataggaatgtaaattggtacatttcagtatagtaatttggcaatatttataaaatgtggatatccttcaatctcatcattttatttcttggaatttattatgagaaaattattaatgatctgtacatagatttagctattaatttgttcataaaattggagaaaactctcacacttactctgtttttaagaatgaatctattaaatcttttagcagaaccaattaataaattcagggagaataccagagacagagtctgtatgctctctaacaactaattagcatgcatacatagtctttggattaaaggtcatgtttcgtgggtggttagtactgaactcctgagttgggtaactcaagagattttgtaaaaactacccaaatcttcttatgatgaaaaatacagaacaagtacaaccctatctcaaagggtcttcatgccaacatgaattaggctttatattcttagtatctacaagtcagaggtcttgcagacatctctacctaactagcagaatcaacctctgtctaagtcgtgatacaagttgggttgttccagtggaaaaacccagaaacaacagggcttgaatatgagtttatttttctcacataaaaagtccaggtaggtagtgtaaggattatatggtagtttcataatcattaggaactgaagatccttcttattgctccactgttcttgacctgtggtttccatttcatgattcaagagggctgctccagttcttgctatcaaatctgcattccagacaacaggaatggggaaaaagggtagtgctcacccattccttttatgggcaccatctggaagtagcaccatgatgtttgctcacattcgtcagctagaattcagttaaatgatcatacctagctgtaaaagaaactgggaaatagagtccttaggtgggcagctatgtgcctaaaacaaattctatttctatggaagaaagggagaatgagtattgggagacatctagtggtctctaacccaagctttgtaactctgtgctttcactccttctaacaggcaaatcagcaatgtcttaccaatccaagataccttgctaacaactgtcaattaaaagtctacagaattgaaattcagccatgatttttattagccaaaactgaattaaagaatacaaggctggccgggcatggtggctcatgcctgtaatcccagcactttgggaggccgaggcgggcggattacctgagctcaggagtttgagaccagcctgggcaacacggtgaaaccccgtctctactaagatacaaaaaaaaagaaaaaaaattagccaggcagcgtgcatctgtagtcccagctacttgggaggctgaggcaggagaatctcttgaacccgagaggcggaggttgtagtgagccgagatcgtgccactgtacttgagcctgggtgacaagagtgagactctgtttcaaataaataaataaaaaaaaagtaaaacaaatacaaggcctattatttttgcttttacttatttggggcttttagtttttacttttcataagttatatttttcttttttttctttttgagacagagtctcgctctgtcacacaggctggagtgcagtggcgtgatctctgctcactgcaacctccacctcctgggttcaagcaattttcctgcctcagcctcccaagtagttgggactacaggcattcaccaccacatctggctaatttttatatttttagtagagacggggtttcaccatgttggccaggatggtctccatctcctgaccttgtgatccacccacctcggcctcccaaaatgctgggattacaggcatgagccactggtgcccagccatatttttctgtatcttgaaaataatagtgaaaaactgaaaaccatgtaaatattctggagtaaaatattagttgagtgaagttttatacatctatatgataaagaactatgcggcccttaaaaatattgacataaaaatgtactcattaacatgaaaaaatattgccagatatcactgccagaaaagcaagttatgaaatattttatccaacatgttcacatttctgttaaaaaaaagtatgtatttatgtgtgcatatatatgaatagaaatgattctgaaaaaatttataccaaaatacagtcgtgttgtttaacaacagggatttgttctgagaaatgtgtcattaggcaatttcattgttgtatgaacatcatggagtgtacctacacaaacctagatggtatagcctgctacacacctaggctacaaacctgtatagcatgttgctgtactgaatactgtaggcaattgtaacacatcaagtatttgtgtatctcgacatagaaaaagtacagtaaaaatgtggtattataatcttatgggaccactgttatatatgcaatctgtttttgaccgaaacattgttgtgacacatgactgtattgacatgtatcacctccaggaggcaaaattacatattatttttatttttttctttgtgcttctctgccctttctactttttctaatatgaccatatattacttatgcaattaaaatgatttaaaagatgactgccctaaagtcccgacccagtctgtttcagcttgtaccctgggacacaatatgctattgttaaagaattgtgaagaaaatccacatataaattattggtgaatttggactttcctatagacttttattgttcattttactgatacaggaatttttaccccaatttacttttggaaaaatgttggatctgtgggaaagttgaagaaataatacaatggatttctgtatacctatcatttagattcatgaagcattgccaggcgtgatggctcatgcctgtaatctcagcactttggaaggccgaggtgggcggatcacttgaggtcaggagttcgaaaccagcctggccaacatggggaaaccctgtctccactaaaaatacaaacattagccgggagtggtggtgcatggctatagtcccagctacttgggaggctgaggcaggagaattgcttgaacctgggagatggaggttgcagtgagctgggatggcgcctccaggctgggtgacagagtgagactctgtctcaaaaaaaaaaaaaaaaaattcaccaygcactaacattcccatttacatgatctctctttctctctctctccctctctacaatcatgcacacacacacacmtactcacacacactcgttttaaataaacaatttgaaaggaaattacagatacaaaggtactttgtttatatatctcttaaatataaacacatgttttctatataattacaataccattattacacctaagaaaattcacagtaattcaataaaatcactcattatatagtccttattgaaatttccctaattgttttcccagcttttaaaatccaagatgttwtcaaattcatgtattgcatttttttatgtctctttagtttcttgtactctaaaaaaaatccatactttttatatttcataacagtgacttatagaatgttccaaattctggatttctctaattgttttgtggtgattatattcacttaaatatttctggcaagaccccttcatatatggtatatatacttcttactgcattacacctgtaagtctgttgttaaggtgattttactattggtcatcttaaattttttcgcttgtctaagattctgaccaccaaacctttctgttgtaaagatacatttttctatttgtaaactataagtaatctgtggataatactttgagaccatgtgaagatactgttttcctatgtacttttatccaatgggtttaggttccttttttttttttttttttttttttttttttttgagacagggtttcactctgtcacctgggttggagtgcagtgatgtgatcgtggctcactgcagcctccaccccctgggctcaatcgattcttccacctcctgagtagctggaggtacaggtgcatactaggctactaaccaccatgctcagctaatttttttttttttttttttttttttggtagagccggggtctccccttgttgccgaggctggtctcaaactcctgggctgaagccatccatccgcctctgcctctcaaagtgctgggatataggtgtgaggcactgctcccggctcattccatttttgattcttgcccgattcagtttcagaattggaagatgcaaaatgatgattttaaaaatttatgccttatttatttattaattggcattcttttataaagatgagtttttcctttttttctcacctcctaagccttactattgatgaatggaatttatttttattcagtatttctaacccattattgtcattttctctctgatgttctagttgaccagctaatctggcttctgtgtctttttgaaatggctcagacctgtttctccaagaagacctagttccctttagtaggtaataataattattgtttgcttatttatttatttactttttggagagagagtcttgctctgtcacccaggctggagagtagtggttcaaggctgcatagcccactgcaaccttgaactcctggggtcaagcaatcctccccgcttcagcctaccgagcagctgctactayaggcacatgacaccatgccaggctaattttttaatttttcatagagacagagtttttctstgttgcccaggctggtcttgaactcctggccttaagtgatcctctcaccttgacctgccaaagtgctgggattacgggtgtgagccaccactcctagccgggaatgatttttagaaggcgagatttgggtactacatgtgttcactactactgggttatcattacttgtagacattttcagaactaggaaataaataaatatatgtatatggtggtatttatccagaagcrgaargtgtgtgtagaataatttaaatggttattctcctttcttgtgctaaaatcaaatggttttatatgttttcatatatttttcatatatgttttcaagcatatataaataataaaatatttaacaatgaggttaacaaaaaagtgtaagacttgtatgccacaaactgccagacattgctgagagaaatcaaagaagatttaaataatgtaaaaatattcagtgtttatgggttagaaggtccaatattgttaatgtgttagttcttcccaaattgatctgtagattcagagcaatccctgtcaatttttgtagaaattaacaaactgatcctaaactacatatggagatgcagagggcccagaatagccaaaacaattttgcaaaagaagaaagttggaggacttaatgcttcttgattgcaaagctatttcttgattttaagacagtgtggtactgacataggctagatatatagatcaacatgattatagtcattagggaaatgcaaataaaaactccagtgtgataccacttcacacccactagatggctattatcaaaaaatcagacagcagtggcgtgtagaaactacatcccccatgcatttctgagaacaatgtaaaatggggagggacactttggaaaaccatttggcagtttctttaaaagctaaacagagttaacatatgaccacacaaagatttgtattcataattgctccaaagtggaactatccaaatgtttatcagctgataagtggataaataaaacatggcatatccacataatggaatactactcggcaatcaaaaaggaactrttaacacwttacaacgtggatgaacctcacaaacatgattctaagtggaagaagttagacacaaaagaccacgtattgtgtgattcactttacattagattttcgaaaaggtaaaggcaaatctagagaaacagaaagatgagtgtttacctggggatgggttaagctgcagatgggtgtgaaggaactttttggggtgatggaaaggttctcaagctggattgtggtaatggttgcataactccgtatatttattaaaagtcattacattgcacacttaaagtagatgaattttatgatgtataaattttacctcagtcaggctttttataaggaaatgtaaatggacgtgtaaaacatatcaaacaggcagtgtgctgaaacaaggtatcaggagggccaggatactttaaaaatttaatgattgagtttgcctctatcctgcagtttacagctcctggatgaaaragcatggaggatctatcgtcaatatcattgtccctactaaagctggatttccattagctstgtaagcgtttttatatagttttctttctaagtctttgagttttgtcttctgattgggggaagcatgttagggaacatttcttaaatcaagatcattaatacctttaatgagctgtgattctaacagttaacattttattttatttgaacttaaaattcaaagtacttctaaaacattttcatccagatgcggactgccagatttaccaaggaaagggaaaatagtatttgttttttgtctgatgttcagattaaactggatgtcttgtgttttcttgggcaactctaatcccgatgtgactaaactggccatcactgtctaggaatagcttatttgttaaagtatagaaatgaaactaatctgtgttaatttagatttgaataccattaatatagctacttgattttacacaggactgctaagttgttcctcctaacagataatccaggattttttctccaaaagtttctaaggttttgtgcctctgattagccactctgtacacagacagcatgcctcctttatgcaaattttagtaccctgctcatttcctggattatgcagaactcccaaacatgtataggataaaaataaaattcaacttggcttaagtaaaaatctagggcagtggttctccaaaagtggcttccagaccagccacatccccatcacttgggagaagttgttagcacagcaaattatccagccccacaccagatctgctgcaagagaaactctgggggcagagcgcagccgtcgtgcaagccctggaggggatcctggtacctgcagagccactgcggaaagggcatgttaggttcagccacaatgttagcaggaagctgcctctccttttggttttgctttcttcatgtctgcgtacattctcaggcaggctgtctctaggtgtggcaaaaggcgagtactagcaagagttacaggtcaacactctagctgttcttaactctccagtgagagagtgcctctcaagtcatgccagcaaaaacaatattaatggtgccagcaggtcccagagaggatactcattaactgaccctgcctggttatgtgttcagtcattaaccaaaaactgtagaaatgaggttgctctgctatgcatggtcagcctgaggaatgaggaactgtggtcatcatcgctcagacatggactgagaacaggcaagaggtacttcctcaagtggaaatcaatgtgatgttactaaaaacagagtaaaaaatggtgtgcaggccattgataccactctaccttcttttcctgctcattattctttactaaatgtatttacctattttagcatcttggaagaaataattcagattgtaggttctttctggcatttcccatcctcacaggcaactagtgttaatagttttgggggcatatctttttcctacattttaaccacaaatttaggatgctataaacactattctgtatcttgatgttctcaaatgaagcaaatatcctggagatattttcttaacagagtctaaagagatttcttcttatttttttatggctaatatgccacttttataaaccataagtaaggaatgatttgtgtaaccattttccagttggtgagcatttgggttgtttccaaccttttgttattaccaaaaccaaactaaacacctgcagtaagtaacattttctgtacatcagatagtgtgtagcctaaattgcaagaggtataattgctaagtccaaagccaaatgcctttgtaattttaagagatattgccaaactgccctttagaaaagttgtagttcctttatgagtgaaatgtgtcctctttcatgcatatgtaagaagtaatgagagtttcttttcttaaaatacatttttgaaatgaaatcactggcttttctgatattcggttggctagaaaaaaaacacagcttgtctttaacatggaaaagaagtgtttcagatacttcttgcttttgttctcttaagaatcgtttccttttccagtggccttcacactttggaccatgactcatagtaagaaattttacatcttgacctagtaaacacatatgtgtatatgtgtctataggcaaaacaaaattcgtgaagcaaacattcttactatgtattgtgcactctgatttttctttctttcctttttttttttttttttttctgagatggagttttgctcctgttgcccaggctgaagtgcaatggggcgatcttggctcactgcaacctctgcctcctgggttcaagtgattcttatgcctcagcctcctgagtagctggggttataggcacccaccaccacgtccagtagttttttgtatttttagtagagatggggtttcaccatgttggtcaggctggtctcgaactcctgacctcaggtgatccacctgcctcagcctcccaaagtgctgggattacaggcatgagccaccacacccggctgatattttcaattttattgtggtctactctgttgtattttctttttttacacttgctgcttattacttgctaattttatttcactattagcattgtgttgtaatttacaatttgaaagacatggctttaggtatcctctacaatagaagaggaggatgaatgtcagagattgagcactccttttttttaaattttagctctcttaagagacaaattgaaactgttggctgtcgcttgtttacttgaccagtacaggtacatgtgcaagatacatctggaaatactaaaatgaatcagataccatccacactctgagggagtctacaactagtaggggagcaaagcatgaaaataatcagctagagagagaaggtgttggatattccagtaaaggtatttgcaagtgtgcaagataaaaggagcacagaggagggcagcatccaggcgacatgtctcaaaggtgaactcgagtttggtgacatatgaggaggagaaaggaaggcaagtcaatgagacatttactgtgtaaagacacagaaatttgagacactgtggcacttttgggaactacaaataattctttgtgatgatgggtggtacggctaaatggaaattaataccttggaatggagtgggagtcacaaaaggccttaactaccagggagaggagtttgaagtgcatcaggggttcctacactagagcctgtggccctggggctctggggctgtgcatccaggagggcgcttaaatctgcagggttatcacaactaaggcatttctttggaggatctttttactcttaatggttgagaaggaaaacatttatattcaagtatgtattacaaagaaaagctcaagaatgatgaggatttgggagtcatagtttgggggagcattatctagttgtccttttttgggaatatttatgtactaggtttagtcctattacaagtgtttttttttgtttgtttgtttttttgtttttttgtttttttttttgagacggaattttgttcttgttgcccaggctggactgcaatggcactatcgcagctcaccacgacctccgcctcctgggttcaggcgattctcctgcctcagcttcctgagtagctgggattacaggcatgcgtcaccatgcccggctaatttagtatttttaatagagacggggtttctctgtgttgctcagggtggtctcgaacccccgacctcaggtgatgtgcccaccttggcctctcaatgtgctgagattacaggcgtgagccactgtgcctggcctacaagttgtttttacattaagtgtcttttttttttttttttgtaagacacagtctcgctctatcacccaggctggagtgcagtggtgcaatttctgctcactgcagcctccgcctcccgggttcaagcaattctcctgactcagcctcccatgtagctgggattacaggtgcacgccactatgcccggctaactttttgtatttttagtagtgacggggtttcactgtgctggccaggctggtcttgaactcctgaccttgtgatccgcctgcctcggcctcccagagtgctgggattacaggcgtgagccaccacgcctggcctacattaagtatctttgaataaccccaaattcattttttaactaatgaccaatttacaacatctatgactgtagaatttggaataacttgtgaagttcaccgtaatggaatttgacatatttgactcatattctgattttgattaatttttccatgggcaatagatatttattttttcagaaaagaagtcagtggggctggatgcagtggctcacgcctgtaatcccagcactttgggaggctgaggtgggtagatcacctgaggtcaggagttcgagaccagcatgggcaacatggtgaaaccccatctctactaaaaatacaaaatttagctaggtgtggtgtcacacacctgtaatcttagctactcggggggctgaggtatgagaatcacttgaatctgggaggtagaggttggagtgagactctgtaccccctccaaaaaaaaaaaaaaaaaagaaagaaaaaagaacttagtgaccttatttaacctactatctcagttatttcctacttttcttttttttttttcttttttttttgagatggagtttcactcttgttgcccaagttggagtgcaatggtgcgatctcggctcactgcaacctccacctcctgggttccagtgattctcctgtctcagcctcctgagtagctgggattacaggcacctgccaccatgcccagctaaaatttttgtatttttagtagaaacggggtttcaccatgttggccaggctggtctcgaactcctgacctcatgtgatccacctgcctcaacctcccaaagtgctgggattacaggcatgagccactgcacccagcctatctcagtcatttctttcataagagtctaaaggtcatccaaatagaactgggagaaaaacaatacaccaggaagtaacttgaaaaacacaagtttaccagttgaaaagtgtggattaaaaaaatatatatttttgctgatttctttagtatcttttcaacattctgattccttccattttttagggaagctagagattgcatttttaagaggcaatagagaaggtctttttctacaaccttagataacaggcactgaaaaagaaaaattacacaaatataggttgagcatcctgatctgaaaactcaaaatccagaatgctccaaaatctgaaaatttttgagcaccaataggatgctcaaaggaaatgctttttggagcatttcagattttggattttcagattagggatgctaaaccaggtagtatatgcaaatattccaaaatctgaacagatttggccaggcccggtggctcacgtctgtaatcccagcactttgggaggccgaggcaggcagatcacgaggtcaggagatcgagaccatcctggctaacacggtgaaacccccgtctctactaaaaatacaaaaaactagctgggcacggtggcgggtgcctgtagtcccagctactcgggaggctgaggcaggagaatggcgtgaacccaggaggtggagcttgcagtgagccgagatcatgccactgcactccagcctgggtgacagagtgagactcccatctcaaaacaaaacaaaacaaaacaaaatcagaacagatttgaaatccaaagcacttctggttccaagcattttgaataaggcatactcaatttgtaaaatgttcagttgaggctgggtgtgctggatcatgcctgtaatcccagcactttgggaggctgaggcgggcagatcatctgaggtcaggagtttgagaccagcctggccaacatgctgaaaccccatctctactaaaaatacaaaaattagccaggcgtgatggcgcactcctataaacccagctattcgggaggctgaggcaggagaatcacttgaacccaggaagcagaggttgcagtgagccgagatcatgccactgcattccagcctgggtgacagagcgagactctgtctgaaaaacacaaaaaacaaaaacagagcattcgtgaactgtgagacagttggagtctctgaaagagacatgagaaacagggacggaaaaaaatttgaagacactgggtgaaaattttccaaatttgataaaaactgtaaacctatagatcgaagaagctcaacaaaccccagtacaagaaacatgaagaaaagtgtacaaggcacatcataatcatattgctgagaaccagtgctaaagagaaagtcttaaaagcagctggaggaaaaagacacattgtatacagaagcagatttctcatcagcaccaatgcaagttaaaagttagtggtgtaacatctttaaagtgccaacagaaaaaaccatgccaacctggaattctttatccattgaaatatctttcaaaaacaaagatgaattaaagactttttcaaacatataaaatctgcaagaattatcaccagcagacctatgctaaaataaatgttaaaggaagtccattatttactaaataatctgttttttaccagctgatttcaaatacctttgattgaaagagttttcctaattagttgtataagttaattttctcacattaaattatcctatatttggttttgaggatcttgtcattagaaattctaagccatggtgtctatctacacaagaccccatacttcatttatttttgagatggagtctcattctgttgcccaggctggagtgcagtggtgtgataacagcttactgcaaactccatctcccagggtcaagcgattctcctgcctcagcctcctgaacagctgggattacagatgcctgccaccatgcccggtaatttttgtatttttagtagagatggggtttcaccatgttggccaggctggtcttgaactcttgacctcaggtgatccgcccgccttggcctcccaaagtgctaggattataggtgtgagccactgcacctggcctcctttgttatttaaaatcgatgttaaaaataaccacaggcttgaaatccttaaaattaccaatgtgttttcctttgtaatcaaagttctttaaagtattcctcttacgtagtgatttggggagccttatctgggtctatgccatgtgagatttgcttgatcatcagctgtggcttggatttaatattgaaggacatagttttttcttcgttgtttagacagaagctcaacaagacagactccatagcaagaagtctcttgtggaattctgtcaggtagttggcacacttgtgagcttgatgaacaagagaaatattcaacagaagctgattgtcatgtttatgttttgtctttcaaaggcattctggagctgcaagagcaggtgtttacaacctcaccaaatctttagctttggaatggscctgcagtggaatacggatcaattgtgttgcccctgtaggtaaacgatctatattgaaatttattgacaaattatgctttctgattccatttgtgatgttgatagaggtatttggtaataagcaagtatagcataaaagattgactttaaaacatagataaaatggaaagcctaattttctttttttttttttttttttgagatggagtctctgtcgcccaggccggagtgcagtggcatgatcgtggctcactataacttccacctccaaggctcaagtgattcttgtgcctcagcctcctaagtagctgggactacaggcacaagccaccatgcccagctaattttttggattttagtagagacgggttttcaccatattgccctgggtggtctcgaactcctgagctcaggagatctgttcgccatggcctctcaaagtgctgggattacagatgtgagccaccgcacccggcccagaaggtctaattatcattatggaagtactctttgatttacagccagattgtcaagaatgttaaaccagtgattcttgattctggctttttttttttttttttagaaggagtcttgctctgttgcccaggctggagagcagtggcgtgatcttggctcactgcaacctctgcctcctgggttcaagtgattctcctgcctcagcctcccaagtagctgggactacaggcacctgccaccacccctggctaatttttgtatttttagtagagacggggtttcactgtgttagccagcgtggtctcgatctcctgacttcgtgatccacccacgtctgcctcccaaagtactgggattacaggcgtgagccactgcgcccagcctatctatagatcttatctctgtaatatcagtaggtgttatctgtgccactcaatgaagactatgcatgactgacttcaagcatgaagttagtaatctcatctctgacaaaggtgttgctactaatattaattcatgtttgccttccagagacttttttggttaaatgatcaaattttaatacttctagattttatcctctttaaataaaaggcaacatattatgtaattggaaaccaatatatctctccagtatcagtatcatttgaagttattaaaactgccacattttctaattttattttaacttctctttccgccccttctctccataattcaacagtttgaatccattacaaatagctgtatcctgtgagatacaattttttttttaaatgtttgagacaaggtcttgctgtgttgccyaggctgaagtgcggtagtgcgatcacggctcactgcagcctcgaactcctgggcgcaagcgatcctcccaactcagcctcctgagtagctgggaccacaggcaggtaccaccatgcccagctaattcttttttatattttttgtagagacatagtctccctattttgcccaggctggtctcaaactcctaggctcacacaatcctccagcttcaccctcgcaaagtgctgggattacaggcatgagccactgcacctggcctgggatacagtttttgagtaattttcctgaccttagaaagccagtgaaagatacatttaaaaattcctaaacaatgaaaaatttagtttattggtattggactcaaatgctttatttgcgatttcaatctaggtaaaaagccaagaaaatattgcatttttctaagtctcacgtagccattgcccagtcttctcttgtaaagcagagaagccaaatggaaactaaaatagacagagtcccctgtcccattgttcccagttaagtgcctctttcatttacttacacaatcatgaccttcagaaaacaagtctttcatgaaaaaatccagggcatggttaggaggaagaggaggtcacaaaataactattcagatcatccatttgtggatggtggggactgtacttctttgacaacatggaggaaatttaatatcagcactgttaacttttttttgacttaagctacttaatgtttgaaatgccagtagagtatcttgatatctttataattaaaatttaatataatacactttattttgtccctgttttatttttaaacacagggagttatttattcccagactgctgtggagaactatggttcctggggacaaagcttctttgaagggtcttttcagaaaatccccgctaaacgaattggtgttcctgaggaggtaaggtatatttccagcattgattagaattgctgtgtgttatactttggaatttgtaattcagtgtcatttttatgcggtctggacgacattatttctcccactgccagcagaacatttcccctgttctttctggctgtcagggatattctggttgtgctttggctactgacagcaatctgtacttgagagtgaatgtggtataaattaataacagcattttttttgttagtttgttttactgtattttcagctacattattttattacatggcatttgttggtacacaggaccctaagcaaattagacaactatggccatatgaagttccacatgagatttcggttaaggttgaagtctgtaaaatcagcagctttccaaactgccagcagcggtttttttttttttttttttttttgcttgagacagtgtttcactctgttacaggctaagtatagtgtcacgatcatagctcactgcaggcttgaactcccaccttggcctcccaaagtgctgggatgatgatgatgacgatgatgaagacgatgacttttttgacagagtctctttgttgcccaggctggagtgcagtggcgcgatcttggcccactggaacttccacctcctgggttcaagcaattctcctgccccagcctcccgagtagctggaattacagatgtatgccaccacacctgactgatttttgtgtttttagtagaggcgaagtttcaccatgttggctaggctagtctcgaactactgaccttaagtgatacgcccacctcagcctcctaaagtgctgggattacatgtgtgagccgccacacctagctttgcatcagtcttgaaatgcaatttttttttttttttttttttaagaaaacaaggccaggcgcagtggctcatgcctgtaatcccagcactttgggaggccgaggcaggcggatcacgagttcagaagatcgagaccatcctggctaacacggtgaaaccccgcctctactaaaaatacaaaaaaattacccgggtgtggtggcggacacctgtagtcccagctactggggaggctgaggcaggagaatggtgtgaacccgggaggcggagcttgcagtgagctgagattgcaccactgcactccagcctgggcgacagagcaagactctatctcaaaaaataaaataaaataaaataaagaaaagaaaaggatgtctttcccacaataataaaaatgaaaataactagtagtaaacttacctctaaatgaaaaaaaaaaaaatcacctgcctccttagggcagtaggcagtgcatcagtttcataaatgaaaaaaacaaaacaaaacaaaaaaacccctttttctgtgaagcagcaaaaagaccagattaggggcatataatattccttgatggggagaaccaattttattaaaaagtcaggtttccctaaattataaatttaatatcttttgggaatttaacacgctgattctatcaaaaatatgtatgcaaaaattgccaaaaatgttttgaaaatgaataatgggaggattacccttcatggtataatgaaaccatgaagctatatttatttatgtactgtgtatttacatactatgaagctgtatttatttacagcatctggtgctggtaatgaaacatattaaaaatagtagaacagaacagattcttgaattggaaccatatgtgggagtttatggagtcaaagtagcatttcaatctgtaaggaaaggataaaacactcagcaaagtgttgggggcatttggccgtttagtaataaattagactccctatcctgtattatatacaaaataactttcagatttattgaagtgataattataaaagcaagcccatgaaactctttaaaagagttatcatgcttagaactagcttttattatcagtttggtgaatgtctttccagaaatgtactttgcatgcattaaaaatttgtatttgttgacttttttttttttttttcctgagacgaagttacactcttcttgcccaggctggagtgcggtggcacgatctcggctcaccacaacctctacctcctgggtttaagcgattctcctgcctcagccttcagagtagctgggattacaggcatgcgccaccacacctggctagttttgtagagacagggtttcttcatgctggtcaggctggtcttgaactcctgacctcaggtgatccacctgcctcaacctcccaaagtgctgggattataggcgtgaactaccacgcctggcctatttattgacttttttacgaaaacagaatttactctgtgttattttctgaaacttgttatgggtatactataatatcatcaaatcccattatgatttggattttatttatatttttgttcttgcagtaattctgcaatgaacattatgaatataatcatgtactcttgggtgaggggatatgtttctagaaacagagttcctgaaccaaaatagacttgcattgtattttggaagatactgttaaatcaaacatttgatgagccatgttaaccaaggtctttggatttgtattctgaaaactaagagtaatatttaatgaattttaatcaaggcaattatattacatttttatttttgatagaatactttgggaggctaggcacagtggctcacacctgtaatcccaacactttggaagcctaaggcaggtggatcacttgaggtaggagttcaagatcagcctggccaacatggcgaaaccccgtctatactaaaaaatacaaaaattagccaagcatggtggcatatgcctgtagtcccagttacctgggaggctgaagcaggacaattgcttgaacccgggacacggaggttgcagtgagcagagattgcgccactgcactccagcctgggtgacagtgagacgccttctcaaaaaaaaaaaaaaaaaatatatatatatatatatatatgtatgtatatatatactttatgtggtttacattatctatatttgctgtattagaaattaaaaccaaaatttaagaaatattattaattcattttaaaatagtaataaaggagtacatgttaacataaataacatttactttaaaatagctacatttaaaaaaagaaacaaaaacttttttttttttttttggttcaagcgattctcctgcctcagcctcctgagtagctgggattaacagtcatgcaccagcatgcccagctaatttttgtatttttagtagagacagtgtttcactaagctggccatgctggttcgaattcctggcctcaggtgatccacctgcctcggcctcccaaaatgctgggattacaggcgtgagccaccgcgtctggccggttttttgtgtttttgagggagtgtggtttacagattgttagaggttgtgactacttgggtgggatggttgttgtctggatggcatttcagaaaggagctcattggagcaagtctctttttgatgcgctgactttaacaaacatgttcattggctgagttgtcactactggatcaaacagggttaaaaccagctctgttgcttgttaccatgtctcagtacaatctgccttttcacagtaatgtgggaccttttaaatagtgaattctataccagccctgtccagtagaaatatactaatagtcacatttgtaattttaaacttaccaggagccacataaagtaaaaagaggtgaaattaattttaataatatatttgacttagcctaatacatccaaaacatcrtcatttcaacatgtaatcaacatggaaaattgagatgattttcttcatccctcggagcatccaggattaatgagatattttacattatttttcccatactcagtcttcaaaatccagtgtgtgttctatacttacagcacgtctcaatttggaccagtcatactgaaagtgtttgagtaggcgactatgtctaatggcctcgttttagatagtgcagcactgtactagctgctgggaatacaaggatggagagaaggcttggctgctctccaagctcttagagtctcaaggaggtatagccttgtgaatataggaccaggactgggatgaggcaagcaaggcatggacacaaaatttaaggacccactccctctgagggaagattttgcacttgtgcaaacctgagagtgaatacctccttaaatcttgcaccctcgacaccttatttgcctcaccctagtcctggccctgcctgggggccttttaaactgcagattctgggaccccaaccccagagcttacaattgcaatgatcctggaaggatctaggaatctgaagtctcagtaagcatccctagtgattctaatgcaggtgttttggatcatcaccctttgagaaactctgcttcttcccacagcctcaagtgagagctcctttacaagtcagtgaaataacttccttctgtttgggttgggagtagatgttgctgaactcatcagttccctatttgaatttttaaggagtacagtgggagtctgaagtgcctttggtttatttttatttttatttttttgaaatggagtctcactctgccacccaagctggaatgtagtggtgcagtcttggctcactgcaacctcttaggcccacgcaatgctcccacctcagcctcctaaggagctgggaccacaggtgcccgccactgtgcctggctaagtttttgaagttcctcttgtagagagctcctttgaatgtgtgttgctgggcttttggcctgacaggaccgcagactgaacaaaccagaatgctagtttattgctaaacagacacattgactatttcagggaccaaaacataaaaggcacgaggtagtgatggaaaatggggttgtggaggacaatgaaaggcatggaaggaagtgaattgtttgaaatgggaaagagcagagctgaagcactgagttcacttatggcttcttgacgtcatgtagcttgcttgacatcgtctaaggctccctcataccttgccacctttaccctagtcacctacctgatttcggtgatgctcasgtagaaagggaarttgtaggaaaaggaagttgtctatgtactgtgaggttgtggtgcacatgcacacactgttggattcatgttacaatcatgggctttgagatgcctttactggggaatgtgaggcggttagaaatggggagtatttgcttttacctatgcacatgtgtgtttctgtttccaggtctcctctgtggtctgcttcctactgtctcctgcagcttccttcatcactggacagtcrgtggatgtggatgggggccggagtctctatactcactcgtatgaggtaccaggtgagcagctgaggaatgagcagtcaccagctttatgctgtgtcatgttcaggggtttaaaatttattataagtagttacttaagagatgagggtgctctcttatagaacatcaaaatgtacaaaatgtttatattcatgatgtgatttttttaatgaaatattcctagtcacagaaaatatctaactatctatattatggaactgagctttttgtgcatgcataggttggtggaatttgaaccctgaaaaatattctcagtatatgtttcgaaagaggagacagaaaagaggcaagagcatgctatagttttaaagatttaattccattttgttcctccagtaaatggcttacatatctgagcagaagaatcaggcctgctaggtggggtggggtgctatggtgctattttgtgctctctttgagatatatattgaatgaaggcatatgaaatttctgtattcatcatttttgatgtacaaaaacagaaatttggccgggtatggtggctcatgcctgtaatcccagcactttgggaggctgaggcaagtggatcacttgaggtcaggagatagagaccagcctggttaacacagtgaaaccccgtctctactaaaaatacaaaaaaattagccaggcttggtggcgggtgcctgtagtcccagctacttgggaggctgaggcaggagaatggtgtgaacccgggaggcggaggttgcagtgagccgagattgtgccactgcactctagcctgggcgacagagtgagactcttatctcaaaaaaaaatatatatatatacgcatacgtatatatgtatgtgtatatatatatacatacatatatacgtatgtgtatatatatayacatacatatatacgtatgtgtatatatatatacacrtatacgtatgtrtatatatatatacacatataygtawgtgtatatatatatacacatatacgtatgtatatatataacagttagtcgggtgtggtggtgggcacctgtagtctcagctacttgggaggctgaggtaggagaatcacgtaaacccaggaggcggagattgcagtgagccaagatcatgccactgcactccagcttgggagataaagcaagactctgtctcaagaaaaaaaaccagaagttttataagtttaaatcaaatattgatattacatgcaaatgcctttatgtgtgtgtgtgtctcatgactagataacagaactttgcggtttgaagggtcctaaaagatcacaaagtccagtatcctagttttataaacaacaaaacaaatccacagaagttaaaaggtttatctaagctaataactctaaatcactccaaaaatgtagtaaagggtataaaatgcaaatgtattgaatttctgttgttaaagataattaagtggctactagcaaattaatagatggttgatgtaacccaggtgaatctgaatttcatatcaaggacccagggtctacgtactctttcaggtgctgacagtctgatcaaggcttaaggccttttttgcgttaataaatgattggtgtatgtgagaggcgagcaaaaactcaaactggttttcctctgctctcacaacacaacaaccattagcacggaagacttctgtgaccagttgtttggggttacttcccccgcacagcaaccaagcaagcagttctgcagcagaccccagctgggcgtcctctcattcagttctgacactggagataggatcagatcccacaggctgagggctcagtcccacaggatgccccctgctttggacaccatcacaagtctgggcctctaaaacttctgactgactagcttcaagttggggttcccacgaccccctctttgggttggagtaatttgctagagcagctcacacaactcaggaaaacacttcgatttactggtttatgataaaggatattacaggagatacagccgaaggggtgcacagggcaaggcatgtgagaaggggcacgtagcttctgtgtcctttttggccccaccacctgccaggaaccttcatgtgttcagctatctggaagctcttgaacccagtcctttgggtttttatggaggcttcattacataggcatggttgattaaaccatcagccactggtgatcaacttaaccttcagcccctcttacctccccagaggttgtggggtgggtatgggctgaaggtcccaaccctgtaatcatgccttggtctgtctggtgaccagcccctatactgaagctaactaggggctgccagccatcagtcaatcattaacatataagaacacatcactttggcgagtctaggatattaggagttgtatgcgggagatgggrttgaagaccaaatatatgtttcacaatatcacagtatagaactttaattttacttattattttcccctcccacatgtatttcattactaataacatcaatgtggtgatgtccataggatactgtagttttaagggtcttggttggaaagaagaaatacctacatggttttgccatattgttttctgaaaaaaattccaagtagtgagggtggagagaatctttccacttctctcacagtrgacttcagtcactatttcttatcgcaggttgcactgttttacctttagaagggaaagaaatttcaaatagcttcttccttaggccttcagtgacatgattttcttttgtaattctaacactttttatcattaaaaatatttttttcagtttttgaggaaagcrggtacatctatcttttaagaatatactgccccccgaataatgagattattcagcctttcaytatggtgttttcttttaagattggcagctccaaggtgagaatgcctaagatggaaacttggctctacccttattagccgtatgattgtgagaaagttaatttctataagcctctattttgttcctgtatgcagggacacatacagtatttatttcatagagctgttgggaggattaaattagataagggactttttcttttctttttttttgagacagagtctcactcttgttgcccaggctggagtgcagtgacatgatttcggctcactgcaatctctgcctcccaggttcaagcaattctcctgcctcaggatccagagtagctgggattacaggtgcccgacactatgccccactaatttttttgtagttttagtagagatggagtttcactatgttggccaggctagtctcgaactcctgacctcaggtgatccgcctgcctcggcctcccaaagtgctgggattacaggcatgagccactgtgcctggccttagataatgcacatttaaatccctatgtcaggggctggacaccatggctcacacctgtaatctcagcactttgggaggcaaaggtgggccaattgcttgatcccaggaattcaagaccagcctgggcaacctggcaaaactccgtctcaacaaaacatttaaaaaattagcctggcatggtggcatgtgcctgtacttgggaggcttaggtgggaggatcactggagcccgggaagtcgaggttgcagtgagccatgattgcacaactgcactccagcctggctgacagagtgagaccctgtctcaaaaaataaaaattaaaaaaataaagtcatttgtcgaattggatgcttttagtcacaactcaaaatgggctcatcagtaaaggaattcgctggcacataactgaaaaacaggtaagacttgacttagtagctcactgatctcatcaaggacaagtttttcccctgtttcctgtttttgcctccatggtgttggctctatcttaaggcaggctctcctcattgcaggatggctgcctgctgtttctatgtgtaaggctgatacttctgtgttcatacccagatgcacagagagagggctggaggagtgactttgttccagaatttctaacaaaattctgagatccactctatattcgatcaacttatgcaaatgtccatttccaaccaataactgtggcggggttatagtgcactgactgacttagcttagaccacatgccttggtgccaagcttccctggcaccttctagatcgttaaatggaaacaagctgttggaaagaagagatggggacctggatgctggagaggcaagtagcagtgcctggtacaaagtaaggacactatttttaaattgtgattattaaggagacactatttattgacgatccacagtatgcgaagcactgcacacatggtgtcatatttaaccctcacaactttaaaaggtagatattgttgtatcctttaatagaggaggaaactgaggctcaggaagagacatgtgcccaaattcaggaaagctaacgtgtggcagacctgagattcaaattgaagtcttttctcaaatgtttgccctaaggatttattttttggtgctgagaaaatgtgtgaaccagggaaattaacaagaggatttggtgggagtgaagagggcaaatgagatttgcaagtgacaggaggctttccacttctttaacagatcatgacaactggcccaagggagcaggggacctttctgttgtcaaaaagatgaaggagaccttwaaggagaaagctaagctctgagctgaggaaacaaggtgtcctccatcccccagtgccttcacatcttraggatatgcttctgtactttttaaaagcttatagttggtatggaaaacatttttytkwtttttaagtgttattaattatatctatggaaaaactattcctgaaatatatacagtcttatgtcccaatcagagtcttttaacctatgatttaaaaatgtataagtaacagaaattaacatattttaatgactttactttttatttctaagaaaagtatttgaaaaatggaataattttaaatcaatgataattctagggatcatgaactcccagaagattttattatttaattgtaaaggtagaggccagacgcagtggctcacgcctgtaattccagcactttgggaggccgaggtaggcgggtcagttgaggtcaggagttcaagaccaggctggccaacatggtaaaaccctgtctctactgaaaaacaacaaaaacaaaaacacaaattagtcgggtgtggtggcacacacctgtagtcccaggtacttgggaggctgaggcaggaggatcgcttgaacccaggaagcagaggttgcagtgagctgagatcatgctactgcagtccagcctgggctacagagtgagactgcatctcaaaaaaaacccaaaaaacaaaaacaaacaacaacaacaaaattawaaaggtagaaaataaacctaaattgtgtcgtaattaagattattaaaattagaattatacaatgacttatttttggtggcaaatactttaggagcaataatgccttatggtaattattgatgtatagtttcttttgtttatgaagtcaaatttgtataaattctcttaattcaaagaaaaagttttatgtgatttatttttggcagtgcctgatttgtgtcttgattttctgtccaaagtattcccttttttccatgtatctccttttgtaggcaaaaacaaaatttcagttgcatgcaaatgtattagggttccatattctgccttccgtggctccagtctgatagttagacccttattgaagaaatgcctttagcagattgaatatgttcattctttgtcttaatcaaagttctttcaagtatctgaggtgaagtagctattttcttttttttatcattaacactcactttatttatttatttatttatttatttttaagatggagtctcactctgtcacccaggctggagtgcagtagcataatctcggctcaccacaacctccacctcctgggttcaagtgattctgctgcttcagcctcctgcgtagctgggatgacaggtgtgcaccaccacgcccggccaatttttgtatttttagtagagatggtgtttcaccatattggccaggctggtcttgatctcctgaccttaagtgatctgcccgctttggcctcccaaattgctgggattacaggtgagagccaccacgcccggcctgtcatttaccctcattttaaagtgtgtgagttaccaagctctggggtttgggacccagaatctgcagctttctcatgctcccaagcagggctagcacgagggagaggctaatgaggtgcccagggtgcagcatttaaggagctattctccattgtcaggtttgtgccagtgcagaattgcccctgagagtgagtgtgtccttcaattttgtgctcatactaataatgtgggaagatcagaaagcttcattttcctcccagatagccctttaacagtggccttctggaactgataatatcataacaactgagaattacaaaccatgttagagggaaaagtggccctaatacaggttggtggagaagatggaaaaggcagggcttgctttcacatgacctgtgttaatgactgccatcgactccttaaatctccatagcgttgccagttatttctgcttaagggacagaacctgcctatgtagcactaaacttaggtacaactgcttattagagcttcttcttagactatcactggacagctggtcattatctatatttttagaattatgaatttattatccaggactcttatatacatcataatagtatcctgtcaataatgtacttttgcaactacgcttagtaaattttgttgtagagtgactgttcttgaataggcttaataatttggagcacctactatgtatttagcattatgctaggagtcagacatgcaatggtgaaaaaatacacatgtatcttgtccttactgagcttacagtagggagagattgagagaaagagagagaacacgagtgctataaaggataaggccatgatgtccacggcatataactgaaagacaggaaacaaaatgaaaattctatatttatgtaaaaagagtttgttgataaagatgacccttgtgaacattatacctcccccacactaatcttatgctttgtggcttatgttcaggtcctctgaaaagyaggtgcccagacataatgagatttgcatgacacttattgggtaccaggcccgtgaaggataagggcagggagccagagaaggcagcgatggccttcagaccatgctgcaaggctgacccctgtaaaagagaggggagagaggattgggcaggaggcatctcagattgcagcaaagtgatgctttcttaagacaggcttgctgaaagtatgcattgacatttacagtggcccacaggaataccagcaggcgctcagtgggtcatgtggattctctacagtgtaaaagtaactctctctcctcctgctggtgcctggacaaagggagttcagagatcagttccagcatcagtcatagtttgtagctcactgggaccttatgtcccctggcaagagcctccctctttggcaccaggatttccagtgctgctattctccttaaatcctgcagcagatcattgggaatgatggaatgcagggccactcccagtttcatctaccggatcccagacatggtcccaaacctactggggacatgcatctttgaagacagcaagcactccatcctggcccttcagctgggtcttggttgttcaagccctctatgaggctggctgcctatggatggtgcggggtgtggatacacagtggttccacaaccaggggctcactctttcgtctccttcactgggaggtgagtcacctgattggatgctatgccccatgggattccatgcctatggttcaggctttctatagcccccagatagtcatggtgtctgagtccctgcaggcaggaaagacaaactcttgcctggaagaggtatctgtcactatgaggagtgacgcagaaaccacacagcaatttgaacagggcaagttaaaagtgaagagtgattatcacagcagattggagtagtgaaggactggctagtaggaagtaaaaagaacttgaacatgagaatagcagatatcaggagtagcctgcaccactaggactaagactgagagctcaaagaagaaccttggctgggcgcagtgactcatgcctggaatcccggcactttgggaggctgaggtgggcagatcatctgagatcaggagtttgagaccagcctggccaacatggtgaaaccccgtctctatgaaaaatacaaaaaattagccggcctggtggcgggcgtctgtagtcccagctactagtgaagctaaggcaggagaatcacttgaacctgagggcggagattgcagtgagccaagattgcaccattgcactccagcctaggtgacagagtaagaccctgtctcgaaaaaaaaaaaaaaaagaagagccctccatagcacccctggggctgacacccagattgagtagggagggcatggctgtgaatcagtggagggcagagaagtcactgtggtgctctgctggtggaacttgctagaaacctgccctctggcatcctggggaaaactgtacagagaagtgtcctaccagaggcctctgatgcaaaaccccctgagggaggtgctgggaagctggtgctccttagcactcctgtgaagcagtctgcactgcacgggtcaggaagcaaaaccctcttcctcctccaatgtctctccatcaccctctcccaacaaagcttcagagcccgctggctcaggggaacaacttagaggacccagatccattttctcagaacagaggagcaattacatctggagcctgccacttgtcgactggccgtcctgtggcccattggtctccttaaagagcaatgccacttcagggctcagcaatgatctgtgttgcaggaaggttggacatgcaggggcagtgacagctccgttgaccttggttaacagggagtccatgctaatgggccgtctacagcctgcctccatcactgtgcctgtcacaccagttctgggctggccggtgatgaagtccagctatcaactggctgagttttcttgactgcttggttgttctacacctcttccatgaggattgcattctggggacattaacgtgggaggcggaaatgacactcccctggagcgcccactcccctgggctcatccgtaatcctctaccccagaccttgtttcctggccactgtatatattctcatctcgggccacttttcattccattgtagataccagttgcactctcacacgctgcccattagaaagattttccatctccaccatcacggggccactcctgaatagagctataatgaagttctgacaactgtgaaggagagagaggaggaagggaattgggtaggaaaaaaaaatatcacagactgcagtacagtccaagaaagagagggccaggcagatgggaagtcctcaaggcaaagtcacccatgggaaccacccttgtcccaagggaatagcctagatggacagcagggctgtgcttgtcacaggccaggagcagcccgaggggaaggcagtgatggatggagaggggcagcagctgggacccacagccaatcaattttgtttcctgtagcaggaggtctaaggggtttcttttcatggctgccatttggctattctgcaactgtaaaacttcaccattgatctcattcattttttaacatgacctggggcttggctcaaagcagtgccaccttgtggttagttttggaacaccagcctgtctgggcagtggcttcttaggatgcaagacctgcttgcaaagcttcaacttgagctttagtttcttcctttggtatttcttctgcactccttgtttacaaggatttcatttcagcaaaggagccatctattgaaataagatcaaccagcgggaagattctaaaccatattcaggaaaggtatgctacgtcaaaactagcgattattgagcccatgttttaagacagccaaatctctaggctattttggatcttatcctggacaacactatttctgatttgtatggtaaccaaggccctctgtgggttagtttcagctttcaagcagccgtggctcagtctagtgagaggcagtcctgcgttctgcctggtgggagtcagagtcttaagatttgccaagtcctgatgccatcagcattcacattgccttacagaggtctcctccccactccaagataggtaggcccaccacctgttcttgtctgcagccttcagacttgttctccttgaggtcttcagttccgcaataggaaatatcttgaaatccccttcttgactgaggccaccctttgctgaggttactgacctttctgcttgctgcttcctggcatcctgtttctctctgcttattttgcccttttctgccagttccttcagggctcttgttggattctctctttccatgaagtacagattttagagtgcactggagtccaactgcttgggttcgaatcccagcttctaccacttactcgctcttgtgaaggcattgagacagcggaggaatttgtatgcaaaattactggtcattttattcaacgtgataatggcatggcagttgttattattttttatttaagaaatgttgatttctaggatttactttaaaatattccaacttaaaaaaatggaggaaggggggttggtgaaatgagattggcaacatggtaataattgtctaagctgggtggcagatacattatacattatctgtctgcagctatattatacattatatggttaattctactagtctctcaatcttgggtaagtttagaagttccccaactaaaaggtgtaaaggtttaaaatgtgtaaaatgaaaatggcctcatgaattatgaatgaattatttgtattcaaataattgtggttggttgtggaacaccagcccgtctgagcagtgccttcttaggattcaagacctggttgcaaagcttcaacttgagctttagttttttgcttggtatttcttctgcactccttgtttacaaggatttcatttcagcaaagaaggcatctattgaaataagaccaaccagcaggaagattctaaaccgtattcaagaaaggtatgctacatcaaaactagcaattattgagcccaaaatgaattatttggatgggggtaacatggggaagagtgagctgactacatataaaatttactggggagaaacaggagggagtttgcactgagcctcctgtagtttatggtggttcatgagtgtggcagagagagtggaagaccaggtcccaaatagaatatatgtttgatggtgtaaagctattgccttctgacctggattctgctctgcaggccctaggaagacccctgtacccctggtcagcctcccatgctgggttagcattaccagttagtcagctctagcataagccaactgggtcaacggagggttgcaagaaatggacaatgtcatccagttattctatagcattgttgtacctgag

SEQ ID NO: 93605 - DNA, 50310 bp, Homo sapiens
caactttattcttccagctgtacaagcgatcatcaatgctccttctcttcctctcaaacttggcatccaatttgtcaacaaatcttattggctcttccttcaaaatatatctgggatttaattacctcctccaatgtccactgctgccactctgggccgtgccaccctcatctttcacctagtgtcaaggtcctggatcattgtgagagctttcgtagggattcccctgttccacctttgctctcatacaaccagagtgagtgtgtgaaagaggtaaattagatgtcactccttcccaaaactctccaagggcttcctttctcattcagaataaaagccgaagtctttacgatgtgcccacacggccttatccaacccgattgctgacattgtgtcttccttctcctagtgaagttccctctgttgctaccataccacccttcctgacattccttagacactacagccacactccctatgcacggcctttgcacttgttcccactgcctggaactttctccttcaaataccctgtggcttgttatcccccacccagccctccagtcctcactcaaatgtaccttgtcagtaagaaattctctgccaggccttcctaaaggtgcagctacctctgccctgtccctcttctctgctttattttatccaaaaggataaagtgtctcttcacctgtggtccacagtggctcatgcctgtaataccagtactttgggaggccgagatgggtagatcgcttgaggtcaggaattcaagaccagcctggccaacatggtgaaaccctgtctctactaaaaatacaaaaattagccgggcgtggtggcatgcacctgtaatcccagctactcggcaggagaattgcttgaacccaggaggcagaggttgcagtgagcccagatcgcgtcactgcactccagcctaggtgacagagcaagactcagtctcaaaaaaccaaaaaacattaaatgccttcctgaatgaattttctttctttagctttttttgtcgctcgggttatctactagacctaattaagcaagcttatcttcttccaggcttcaactactacttgaatttcattaattttccacgtttatttatctttaacctcacttttattcctgaatttcatttgtatttccaacaatttgctgtatgattttaactgtgtgcaccaattacctagactttaaaatcaatatttagaaactcaaacttatttacccaaccactcacactgaccttaaattaaaataaacacatgccacaactgttctttctcttacatatatttttatattttgggtgttgcctcaccagctactcatatgacgaagctagaaatgatggaatcatccctagttttttgtgtctaatatttcctatatgtcactgatccctgcatgctgctaattttacctattttgaatcgtctcacatagataacctcttttccaccttcttatgtgtgagtggatgcaaaaccttcctaaccagtttctctacttcctactattccaattcattctttgtattattgtcagctttatatctccaaacatctccaggactttcaagaaaaatgtttgaatttcatactaggtcataaattagcttaatgttctgaactacagtagagaggaattttataccaagctcctgggaatccctttatatgataaactacatccacttgagtggacaaacccttggagcaagtcagcccaagatgatgcagctttattaatcgttagagtccaataggagatccaagacttggaagggagatggaggtttttcaaagaaagtgatgagcttggccaggcgcggtgactcacacctgtaatcccagcactttgggaggccgaaatgtgcgaatcacaaggtcaggagatcaagaccatcctggctaacatggtgaaaccctgtctctactaaaaatacaaaaaaaattagccggatgtggtggcgggtgcctgtagtcccagctacttgggaggctgaggcaggagaatggcgtgaacccaggaggcggagcttgcagtgagccaagattgcttcactgcactccagcctgggtgacagagtgagagcgagactccatctcaaaaaaaaaaaaaaaaaagtgatgaatttacacaagaaacaaacaacataggggcaaaatcagattataacaccttcaaagaactgaaacaattcatgtacattaaatattttaaggtatattactatgattttagggtcttcaagcttctctttggaggtatgtgaagtaagaagaaatgaaaatgtaatcattatagtgtatacacgccctttctgtctttctgaaacaataatcctgcgataaaccattggtaaaagatgcattctcatctttatgagaacatctcccttttctaagacactagcttgctggtgactagatctttgaagacataccttggtgcccagaaagatacctgattagccagaccaagggaaccaagaagattacacctctattttactcttcttagtctctttgcagtttgtactttcagtagactacctgtacttaattcgcttcttaaaatatgatgaggactgcagaaaaaatattatgtccatattacaggtaaagcaacaaaggtccccaaaagatggagtgacttggccaggatcacaaagctagtaaaaaattcatttactctttttgtcattaacatattaagtcctatcaagtcgggatgctaaaactatgggagaattaatcagagtaaatatctttatttttattttttgagacagagtctcgctctatagtgcaggcttgagtgcagtggcactatcttggctcactgcaacctctacctcctggttcaagcgattctcccacctcagcctttcgagtagctgggattacaggcaccgccaccatgcctggctaattttttgtatttttttagtagagacggtgtttcactatgttgtctaggctggtcttgaactcctgagctcaggcaatccacccgccttgacctcccaaagtgttaggattacagacgtgagccactgtacccaacttactttttgtatttttagtagagacggggtttcacctgttggccaggctggtctcaaactcctaacctcaagtgatccacctgcttcagcttgcccaagtgctgggattacagacgtgagccaccactcctagcctgttatttttttattttattttatttaagagacagggtcttgctctgtagcccaggctgaaatgcagccgtgcaaccttagctcactgtaacctcgaactcccacctcagcctctcaagtagttaggactgcaggcatgcactatgttgcccaggtgggtctcaaactcctggcctcaagtgattctcctacctctgcctcccaaagcactgggattacaggcatgagacactacaccaggccccagagtaaacatctgtaaatggaagagtctgtaatgaaagaggctctacaaaatcagtttaatgccgtgttttctctattattattatttatttatttaattttttcttcttttttttttttttttgagatggagtctcgctgtcgcccagactggagtgcagtggcccgatctcggcttactgcaggctccgccccccggggttcatgccattctcctgcctcagcctcccaaatagctgggactacaggcgcccgccacctcgcctggctaattttttgtatttttagtagagatggggtttcactgtgttaaccaggatggtctcgatctcttgacctcgtgatctgcccgccttggcctcccaaagtgctgggattacaggcgtgagccaccgcgcccagcctatttatttaattttttgagacacagagtctcgctctgtcgcccaggttggagtgcagtggcgcaatctcggtcaccgcaagctccgcctcccgggttcacaccattctcctgcctcagcctcccgagtagctgggaccacaggcgcccaccaccacgcccggctaattttttgtatttttagtacagacagggtttcactgtgttagccaggatggtcatgatctcctgacctcgtgatccgcccgcctccacctcccaaagtgctgggattacaagtgtgagccaccgcacccggcctctattaatattttttagttatacttcatgtgtctacattttcattccatcatgagctccttgaggacagtgcttaggtgatatttatctgtcttctgacactgagtttctgccatccaagcagaaaaggctcaataaaaatgtattgaatcgaataaatatttgtaattcacatgacagacaaatgcataatgccgaagcaactgtttatttccccttatcaataaatgtcagcattgttttctcctttccttgctttcgatttcctgtaaaaacctgatggtgactggccaaggaaatatcctttttaaattcaaatttggcaaacacactgaagacatgcgataatcttaatatattcctcgtaggaatgtgagaagtgttcagagcaaagggctaacatatttagaggtcaaaaaattgattccaggctggacgcggtggctcacgcctgcaatcccagccctttgggaggccaaggcaggtggatcacctgaggtcaggagttcgagaccagcgtggccaacatggcgaaaccccatctctactaaaaatacaaaaattagccaggcatggtggcacgcgcctgtagtgccagatactcgggaggctgaggcaggagaatcgcttgaacctgggaggcagaggttgcagtgagccgagatcgcgctactgcactccagtgtgggtgacagagcgagagtgtgggtgacagagcgagactctgtctcaaaaaaaaaaaaaaaaattgattctagtcaataggtatttattttggggagtaaagagatgggaagaattagagaaaggaagaggaaaaacaaaaataaatagcatgcagataatgagaaaatagactcatttttacagctgtgagctcagactaaaagataaacaatgctattactttggaatataattctaataacacaaaaaagactcatagaccacaatatgtatttattttgtggcaaaggtgtcatttttagaaagaaacaaatgtgttcaattttgctttccctgtttttaatgaattaagaaaggtcttctcttaccttcttttgactgtcatcattcctctcatccaggaatatttacaggtttgcaagaagacaccatctttaagtagtttttaggcacttttacaatactgactaaattgtataaaatagtattataaattaatatttaaattataattttatgacgtgaaaatcaacaacgaatgtcaatttcacttcgttttgactgtcatctgtggcctctggagtccctcacttaaatcattggtccttggttttattttttaagcctattaaaaaggaggatggggccgggcacggtggctcacacctgtaatcccagcactttgggaggctgaggtggacagatcatttgaggtcaggagttgaagaccggcctggccaacaccgtgaaaccccatctctactaaatatacaaaaaaaaaaaaaaaaaaaaaatacaacaacaacaaaaaattagacgggtgtggaggcagaggcaggagaatttcttgaacctgggaggcagaggttgcagtgagctgagatggtgccactgctctccagtctgggagacagagcgagaccctgtctcaaaacaaacaagcaaacaagcaagcaagcaaacaaacaaaaaacaagttgggcatggtggctcacccctgtaatcccagcactttgggaagccgaggcaggcggatcacctgaggtcaggagtttgagaccagcttggccaacatggcgaaaccccatgtctactaaaaatacaaaaattagccgggcatcgtggcgcctgcctataattccagctactcgggaggctgaggcaggataaactcttgaacccgggatgtggaggttgcaggttgcacgtgacatagccgagatcgcgccattgcactccagcctgggcaacaaaagcgaaactccatctcaaaaaaaaaaaaaaaaaacaaaaaaaacaaaaaaacccagaaaaacaaaaaaacaacaaacaaaaagggaggatggtagataactgtccagatactttccagctttgccgctatatgaactattccttttgtttagttttcagcatgggagcttctggcacttttacgtactttccagcttctggggaccggctgcctagaataacaggcatttgccccagaggccgtggagtggcctcactttggggtcgtgggcagatcgctggctcccacgcctggacttcgggatcgcaggcaggatcccttccagcccaagcactccgcccaggcgcrccaggcagagccccrccccatcccgccgttcccttcagccccggggcgcggatcttgcatctgaaactgagcagagcagggcgccgggcagggccggcgggccacgtgataagcccggaaacagctccgccccctcgcttcctgagycgccacatcccggcagccctcctayckgcgcacgtggtgccgcygctgctgcctcccgctcgycctgaacycagtgcctgcagccatggctcccggccagctcggtgaggccctagcggagcggcgcggtctgcgtcctcgcctgcggccccccacgctcccgccttggcggcggccggcgggacccggcactgcaggggcggcgctgcgggattgaaagccagcgtccccgctccccggccgggccgcagcctgcgtggggcccgccttagagcagctcgcgggtgtaagacctggggaggcccggaccaggcctgcgaacgcagggtccaggtgctggccttgcgattcgagaatctcctcccccagaccctcccaaggccttgcagaacacagtgcaatgtgctgcgaatcatgagaaaaaatgtcttctctttcagccttatttagtgtctctgacaaaaccggccttgtggaatttgcaagaaacctgaccgctcttggtttgaatctggtcgcttccggagggactgcaaaagctctcagggatgctggtctggcagtcaggtaaggcatagctagttccatcagaaaggagtgtgatcacattaaccaggaagtattgtattccaggcaccagcagcaaaacgccttatttactcctcccagtagcgctgtgaggttggtgtaatacttccccactttatggggaaaaaaagtgaggctcagagagatttagcaacttttaagaccctggacggctgggctaggtggctcacgcatgtaatcccagcactttgggaggccgaggtgggctgatcacttacggtcaagagttcgagaccagcctggccaacatggtgaaacccgtctctactaaaaatacaaaaattagccggtatggtggcacacgcctgtaatcccagctactgggaaggctgaggcaggagaatcgcttgaacctaggaggcggaggttgtggtgagccgagatggcactactgcactccatcctgggtgacagagaaagaccctggacaacacactggacagatttagcatcttctgcacaagtttaaacagttgagtaagggaaaagtaggattggaacccgtgctgttcctgattttaggacactagtcttagccccttccttaaacagattaacttaggtgggccacttgttatgcaaggaaaacttcagttactttgactggtgatttaataaaactcgacatcatgaagattccaatttacctgccttcccttagaatctctggtaaccatatgaaggtgcaaatcattcattcccacgttcacaagcccttcattagctgactaggccatggaaagaagggacttagaaatgattaaccaggatgycattgctgatgtcaaggagtggcattctgggaggagagggaggaagtctactgaaaggtagaaaaatgaaaaaaactataggatagctatttaataaacggcagtgagagttgggaggaacgagatgaccacccctgaaacatattttagaatgaaagagatgaaggatatctgtctgctttttgttgccatgtggaaaatttgcttcttggtttctagatccatgtagaggtaggttattaccttttctttgtgcagttcccagctatgtgagcagtacacagcttccctaagtttaacaagttcagatggtaagaatgccttactttattaacaaatacataactgtatattttcggatgtctttttgcgtcttgtctctgtggttttcatgggaaacctgtgagaatcgtggcaggcaagttggctctttgctcatcagcaaccgaatgagaattcaaagtccagacctgcgtgctttccattgggccaagttgggtcctcctatggtaatggaaccttcgtaaagcaaaatcctcatctgtagtctcttttttttccccaccaaactttgtattatggaaacatttcagacacaatcaaaagtagaaaagtataatgatcccttgggtcctatatctgtcacccactttaggtacttatcaactgattagtcttgtttctgtacctatacccactcctcacttatcttcattatggtcatatcttctttaaaaactggaaatgtaaatgtgtttctcttctatgaaaggataagaagttcaccatgagtgatttatttagaccccagcacagtaaagttcactgaatgaaatgtaaacaacttggagcaattgttttttcttcaacaaaggccacattcagttgcagtggtattttattcagttgcagtggtattttacatatataaactcttatagtccttataacaactttttagtttaggtagtgttatcctcattttataggtgaggaaactaagcacaacgtagttaagtaactcgctcgagattacacagctagttaagaggccaagattttttttttttttctctgagacagagttttactcttgttgctgaggctggagtgcaatggcactgtctcagctcactgcaacctctgcctcccaggttcaaacgattctcctgcctcagcctcccaagtagctaggattacaggcgcccgccaccacgcctggctaatttttttgtatttttggtagagacagagtttcaccatgttggccaggctgatctcgaactcctgacctcaagtgatcgcccgccttggcctgctgggattacaggtgtgagccaccgcacccgaggccaagattttgtaggggtggaaaggtgtgatcctttgctctccatcgtaaacgtcacggccaatatttttataagagaagacaggttataataagagaaaagcataacaaatttatttaacaaagttttacatgacatgagagccttcagaatgaagacccaaagacagaggaaaaaccatccatttttatgtttaggttcaacaaagaatggacagaaaggtggaagtatgattggacagcaaggatatggtgtatgctagtagactgaggtggagaaagccaggaaagcctgtctgtccagattcttcttggcttctctaaaattctttctccaccccctaaggatctcctgacctactaatgggcaaggagatgagaggatttctttacgtccagctcctagacagaaagccagtggaaagttagaatcataagtttaaatcttatgactggctttggggaaaaagagttttagtttctgtaaactgccctggggaagagaaattctcatttctgtgacttcagggaagaatgaagggtgagaggcaagagggcaggagaaagctatatatatattttttttgagagggttttactctgtcacccaggctggagtgcagtggcacaatcatggctaattgcagcctcgatctcccaggctgaggcaatccttccacctcagcctcctgagtatctgggactacaggtgcacaccagcatgcccaactaatttttgtatttttcatagagatggtttcaccatgttgtctgtctggtcttgaactctagggcttaagcaattttgcctgccttggcctcccaaagtgctgggattacaagtgtgatccaccatgcctggacaaggtcttggttctggctgggcgcagtggctcacccctgtaatcccagcactttgggaggctgaggctgctggatcatctgaggtcaggagtttgagcccagcctggccaacatggtgcaactccatctctgctaaaaatacaaaaaagaatcagccgggtgtggtggcgtgcacctgtaaacccagctactcaggaggctgaggcaggagaattgcttgaacccaggaggtggaggttgcagtgagccgagattccaccactacactccagcctggatgacagagagaaacactgtctcaaaaaaaaaaaaaaagatcttggttctgaggctgcttctgagcatatttttgggtgttgttatctgcaataattttatcccaggaagttaaccattaccttgtcatgaggtaaactgatggattttaattagtgagtatacagcagtgagcatacatagaattatttcccgagactacagccattatgtataaattcttcagttcaaaggagtagcaagctttttaattaccccaaatgtttaattctagaaataaatccgccttctctaagttttaagtgactgtcttcatttggaggaaatggattttatttcctgaaccccaggaaaagaaattttgaatttgaaaacacttatgtcaccagtttgtggatgttggaactgtgtgtgtcattggtcaaacaccagtcatttgcaaatggctccccttaacaggagaatctacccaggaaattccgtatcttactggcagaacttgctgctttaaagtgtttattatagtctcagctacttggaggattacttaataagcccaggagttctaggctgccatggactgtaatcttgcctgtgaataatcactgtactccaggctgggcaayatagtgagatcccatctcaaaaactatatatgttgattgtagaaaattcgaaaatatggacaactataaagaaggtagtaaaaatggattgtaattcttaacatgctagtatatttttcttcaagcatttttataagcatgtactttatttcatagcttacacagaagatagatgcagttttgcttcctgctttatttatttttatgtatttatttattttttgagacggagttttgctgttgttgcccaggttgaaatgcagtggcacaatcttggctcactgcaacctccgcctcccgggttcaagcgattctcctgcctcagcctcccaagtagctgggattataggcatgccccaccatgcctggctaattttgtatttttagtagaggcggggtttcaccatgttggtcaggctggtctggaactcccttacctcaggtgatccattcgccttggcctcccaaagtgctgggattacaggtgtgagccaccccacctggcccctgctttattttttcttatatattgtgggcatttttacacaccattacaacttataaagtctgccagagtgttcgtggttacgactttctaggggtctgctttgtgatatggattaatatttactgtccttcacttgaccctttgtcacattgtgtgattattttttctagtttacttttttttcccatgtaaaactttttatttaacatttctgtaatcagaactctcaatcttttgtttaaaacttggaaagcattcctcacatatttaattttgctacatgcatgattttttaaatgctaaacctttgattcataaggaatatatttttgtttgggtttaacccgttattccaatagcaacaccactttattaaacagtcttttatgtcttcactcacttgatatgccatcttcatgtgttgttgttgttgttttttgagatggagtcttgctctgtcgcccaggctggagtgcagtggcatgatctcggctcactgcgacctccaactcttgggttcaagtgattctcctgcctcagcctccccagtagctgggattacaggtgcccgccatcacgctcggctaattttttgtatttttttagtagagctggggtttcatcatgttggccaggctggtctcaaactcccctcctcaggtgatccacctgcctcagccttccaaagtgctgggtttacagccatgagccaccgtgcccggccaaggatatttttaatgctttttgttacatactgccaaattctcagttgtatgtcttagtaatatttaatgagtatggcttatgattcagtttctaaatgctctgaaaattataaaaccagtgctgtagtagttaccaattatccctgaacatacacaacagttaggaaataaattaaataaactttttttcggaagtaaatagaattttacttaagaaataaaatatagtgaaatactttaaaaaatcagaattttctcgttgaattcaggctcaaaatctcttgaaatgaaaacagtagatgctttgaatagtgaaaattacaattcagccacaccagtagtaccattctgtttatctgtttttcagagatgtctctgagttgacgggatttcctgaaatgttggggggacgtgtgaaaactttgcatcctgcagtccatgctggtaagtggttggtatctttaatgtaaaaacagtcagtggtttccaggaatattttagttgatagcgtcctaaaataaaggaagaaaaaggctcaagagaaatttacatrtaaagttaatgttatgaagttgctgccagatttcataatacgttagaactggtttaaaatccagcttgtcttactacttgatgaattcagattgttttcctctgcttgctattagtcctgacctgatacctaatttagagtctggtgtttcctgctcaagttgctgaagatatttagatttcatcgtatgaaaatacttttaaaatagttcaaacttagaagaaagcatcacagcgtaactgacttgcaaaggaattttttttttcaaagtgctttacatttgttcgttcacctaagaatgaattgtatataaaccgaaacggcaagaaactggtatcctcctagtttgtcagttgtggtacaatttggtgaataaagctgaatggctacagatcatcagacaagccattgacttacagaaacgcatagactgttctggaactagcaacagttttgtaaaattccttttaccttttttacattttattgctcaagaaactgggatcaagaactgaagaaaaagatttttaaatatatctctcttttttttttttgagacaggattatactcttgcccaggctggagtgcagtggtgcgatcatggctcgctgcagcctctgtctgcttcccaggctcaagcagttctcccacctcagcctcccaagtagctgggactataggcatgtgccaccacacccagctaatttttgtattttttatagagacggggtctcaccttgttgcccaggctggtctcgaacacctgggctcaagcgatcccccaccttagcctcccaaagtgctggtattacagacatgagccactgtggccagccagatatatctgttaatcctaatttttttgtttgataactccccaactacatgtttgatattctttaattaagaatattatgctgggcatggtggctcttgcctgtagtcccagcacttggagagctgagacaggagaaccgcttgagcccaggagtttaagatcaccctgggcaagatggcaacaccccccttctctttaaaaaattgaaaagaccagctgggtgtggtgatgcattcctgtagtcccagctacttgggaggctgaggtaggaggatcacttgagccctggaggtcagggctatagtgagttgtgattacgccactacaatccagcctgggcgatagagtgagaccatctcaaaaaaataaattttttttttaatcaatgggatttaatttgattgaagacactatgttgaaagacattccttaatctgacttgttttttgaagctaatgactttgtttaactttttwaaattaggaatcctagctcgtaatattccagaagataatgctgacatggccagacttgatttcaatcttataaggtaaaaacctgaaattaaacttttaacrcattacgaaccaacgacaaagactatgccaaacctggtgtccctgtgttttcttactcactataaacctttactgcgtaccttctgtgtgactttgtatgtgtgtaagcattttggtttggccagatttatataccaaaatacatactgaagttttttaggaagttacaatctaaatcttagtatgtataggttgagtatcccttatctgaaatgcttgggacccagaagtgtcttggatttcagatttcttcagattttggaatatttgcaggtaacatgccagttgagcgtccctcagaaatccgaaatgcttcagtgagcatttcctccaagtgtcatgttgacgctcaaaaagtttcagattttggagcatttcagatttcaggttttcatattaggaattatcaacttgcacaactaactgagttatttgcataaagatactggctgtttctcttaaatatacgtaacagctttattgagatctaatccacataccatacaactcaccaatttaaaatgtacaaatcagtggttcacagaagttgtgcaaccattactgtgttagtctgttctgcattgctataaaggaatactagaagctgggtaatttatgaaaayaggtttattttggctcgtgattctatagacagtacaagaagtgtggtgccagcatcaacttctggtgagggcctcaggaagtttataatcacagtggaaagcagagggggagctggcatatcccatgagagaagaagcaagagagagggagaggaggagttgcccagctcttttactttttaacttttattcttaatttaatttaattttattttgagacagggtctcgctctgttgctcaggttggagttcagtggcatgaccttggctcactgcaacctctgcctcctgtgttcaagtgattctcctgcctcagcctcctgagtagctgagattacaggcgtttgtcaccacgcccaactcatttttactatttttagtagagatggggtttcaccatgttggtcaggctgctcttggaactcctgacctcaaatgatgcacccaccccggcctcccaaagtgctgggattaggtgtgagccaccacgcccggcctgcccggctctgttaaacaaccagctctacatgaactcagagtgaggactcattatggggagggcaccaagccattcataagggatctcscccgtgacccaatcatctcccaccaggccccacctccaacattggggatcacattgcaaaatgagatttggagaggacacacatccaaaccatattaattgccacatccaatattaaaacatattcatcacccccaccctaaaccctatacccatacgcatttattctccatttccccaacgtcctccagcctcggcaaccaccaattgttacgtgtctgatttgcctgtagtggacattttcatataaatagaatctaacaatatatggtttttttgttcctggcttctttcacttagcatgttttcaaggtttatccatgttatagcatagtatcaatagttcatttcgtttttagtgctgaaaaataatccattgtgtggtcataccctgttttgtttatcagttcatttgttgatggacatttgggttgtttctactttttgaatattatgaataatgcagctataaatatttgtgtataagtttttgtgtggacatacacattcgtttcattggggtatatacctaggagtggaattccttggtcatatggtaactatgtttagcttttgaggaactgcgaccctgtatttcagagtgctgcaccattttacatttccagcagcagtgtgctggatggggctccagtttctccacatcctcatcaacgttactatctgtctttttgattctagtcattctaggggttctgaagtggcatctcattgtggttataatttgctttccaaataatgtggaacaccgttggatgtgcttcctagccagttgtttacctcctttggagaaatgtctgttgagacctcttgtccatttttagttgaggtatttatctgtttattattgagttgtaagtttatttcctctcattctatggattgtgttagcctttcttgatggtttcctttgatcatcacaagttttttcttttttttgagacggagtcttactctcgcccaggctggagcacagtggcgtcatcttggctcactgcaacctccacctcccggattcaagcgattctgcctcagtctcatgagtagctggggttacaggtgcccgccaccacacttggctaatttttttggatttttaatagagatagggtttcactatgttggccaggttggtcttgaattcctgacctcgggttatctgcccgccttggcctcccaaagtgctgggattacaggcttgagccaccatgcccggcccacaaaagtttttaattttgatgatgttgaatttattttttcttttgttgcttgtgttaatggtgtcatgtctaagaaaccattgcctaatcctcagtgatgaagatttttgtgtatattttctttctttytttttttttttttgagatggagtttcgctcttgttgcccaggctggagtgcagtggcgtgatctcggctcactgcaaccttcgcctcctgggttcaagcgattctcatgcctcagcctcgcaagtagctgtgattacaggtgcccgccaccacgcccagctaatttttttgtgtttttagtagagacggggtttctccatgttggccaggctggtcttgaactcctgwcctcaggtgatccacctgcctcggtctcccaaagtgctgggattacaagtgtgagccaccgcacccggcgtgtgtacatttcttttaagagttattttagtgttagctcttatacttaagtctttggttcattttaagttaattttcatatacagacatgaaatagaagtcttattttattttgtatgtggctgtctagttgtctcagcatcatttgttgaaaagactgttctttgcccaatcgaatggtcttggcacccttggtccatgtgcctgctgttatgccagtactacactattactataggctggtaacaaattttgaaatcagcaagtgtgagtcctccaacttcatttttctgttttttgtttgtttgtttgttttgttttgttttgtttttgagacggagtctggctctgttgcccaggctggagtgcagtggcgcgatcttggctcactgcaagctctgcctcccgggttcacgcccttctcctgcctcagcctcccgagtagctgggactataggcgcccgctaccatgcgcagctaatttttttgtatttttagtagagacagggtttcaccgtgttcgccaggatggtctcgatctcctgacctcgtgatccgcccgcctcggcctcccaaagtgctaggattacaggcgtgagccactgcgcccggccccaacttcgttttttttattcaagatgactttgactcttcagagtcccttgcatttccacatgatttttagaatcagcttgtccatttctgcaaaacaacgcagttggaattttcataggtattgtgttgaatctgtagatcaatttgggaaatgttaccatcctaagaatattaaatcttccagtctgtgaacatggggtgtctttaatttctttaacattgtcttgtgaagtagaattgttttcttaatttttttctcattcactgctaatgtatattttaatacaattgatttttatatattgatcatatatcctgcggctttgctgaactcatttattagtgctaaaaggttatttttgtgaatttgggattttctgtatactaggtggtatcatctgcaaatagatataacttcactgctttctttccagtcctgatgccttttattttcttttctttgctaattgctctggctagaacttctagtacagtgttcagtagaagtggtaagaatggacattattgttttgtttcttttttttaagatggcgttttgctcttgttgcccaaggcggagtgcagttgcgtgatcttggctcactgtgacctccgcctcccgggtttaagtgattatcctgcttcagcctggggttacaggcatgtgccaccttgcctggctaattttgtatttttagtagagatggggtttctccatgttggtcaggctggtcttgaacttccaacctcagttgatccatcctcctgagcctcccaaagtgctgggattgcaggcgtgcgccaccttgcccggctaatttttgtatttttagtagagatggggttttaccatattggccacgctggtctcgaacttctgacctcaggtgatctgcctggctcagcctcccaaagtgctgggattataggcatgagccactgcgcctggcctcttgtcttgtttctgagttgagtagacaagtattttagtctttcaccatcaagtatgatgttagctgtgggtttttcttacactttgtcatgttcagtaagttcccttctatttttaatttgctgagtgtttctatatgaatacctgttgaattgtgtcagatcctttttgtacatctattgagatgatcaggtggtttttgcatttttctggattcagtttgttagtgttttgttgagagtttttgtgtgaagatacctaagagatactggtctctagttttcttgtgacatttgtctggttttagtaggagggcagtagacttaataaagatgagctgcaaaatgtttcccctccaattctgttcttctgtttttgtttttgttttttttaattagttttcagcagttaggcttgtttggagcctgcccgtagagctcctcgcactacaggcctaggagtggaactgtacttcactgattgttaattttagattacttctgtattttaaattattcttttggcattcctgttaccatcatttttatgacctctctgaaggcaaaacaaatgtttcacccttagaatgctctgatatttttcatcattgtgccaatccactggaaaaagaatctaaattctaatgttctggataatagtgatcacattccaaaatgagaatgttatctgtaatcttgtactttatacttctattaaaatgttctataaatttttcatggcttggtggttctgggtagctaaggttatgcaagcagcagcgttgcagtgtgacgtggagrgagkactgtgtattcagatccggggagcacctgctgactaaattacctctgctcgaccccagcaggacaccctgactttttaacacactcgttagaattctaaartgtcaggctcacagtttatrtattagttctctatggcttttgtttacgttaatagtactgacttgtttttttcctagatagctgtaaaccacatgagtggackttttaatgacagccagattcgtctttgttttatagagttgttgcctgcaatctctatccctttgtaaagacagtggcttctccaggtgtaastgttgaggaggctgtggagcaaattgacattggtaagtcagaaaaaccattttagaagactgagaggagaggattatttaaattttagtgagatttcattttgaattttattactgaggaaatagaaagaaaatagctacttctggattgtgttttgggattactataattcatttatattttctttttttcatttatattttctaagctttttttgtatgcagagatgcatctgggttattttcctgatttatttatttatttattttatttttatttttttgagatgaagtcttgctgtgtcacccaggctggagtacagtggcacagttttggctgactgcaacctctgcctcctgggctcaagtgattctcttgcctcagcctcctgagtagctgggattacaggtgcacaccaccacgcctggctaattttttttgtattttttatagagatggaatttcgccatgttggccagagtggtctcgaactcctgacctcaggtgatccacctgcctcagcctcccaaagtgctgggattccaggcatgagccactgcgcccagcttattttcctgatttttaagtcaggaattaaaatggaagtacatgcacaatgactttatttaaaagyggttcataagctgatagggacatacaaaaatcaatamgtcttttgttcttcaaaggtggagtaaccttactgagagctgcagccaaaaaccacgctcgagtgacagtggtgtgtgaaccagaggactatgtggtggtgtccacggagatgcagagctccgagagtaaggacacctccttggagactagacgccagttagccttgaaggtgggatgcactttcatgatattgtaagttacatccatggagtgcagtgtttgccagaccaagcagtattcagttcttggtagattgcattacctaccaaagctttgcttggagctgctatccttttgttaaaaatggagaaaccagctattacagaggtgttctgtcaaaaagattgaaagagagctgggcgcggtggctcacgcctgtaatcctagcactttgggaggccgaggcgggcggatcacctgaggtcaggagtttgagaccagcctggccaatgtggtgaaaccctgtctctactgaaaatacaaaaattagccgagtgtggtgtggtgtggtacgcctgtaatcccagctactcgggagactgaggcaggagaatcgcttgaacccaggagatggaagttgcagtaagctgacatcacaccactgcactctagcctgggcagcagagtgagactttgtctcaaaaaaaaaaaaaaagattgaaaaagaattggaaaggggtaatttgttgggccattcagtgctttgctgtcattcatggtgtcatcgtgttgtgcagccaccacatagcactgaatagtgaggagatgttgtttgctgtggacgtagaaaaccatcttgtccccactttggaaagtgctgctygtgtctcacaaaacttaygctttttgtaggcattcactcatacggcacaatatgatgaagcaatttcagattatttcaggaaacagtacagcaaaggygtatctcagatgcccttgagatatggaatgaacccacatcagacscctgcccagctgtacacactgcagcccaagcttcccatcacaggtaaagcccgagcgttctgtggcatggtttgctgtgcctggagagtgtgtrtttctctgtattgcatctgatgtggttcacattcagaagatgatacattccgtaatgcctcctgtagccatctgataaccatctggtttgagacgccatttggactgaagagcacagaagttgagtagtctggagttctgaaaagatgtcatgggggagatggagattggaatgtctctgccacgtagatctttttgaagacatgagacaggatgggatggcctggattttatagagaagagggtcaagaaagccttggggtaaaggcttggtaggtgtactgtggaggaaccagcagaagaaaagttgtgaaattccaaccttttagaatgcatttgagaacagaaaagggactgtttgttttgcacatattgtaagaagccgttgccttggaatattggatctagaagcccaattgaagtaggccaaagcagaaatgtgatgttaagaactaacaacgataaagaggtttcttggaacaagaaagtaggactttctctgggtttgtagagtttagagagggtttttaaatgtgtgtcctgttctgttccaaaggtaggctgtgagagcctgtcctgctctggtacaagggagagtaggggcagggacagaggtgagagtcccaggcatggaggccttggaatcccaagcactaccggtgcagctggccttggctgagagcaagggcagcctccttcctgcctggggcggtcagcatttggtgagggggtgcagcctgggcttcctttccctgtcatcagctgagagagcgatgggggaggggagcagcgtgccaggtgggaggagaatctgaaagtttcttcacgtttgccgcgttctattgttctgcctcagatagattttttttttttttttaaattaagacaacggagtctcgctctgtcacccaggctggagtgcagtggcgcaatctctggttcaagcgattctcctgcctcagcctcctgagtagctgggattacaggtgcgcaccacaatgcctggctagtttttctgtttttagtagagatggggtttcaccatrttggccaggctggtctcaaactcctgacctcaagttatctgcctatctcagcctcccagagtgctgggattacaggcgtgagccaccacacctggcctcagatctcagatacactttgacactaacacttcccaaatccccacagacaccctgtgaagtcctgtaggctgaagtaatctaagtaatttgttttctctcggcctttctgggcttcacagcacagtaatcttttaaaaatggaaatcggatgatgtcagaccctacttaaagccattccttggcttttcttaagcactttgcsctgccccacaaaccctgtgctgcctgcctgcctcctatctgccccctcagcagctctccctgcgcctgctgctagcccctccgccctgtgcctccaagtgggcccagctctttccactccagcgcctctggctccttgtccccttcacccagaattcttccctctgcccttcaccgtcctggtttcttgttattcaggcctcacctcctcagagaagccttccttgaccgcttagaccaaagtagcagcccatcatgcttccatcccatcaccctgttttgctgcatgtgtttctattcaatctgttcaaattgtcttcccccattaggatggcagcttccttttttttttttttttgagatagagtttcactcttttcgcccaggctggagtgcagtggtgcgatcttggctcgctgcaaactccacctcccgggttgaagtgattctcctgcctcggcctctcaagtagctgggactacaggcgcctgccaccacacytggctaattttgtatttttagtagagatagggtttcaccacgttggccaggctggttttgaactcctgacctcaggtgatctgcctgcctcggcctcccaragtgctgggattacaggcatgagccacagcgcccagccaggatgtcagcttttgagagcagaagctgcatctgtttttgtttgtcgctgaatccccagggcttagaagactgcttggcacattccctaaatgtttactgaatgaataattagcaacctgacattttgcacaaatttttccttgtaggacttcttgaaactgatttgtctgctgttatatctgacctatttcctgcttatagtttatattctccattaagattctgagacaaaaaaatccccatgtactgtcagttcttatacttttcattttccaaagcattttcattggactatataaaagccttcattgttccttagactgtgtgtgcgtttcttttgaagtttaaagtattatttgtggtaaacatggcagaggcggccctggacacgtaaataagcgtttcttgtgcgagattcccaggatttctccccaacatgggcttatttccacaatagaaaaggcactttgccttttcatgtggtttgagtatttggcagtgatgttattacagagtgtatggttgcgattgtatctaaaacaaaattgaagcaagaacaaagatggggttgtgtgagtgtgtgtatgtgtctgagattttaatgactggtttgcttatgattggaaagaagaaaattcctatttatttcagctatttactagattaagcaactttcagcatttctctggcactttctatttcagttattaatgtctttgaaaatttgatatttgaaggggaaccggatactcttttttttttgaggcagagtcttgctctgtcgcccaggctggagtgcagtggcatgatctcggctcaccacaacctccgcctcccaggttcaggtgatctcctgcctcagcctcctgagtagttgggattacaggcatgtaccaccaggcccagctaatttttgtatttttagtaaagacagagtttcaccatattggccagaccagtctgaaactcccaacctcaggtgatccacccaccttggcctcccaaagtgttggggattacaggcatgagccaccgcacccatccagatacgcttaactatgagatgtttcagaaaccaaaagttttctcccacttatcaaccttagcctaaaccatctatgaggagtgggagggagatgggggagttgtacatatggtgttttgttttattatgcctgttgtatgccttaggggatattttacttctattgtttactatttattgcctagtttgttttcttctgtgcctctcgcataaatttcatgaggacagtgattttatttgacttgatttttggttgggggaattattttttcaagttctttttaaaacgggctttatttttttagagtagttacaggtttacagaaaaaatacacggtgattatagggaatttccatataccccgcttccccgcagtttctcctrttaacatcatgcattagtgtggtgtatttgttacaactgatgaaccgattttgattcattattaaccaaggttcatagtttaacattcattctttgtgttgtacattctrtgtatttggaaaaatgcacagtggcatgtctcccccattacagtatcatgcagaatagtttcaatgccctaaaactcccttgtgctcctccgcctcatccctcctttcccttctccccaaccctttgcaaccactgttatctttttctcttttcttttttttttttttggaatggagtcttgctatgttgtctgagctggttttgatatcctgggactcaagcagtccttccgccttggcctctcaagtagctgggattacaggcatgcaccaccatgcccagctgtttttactgactctgtacccatttccagaatgtcagatagttgggatcatacagtatggagcmcttttaggcactttcagttaacaacatgcattaagtttcttccacatctttttgtgggttggtagcttatttcttaatgctgaataatatttcactgtgtatgaatgtaccacagtttatccatggacatattgaagggcatcaaaacttcaaggacagtttttggtagtttatgaacaaaattgctataatcatttgtgtgcaagttttcaactcattttgataaatacctaatattttcttttattgtatactatttattgcctattttttatttgcctccccagtaagctccataaggacagtgacttttttttaagagggttscagggmcggtttttttcactgatgtatcctgaatacctagaacagtgcttaacatcgtagtaggcaactcagtaaatatttggcaagktctttaaaaactatcttaacccatgaaggacatgaaattacacatttttgttttttgggttttttttttttttttttgagacggagtctcgctcttgttggccaggctggagtgcagtggcgcggtttcggctcactrcaacctccaccttccaggttcaagcgattctcctgcctcagcctccctagtagctgggattacatgcgcccgccaccacacccagctaatttttgtgtttttagtagagacgggggtttcaccatgttgaccaggctgatctcgaactcctgaccttgtgatccacccacctcggcctcccaaagtgctggggtcatgggggtgagccattgtacccggctcatttttgtttttaattagtgctggcccaccatttctttctgtgtgctgaacttcttatgtttattcacaagagatactagctcctaaaaaaatctgccagtgttgagaaactaggtaatggaaaactctgaagttgcagtctccttttaactacagttctgctttaggcagagtctgttgagtttgccatcaaagaagaaagaaaaaacacattatttcttctcttcttccacccacagctgttgctttagcttgtaatataatttcttacatcgatagggtttataactttaattttgtactgtctctgtgattacctcaattgtttaatcttagttctgtatttacatgaattcctgactgatcactagtcttgtcatagtttctcccatccctaaatctcttattgtggatttatttctagactggctggttctggtcctccagtcgtgtgtgtgtgtgtgtgtgtgtgtgtgtgtgtgttcatgtacatgtgcattttttttaaagatgggctcaggctcagttgctttgttctttatcatcaagattttatgtttgtgtgtatctgtttggctcttaattatacttaaaacatttgtttagtcatgttatttttttgagaagtgtgcatacatctgaccttactgatcctgcttagtaatgtgcatgtatatttttacatttagttctaaatggagcccctggatttataaacttgtgcgatgctttgaacgcctggcagctggtgaaggaactcaaggaggctttaggtattccagccgctgcctctttcaaacatgtcagcccagcaggtaaagctctgtgctctggaaagctccagaattgttcgaaaggcatttcttcttaaatttttttgaatattaacaagttctaatgtgaatatagacatgctatgaaatctgaaagtcatctgttgataacagtatcaatgtaataatataaaatctgatacacacacacacacagaattgtgtaatattgtcaggaaaatgaggcaggaatttgtttgtggggtggaaccataaaagtttagaaaataaaagtgaaatgtcctaatgcaatagactaagtcttgtgccacatctttgaaaatgtaatggagtaaacataaagaagttcttctttggactctttatctgaaacttcttatagtcgttgtatgagatactttgcttctgtgtttaaatcatgaactccgcaattgagttgtctgtacaccacatcttgctgacagtcctccagcacatgatttgttctcaggtgtttattgggtgttaaagtgatgtgagtggggaagaaataaatgatgtgtgatatcaaagtgatatcaagcagaacakagagaaagagtgagtcartaatgaagtaaacgagcttcacctacacgctgggtactgtcaggcttcagtggctctgtggttttggagggcagagaggagatttccctcacactgctcccacaaccatatttttagtgtataattatctggctaaatagatttctgtttaatttagcacaggcrctagaaaaygtgctgcrtagactgggtgttaagaaaactgtcttgatttaggagttgacaggtagtaactttagctttctttgtttrtgattttactattttctaaccaggtgctgctgttggaattccactcagtgaagatgaggccaaagtctgcatggtttatgatctctataaaaccctcacacccatctcagcggcatatgcaagagcaagaggtcagactcatagggctttttgatttgggggagaaagaaaaagcaatattttatcctaaatagaataaagaggatagaataaagaaaaaatatatagatattctgtataatatatagatgaaattaaggacttctatctctatgtaaatatacagttattctatataatatagtttgattaaagtaaaataccctttgtttcattataggatttcctatttaatttgttttattaatatttgagattgattctgtgagtacctcaaaatacatttctttataaaagtgtatgttagtattttaggccgggcgcaatgtctcacgcctgtagtaccaggactttgggaggctgaggcgggcagatcacgaggtcaggagatcgagaccatcctggctaacacggtgaaaccccgtctctactaaaaatacaaaaaattagctgggcgtggtggggggtmcctgtagtcccaggtactcaggaggctgaggcaggagaatggtgtgaacccggcaggtggaacttgcagtgagccaagatagcgccagtgcactccagcctgggtgacagagcgatactccgtctcaaaaaaaaaaaagtatttgttagtattttagtgtaataaatggaaacacaattggaatttggtcaatgtaattttgctaatttagsctattgaatgcatttgttattgtttaatatgtgaccaaaattgaaattacaaaaagctattcttttttttttttttttttttttgagacagcttcttgctctgttgcccaggctggagtgcagtggcgccatctcagctcactgcaacctccacctcctgggttcaagcgattctcctgcctcagcgtcctgagtagctgggattacaggtgcgtgccaccacacctggctaatttttttgtatttttagtagagacatggtttcaccatgttggccaggctggtcttgagctcctgacctcaagtgattcacctgcctcagcctcccagagggctgggattacaggcgtgatttatggctcttctaactttactacatttggttagagtcatgttttatcagagacatttacttgttgaatttaataacccatgaatatycctttartatttctgaaagttcttgagaaactrttaccatagtttatcatctacagcagtggtcagcaacttcagctgaatccagcctgccaccctgtttttgtgaatatagtatatataaattggtccttcacagaaaaagttttctgagtgtcactctagagggtaaaattaaagaatactttcttactggttacttcagttaaatgacttattgatctgttaaaatcttaygtaaacagtaagattagctttagagwaatgaattttatatgacagtggagaattttattactttttctgtatcaggatactttgtgataaatacctcattttaattttatttacaggggctgataggatgtcttcatttggtgattttgttgcattgtccgatgtttgtgatgtaccaactgcaaaaattatttccagagaagttagtggacattcatgtatcttaatctgtgtgttgaataaagctttatttgttcataatgttaattgaaaccataacctataatatttatatttataatatcttttaattagctaagtttatcatttaatgttcatattttaaatagaacatgaatcttaaattgttaattttgaaatgtagtgaattattgtttcagatggatatttggctgttatgatgttttttacttatatatttattttaaattctttgttgtcttcatgccaaagttaytgtttctgaagagcagaagttgtaattttaggtggtgatgcgatataatccatcttactgcatagtgggtaaaaaacagaaactacattaataaacttaccccatcagttgaataccaaacaggtattccagacaggtgggggtactgttggtagtaggaagacaggaagaaaagagaaaaagattaaatagctcagaaaggggaaaaaaataagcagaggtgaaggctgaaggagcatgtggcttggcactattttgttgctttaggattctttccatggccactgccatccctgggttacaggttacaggagggctgtgacatttgtatctttcgtcatgtcaaatctctgatttaatctggtcttgctgttaaggaaaacgccttgccggaagaggtcatttaaccatgtactaggagagtcaggactagaatgtgctcttgctcattcaaaacactccctgaagaaatatttcctcctgaggtacatgtgttaagagcaaatcagtcatattttcttagtttaaactgaaacgaacaaaaacttggagaggacagaaagttaggatctgctatacagaaagctgtattctaatagatttctcttttcaagtatagcgttagcattgtttgttggaggcagaaaccagaatatgctgccacattatttaagactgataattgctgctagatttttttaagaggtgttctctgatttttaaaaatagaaattaaaatttaatatttttgcaggtatctgatggtataattgccccaggatatgaagaagaagccttgacaatactttccaaaaagaaaaatggaaactattgtgtccttcaggtgagtgcaattcatgtttgaagcggtaatttgctcttttattctgtgtctctttctccgttgtttactctttcctttatactcatacccttctagtttatccttattatagtttattttccccaatcctgcatttaaaaaaatactattaacttggggttttgagatgagagtagctttcttaccctcaattttaactttttgctggttgtgatggctyatgcctataatttcagccacttgagaggctgatgtgggaggatggcttgaggccaagaattggaggctgtattgtggtactatgatgcctgtgaataacgactgcactccagccttggcagtgtagtaagaccatgtctctaaaatactaataatagtaacaatatttaatggaaagtctctccatccttctgttaccttttgaaaagataactattttaaatttcttgcttatctttcctgaaatagtctatatattcagcaaatatttgcatgtgcatttctttttctattttcctattgacacaagtgcaccctgcttcaccttcttggaagtttgtcctgtatctgtgtattttaacttacctagacagtcaccaatctttagctactacaaatacccctgcagtgaataacctagaaaagtcctgagagtgaaattaaggcttaataacaagctctatgtatattggtaatcttaattgatactgccccttttagatgttgtaggcaaattcattgtcctaactgaaatatataaggatgcctgtttcccaacacttttgtcagcattgtggttttatacttttaaaaagtctctgcagttagaaaatggcatctcaatgtagttttaacattgtgtgtggtatgagcatcttttcatgtttgaatgtttttattcctttctatgaactgtctttccatattctttgatgatttttctactaagttgttgttggcttttttttttttttaactgatttttatgagctcttctgtattgggaaaagtagctcatggtctaagattatgcattgataaagcaaagagttatttcaatttaaagtaaaaattcctaatgctacttttcatagtattgatatcagaactctgtggaatcctaattccttacaaggaaagttattaagtatattcttttgattgtaagataccaataattttatagttcaccatagattccatgtcagctatttaaggaaagaagagaataccacattaaagttaatacttatttttttttagccacttgacagtctgttgcccaggctagagtgcagtggtgtgatcttggctcactgcaacctctgcctcctgagttcaagcgattttcctgcctcaccctcccaagtacctgggactacaggcatgtactaccaggcctggctgagttttgtatttttagtagagacagggtttcaccatgttggccaggctggtctcaaactcctgacctcaagggatctgcccgcctcggcctcccaaagtgttgggattacaggcgtgagccaccgcgcctggcccccagtttcttaatcaagtttttttgttgttgttgttgttaagagtgttatgtacttaacaaccattagcattttcttgtagcatcatggaaaatattttccaaaacctgagtcattttcttgatctctttaacacctgatagttggagagtgtcaaaggaatatcaggacttcattggtattttacttatttgagaatttggcttagtttgcacattggacgcatgattataagcatgagacaacttatccctctacctgactaatgataagtttctcctagcatcagttaataggagagcatatcaattttagaaattttatagtgcataatacaaaggaacattttagaattcaagaaaatgtagattaaacagaactaatatttacggggtcttgcttataaattatatgtcagggctttctaaatcaaagatcatccaaagcataaagaagaaatagtgtcaagtttaaaaaaatatccagggagagagtagtgttacacgtattgttccacacaccttaatgttctttcggctcaaaatttgggagaggaagatggcagtaaatgatacaaattccttccaaatagcaaagacacagattacaaatcctgttttctcacttttagctttcaattcctgggttagctgggtattttgtaacagatttttagaaaggaaaattagaatttaatttttgtgccattgcttatttaattagcacatctgttttatctgctgaccttccaaaagaaccatataggtagtaacttaaccaaaaatacactcactggaatcattgttttttaacatgttgtatataggttgtaaaatctataaaatactattgggtagtaaaatctataaaagactttggagaaaaatattagcgcctggctgttgtatcataccagaatgttgaattgtatcataccagaatgatttaacacatcatttgttgtgtgagaaaaattagaaaattagaaaactgtaaaaaattagaaacatgcatataactttacttacaatgaaatmttttgtatataaattaaatgaaaaatttgagggaagtggagagattamctttaacttttaaaatttgtattttagatggaccaatcttacaaaccagatgaaaatgaagttcgaactctctttggtcttcatttaagccagaagagaaataatggtgtcgtcgacaagtcattatttagcaatgttgttaccaaaaataaagatgtaagttgggaagtatctgaactgactgctagtaacttccattggtctgttttcaatacttaatgagctttacatttattaaggtctggatttggaactggtctgtatgcacacggctagctagcttatctttgagttgtcacataagctttggagtttaagaaatgaatcaaaggccatgttagaagcttctgtgcatatgtacacactagagataagtagctttaattgtgtataaatgggatcatgtcttccataatctgrctcctgtaacttggcttttttccatgtgctaggctacaaatgtgtttttatatcaatacatatagatgctgggtgcagtagctgacatttgtaatcccaacactttggtaggccaaggggcagctctcttgaggtcaggagtttaagaccagcctgaccatgtagtgaaaccttgtctctagaaaaagtacaaaaattagcctggcgtggtagctgcgcctgtaggtccagctactcgagaggctgaggtgagaggattgcatgagtctgggagatcaaggctgcagtgagccgtgtttgtgccactgcactcctmtctgggtgacagaacaagatcctatctcgaaaataaatgcatattcatatctttatctgaaagtccatgtggcagtcagtccatgtgtagatgtactacgatggatatttattgttcttatttttaccctgattgattgatttatttttttattttattttttctgagacagagtctcgctctgtcacccaggctggagtgcagtggtgcgatctcgggtcactgcaagctccgcctcccgggttcacgccattctcctgcttcagcctcccaagtagctgggactacaggcgcccgccacaacgcctggctaattttttttgtatttttagtagagacggtgtttcactgtgttagccaggatggtctcgatctcctaacctcgtgatctgcccacctcagcctcccaaagtgctggggttacaggcgtgagccaccatgcccagcctttattattttttttaagagacttttgaatgtttttatccctttgaagctcgctctgtttgaatgtttttattcctttgaagcttgctctgttgcccaggctggagtgcagtggtgcgatcatagctcactgcaacgtggatcttctgatggatatttagattgcttacattttcagtgctatgatcaatgtttttatatagacaagtttttgggcttgtgctctttgttaccttgtagtaaggacacgttcctaggataataatggtgatttttgtgttttggatatattatctcatttaacacttaggtcactctatgggggtgactaccatcgtgtcaattgtgaagatcacaaaattgtaccataaaggacaattaagaaatttgaccggagttacacaataaagaatggacaagctgacatttattttttggagtatcttaattgggccttcagtttgaaggatgtttgtcctaggtctaaagtaggctgtgcttgttgttcagtactttgcaggaatcattccattgctttctggtctgtctggctgatagcctggaattttttattgagtgctaggcattgggtatgaaaaaactgtagcgrtattttgagggctggatggtgttatttttctctccagagttgacttgtccttcttttgggcagataaggtgtaggaggtatcttcattctgtcaggaattgttgagcttcctaaaggctaaataggaatttagccttcagtctttgtgaggactggtctgttcatggttcattcctgctcctgaatccctaggtatctactgctstacgctgaactcggcttttgtcccttagtcctctaagactgccaaaagttgtgctcagccaatttacctttagtttattgcatgcaacttggaaaatgccttgaggagaaaagcatagactgtcaggcccatttcttactgcttccattttctctgggatctttgtctgttagcacttgctgtctgtccgctctgcccagcatttctgtttgttactaaaagaggattggtctcttaagctatttgctgtaacagaaggagatgaggggctgcagcttgctcccaggtctgaatcctgaggccttttcagtagaattgctggaaataagccttaaaatctttatccagagagttctgtctgttgataagcatacgacgattaacatatcttttttgtttgatttaatggatattctttcatttctatctttgacaattaatggtgtcctgaagtaaagaaacatgtaggcattatacatagaaatatctttcagccctttggaatccactctggttggttcatgtactttgaaaaatactgaatggatattgacctagattccatggtaccatgttgagarttgtgcctagctactgagagtcttttttctaaggtttgtagatattggattcattaataatttagtgatcttgataggttttgtgcctctggatattttttataagagtggtaggtatgatcttaatcgtttatctaaactctttccttgcttcatatgaattcttagtagaaatttggaaacttaaggatgagagaatgatagctttgttctcctttctgttttacccgtctttttaagtggatttttgttaacattccagcctcagaattattaggtctggaaccatttcagtcctgagagagccagacaggtggatggaatgtttattaatactgaacatgtttgaattatttcctcttctcccatttttcttgaatagtgctttaattgtgttaactatttgtagcatgtttctaagactggattcccttactcccagtccactggcatttctcgtatgccttgatcccaacccaggatgccaagtgtattagtttttatcacgctgctatgaagaaattcctgagactgggcaatttataaagaaaagaggtttaattgactcacagttccacacggttggggaggcctcaggaatcttataatcatggcagaaggcacctcttcagagggcggcaggagagggaatgagtgcaagcgagagaaatgccagacgcttactgtcagatctcatgagactcattcattgtcatgagaactacatgggggaaactgcccccatgatccagttacctccacctagtcccgcctgttgacacatggggattattataattcagggtgagatttaggtggggacacagccaaaccgtatcaccaagattatctttgaaggtctagacatctatgaagctggcttttgctactaagttttctgggaaccagaggaatcagatttatagttgatgactcaaatagcagataaagataaaagatatataacattaataataccttagagtaataaattcttaagaaatcctaatagcttttttaaattaaactttttaattttgagataaaagttgtagattcatatacasttgtaagagttcccatgtaaccgttaccctatttctcctaatgctagcatttgtcacactacagtacagttccacaaccatgccattgacattgataacagttraagacacagggcatttccaacactgcagtgatccctcatgttcttttgtatccgggctcacttgatatggcttccaccctctccttacccttgggcaaccacaaatctgtttttcctttctataattttcattcatcgtgcattcatgtacagtttttgtgtgtgtgtgtgagcataaggtttttgtcttttggggaaacagggtccaactctgttgtccaggctggagtgcaatggctcggtcttggctcactgcaatctccgcctcccgggttcaagcgattctcctgcctcagcctcccarggagctgggattacaggcatgcggcaccacacctggctaatctttgtattttcagtagagacggggtttcaccatgttggtcaggctggtcttgaactcctgactcaggtgatctacccgcctgggattacaggcatgagccactgtgcccagcctaaacgtaagtttttatttctctttgataaatgcccagggttgttaactgctttgtggtatggtagttgcatgtttagtttactaagaaactgctgaattgttttccagagtggcttgtaccattttgtattcccaccagcaatggatgagtgatccaatgtctctgcatccttactagcttttggtattrctactttttttttttttttaaagacatgggatagttgtgtagcaatctstcactgattttaatttgcataatagctcatgatgttgaacatttttttgtgtacttatttgctacatgtgtatcctttttggtgaaaatgtctgtcttttgcccattttctaattaaatttttgattgttactgagtttttttgttttgttttgagatgaagtctcgctctgtcacctagactggagtgcagtggcatgatcttgtctcactgcagcctccaccwcccgggttcaagtggttctcctgtctcagcttcccaagtagctgggattacaggaatgcgccaccacacctggcaaatttttatakttttagtagagatggggttcaccatgttggtcaggctggcctggaacttctgacctcaggtggtccacccgccttggcctcccaaagtgctaggattacaggcatgtgccactgcgcctgtcctgttacagagtttttaaagtttttttatgttttaggtgctagtttgttgttggatatgaggtttgttaataattttctcctagttcgtagcttgtcttttcatcctctttaatgaggaatcttttacagaggaaaagttcttaattttactgaagtcaaatttatcaacttatctgttggctgtagcaaatatcctctgtccatttagcatacagacgtggactatcatccttcttttccatttgtattcatgcctgatactaaagatagtgatatttttgggcgttattcttgttgttctatttggactggtaattcctaatggtttttgaacagtttcaacttaagttattctaaacaaaagagaaaatgatcgtaatttgatttttccaaagtcttggctgtctgtgtgcatcataacgatttgtgatgtytatgaaacaattctccgcattggttctgaacgtaaattttaccatgtctccagatatttaaaagtactctggtcaagaaaatattgtttgtcagttttggaatggatatggtagttcttacctcatgtgatataaaaaggcttaatccacaattgctrcaaaataacatgagtttgtgtctatggatgcattgtgctaagttccaccccaaatgtgttaaatatttaagtaaatcatggtagtgtgtaggagaacagttaatttccctctgtcatttgagtggtataactatgttgtaggtcttttacattaaatagaactaagaaacttaaagttggccaggtgtggtggctcacacctgttgtaatcctggcactctgggaggctgaggcacgtagatgacttgagctcaggagttcgagaccagcctggccaacatggtgaaaccccatctctactaaaaatacaaaaattagccaggcatggtggtgcatgcgcctgtaattgaagygtgagaatctcttgcacccgggaggtggaggttacagtgagccgagattgtgccrttggagattgtcccattgtgcctgggagacagagtgagactctgactcaaaaaaaccacaaaaaataatatttaaaaaaagaagcttaaagttaaatgagtttaaaaggccccrtgcaatttaccattgtgtatgtgtttcagttgccagagtctgccctccgagacctcatcgtagccaccattgctgtcaagtacactcagtctaactctgtgtgctacgccaagaacgggcaggtaagtgggctgttggactcgccttcgggggactgttgttttacgaaatgatatttaaacatccgtctgccttagatattggacagcttgaaagggaatatttgccaaatgtttgtcttttgtgtttgtcagtgtttcctcagtaccctggtgggctgttaaaactawtgatgatcagaaaatatctttggaaccaggtactcaaagtagttgtgctgcttcttgccttgaataggttggcacattttggattagtgagactctaatagctgttacaaaactggattatttcctttccttttcccccattggtattatttccagggaagaggaggtaagttacggtactgccacccrccagcctatatttttgcagcctgcagggtattttcacattatttcttatgttgtcttatcaagaatctgctgagtagaaagactgctagactaggagttaacttcatctttaaaaagttaggttcattgaggcataatttgtatacagtagaattcacctttttaaagtacagtttgaccagttttcacaaatttcacagtatgtgacygctgccacaattaaataccaaacatttctcactgtgtgacgttaagcaagatattacacttctttcctagtgtcccgagcctcagaatacaagatggagctggttcatctctgaggtctctgctagccttttcttcacmtggtgtcctgagcttatctcttggcatttgttaaattatttggcccacaagtgacagggaggtgggtggatatgaattagcctatggcctggaagaccccagattgccagtctctgtagtaacaaactcctgggagattgtgtctactggtgtcaggttctaagaagttctgtaagtccatgtagaatgagtgcttcattcctgatgttgaggaggaggcggctgcccaggtatttgtggtctcttttattctcttgtagctgtgggcagggttgccagcagctgtgctcagaaagagatggactgttgggcagacagcttaggggctgttcattataggaactaaaaccagaaaacacacctgtgcatttaagtccttgttgcttagaattcaacccatagaaatagaggaaagaaggaagaacatttgtacctggcggaattgtttctacttttagctacccatgtcagatccttatctcaatttctgagagttgatattttaactgtaatttatacactggggcaaacaaaagactttcaagtaaccatagttatttttgtggtcattagttttatttatttatttatttatttattttttatagagacagggtcttgctctgttgcccaggccagagtacagtgacatgatcatagctcattgtagccttcgactcctggcctcaagcggtcctaccacttcagcctcctgagtagctgggactgcaggtgtgcgccactacccctagctattttttaattcttattttttgtagagatgagatgttgccatcttgcccaggctggtctcctgagctcaagcaatccttctgtcctaacctcacaaagtgctgggattacaggcatgagccagtgcacccagcattggtcatttattttaacttttttttttttttgacctcaaaccatcaattttattgaattgtagattattaatagtcatatgtcacatatcactgaagaggtataaatagtagttataaacaaacctcttactccaccccttttaatgacttaaaaattatttatatttctcttattttggcctgatatgttcttccacaaaactaataaataggttttggagaatgtgcacaaaagatccttttgagaagaaagtgtctttggaagaggtgttcactttaatgtctgtgttcctcaggttatcggcattggagcaggacagcagtctcgtatacactgcactcgccttgcaggagataaggcaaactattggtggcttagacaccatycacaagtgctttcgatgaagtttaaaacaggagtgaagagagcagaaatctccaatgccatcgatcaatatgtgactggaaccattgrcgaggtgaaagacttggcattgggttctcggctgtgttaatattcagttcatccctttatgtgtaacagattttaacttcatcaccacacagagaaaaagatactttcattgaaattctatgttgtctaaaattgatcattgaaacttcttacacatttctcwtgttcttctgtctcatgtaactttcttcattgtttttgacccctttctgaaaccacagtcctctgtctttttaaattgcagccttggtgtaggtttgtatatttgtacttcccctgttgattataagcttttgatgacaaggactgcttttcacctacgtcgaggtgcctgccaccacgtcatgcatggtgcttgctgtccgatgggtctgtattcaacattaaatacaaattgcctgacggcaggtaaccctggggtcttctccyaccacattttctacatgtgccattaataacttgatacattttgttacatttcatgttcttctgtttgaagaaggtatgtgggaacattacaatcgcaaacgttaggtaggtagcccgccagaagaaaagatctagcccagtttctggacatattgcgtgcctaacaaaatgctggatggaaaacagaagcctgctaatcaaatactagatggtcttctgaagagccaattgactaccctcagttttttaytcaggagcaggaatcaacataagtgtcattgaagagtgaggctgcagaatgtaactgaagtccttaagatatcttttttttttcaactttgatacttggatttttctgtttgatattaccagtcaacccctgctactagtcctgaaagagtcctggaagtgaacaagaataaaagtatgtcaaagctaaaacatgacccaagatagaagcaccttgtaaaatatgattaactgtctgtgccactatgacacaatactgcaggctgggtaacttayaaaccatagacatttatttttcatagttctggaggctgtgaagtcccagatcaaggtactggtgggctgagagtctggggaggcctaccctctgcttcccagatggcacagccctctctggaaaggacaaacactgtgtccttacttcacagaaggggcatacttcccctgaagcccttttataagtctgtaatccattcatgagggccccaccctcattgcccaataactttctaaaggccttatacttcttaatactgttgcattggggattaagtttcaacatgaattttggagtggatacacacactcaaaccatagcaaatattatgaattgtgttttgtctacaactgcctttacatttagaataatttttgtataaatgtagttaaagaactactcatctctttcctagattggatatagagggtttttttgaaaacccttggaacacaatttttatttgctttctttgctacagtagtaccaaagcagtagatttaaattagacggtagtctaatagacataaagtagtagatacgaagtagatttaaattagagattttaaaacagtgtatttttatgtaagtagcttagccaaaaataaaaaaaattacatatgtacttggaataaactgatttggaaagtaaaatggtattatctttatttggtaaacttagaatcactttttttccttaatgaaaatatttctaaaagcatcaaagagattctagatatgtgaacttccatgtaaataatggtcattatttacaattaagaaatcctggccgggcgcggtggctcatgcctataatcccagcactttgggaggccgaggtgagtggatcatgaggtcaagagattgagaccctcctggccaacatggtgaaactctgtctccaaaaatacaaaaattagctgggtgtggtggtgtgcacttgtggtcccaggtacttgggaggctgaggcaggagaattgcttgaacctgggaggtggaggttgcggtgagccgagatcgcaccactgcactccagcctggtgatagtgcaaaactccgtctaaaaaaaaaaaaataataataataataaaaacaagtcctaagaaaaatgcccaggtgctttctggcatggtgatttgcaccacatagaactaaagacgatgtcagaccaagcttcttcctttctctctccccgcataggatgaagatttgataaagtggaaggcactgtttgaggaagtccctgagttactcactgaggcagagaagaaggaatgggttgagaaactgactgaagtttctatcagctctgatgccttcttccctttccgagataacgtagacagagctaaaagggtaagtatggaattgggtgcatttgcttagagttgagcattatgtagaaactgtttcagaaatcctgcttttgatttttaaaaggtgtggcaaagtgatacagatcagtaatattcagagaaccatttgacttctccattgggtggatggaraacccaaatcctgttgttattttgcctttttgactgagtgtatctttgttagcatatgctttttagagggggattttgagttttgcaggtttttacataaaatcgcgttttgaaaatcaatatacttcccccagagtggtgtggcgtacattgcggctccctccggttctgctgctgacaaagttgtgattgaggcctgcgacgaactgggaatcatcctcgctcrtacgaaccttcggctcttccaccactgattttaccacacactgttttttggcttgcttatgtgtaggtgaacagtcacgcctgaaactttgaggataactttttaaaaaaataaaacagtatctcttaatcactggatccatagtttttggtagttgtgttttatgttaaagatgcaggctctttgaactgacacatgacacataacacataaatgaggaattccagagcacccctgcctaccggagctcagcccatcccacagcactgcccgtgtgaaacataaacattagcaggaaccaaacgagctgagcagccagaggacatggcacaagtcactgtgtacaggccacacttaaggactgggagttatacccatcttaaaggtggagtattgatgtaaattacctagaattcttctgcatgggagttgtatattaaaggtccatgttgcctcctaggggagtcttctcatgccgtttttgtttgtttgtttttcatttttttgatttgttattttgagagggagtctcaaaaaaatagctctgtcactcaggctagagtcagtggcaccgtcttggctcactgcaacctccgcctcccgggttcaagcgattctcctgcctcagtctcctgagtagctgggactacaggcatgtgccaccatgcctggctaatttttgtatttagtagagacagggtttcaccatgttggtcaggctggtctcgaactcttgacctcatgatccacccgccctggcctcccaaagtgctgggattacgggcgtgagccaccgtgcccggccctcatgccatttatttttaatcacacttctgagaagcttggttgtctactttccaaacaaacagcagattggcacctgtgaactggaaccttagaggggattggtttaagtcttgttgaccccctctatggataatctgatgtatatttttctcagtgctaagtgaaatgtttcccagaatttcagcagcccgagattcaccctctggagctgcataaaaatgtagtcaatatttggtgctcagaaattgtacccaatattccaattacaggcttaatcactacagtgggcacagtgggagggcagtgccttccttcatcaggacagacctgtgcatctgtgtgtcctgcctgtgtgctcctgaccattcccgtgcattgcacctgtgttcaactaaaaccctttgccattgttcacctttaccaatgagtcctaccctcttcccaagtctttaacttatccccttgctaaataaaaatttctgaagttttttcttaatggtcatctttctaagttatttctggttcagctaatcttccagccctggcctaggacctgcccacattgaaacaaggctgacttgtgtgatcagtaaaatactgcagaaaaaataagacttttgaggctaggtcctaatacattgcaacttcagccttagtttcttggattacttcctctgggataagccaagaccacgttgtaagagttaagcagccctccacaaggagagacgccatcttgcttacactagttgccagccacatgagtgagccacctcagaggtggatcctccagcttcagtcccaggcaacatctggcttcaacctcttcagagacctgagccagaactgcccaaaagagctcttgaattcctgacccacagatacagagagatgcatactgttgttaagccacaaagttctggggtaattatgtagcagtaaatagctaatacagattttggcttgtaaattaagtgtgtgttgtctttttcatggttctttggcttgaccaaaggttaacattaagggtatgataatgggaacaggctgagcactgtgtctcctgtctataatcccagcactttgggaggattgcttgaggccaggagttcaagaccagcctgggcaacatagcgacatcctcatctctaaaaaaagagaaaattttaattagctgggcatggtggctcctgtttgtagtattcttcacatagatgaagaataaataagtggagaatatgcaactcccatgcagaagaattctaggtaatttacatcaatactctactgaggggtataactcccagtccttaagtgtggcctgtacacagtgacttgctttcaaagaggagagtatagaaatgggaataaaatagtaactacagtggagaaaactgacactttctcagccagatgatcaaggtcaacgtcaatagtgtcatgttgctaggaaatacctcaaaataggagaatggcactttacctttttggtcttctttccaaaaccctgtactctcagcttaatcatgagaaaaacatcagatataacctagccgaaggactttacaaaataccttcctactgtcaagatcatcaaaaagagaagcatgagaaactttcatgcctagaagggcctaaggagatgtagtgagtaaatgcagtgtggtgtcctggatagcatcctggaacaaaaaaaggacattaggtaaaaactaagaaaatctaaagtgtttagttaatatgtatcaatattggttcactaattgtaataaatgtaccatgctaatgtaaaatactaataaaaggggaaattaggtgtgatgtatcctcacaattttttctataaatctaaaactcagaaaataggccgggcgtggtggttcacacctgtaatcccagcactttgggaggccgaggtgggtggatcacctgaggtcaggagtccgagaccagcctggccaacatagtgaaaccccgtctctactaaaattacaaaaattagccaggtgtggtggtgtctgcctgtaattccagctacttgggaggctgaggcaggagaattgcttgaacctgggaggcagagcttgcagtgagctgagatcactccactgcacttcagcctgggcaacagagcaagactccatctcaagaaaaaaaaaaaattaaactattagaaaataaaaagcctattttaaaaagtatgtaaccacattcaagtatcatactaaaaggataagtcattttgaatatcaaatacccagtcacctttagatctctcccaatggctaattttttttttctttcagttttttgattgtgcaacccaagcctggtacatccattgcatttgattggcatgtctcaagtatcttcaacacctggtttctcctctttagatttttttcttgcagtcgattgactgaagatttttggtctcatagtttcccacgtgctgggctgtgcccttgcattcctgtgatgtcgtttaatttgtgcctctgctcctttcttacacattgatagccgtagttatgtaaatttttttagtttgatttgttgagaatttagaaaaaggttttgagacttccctccatgaggatgagttttccaatttcttcctgcaggtttataaatgttcacttcctatatatttgaggttaaaaacacggaccatgtttaaagttattattgcttttggttttgagttttctttaatgcattttgtgaacctttccctttgcgctcagcctatttgtattcaattattgatacatttgaggcctatttttactatcctgtaaagtttgacccacttttaattccttccttgacattgttttgaatgtacggttgtatttcccccctaataagctaaaagctttaactcccagtttctcccccatcacccctacctaccccaccccattccaaactcctgttgattcctggacttggggtcacattttcacttagcctattttttaagaccagactttctaaggtttgtgtttaccttcacttcatctatctattgcagtgcctccagtttctcctcttgtgttaactgtgtgcagtgtctgtgtgatgaagcttctgagatcttacatgtctaaggttttgttgttgttgttgttgttttgttttttgagacagattttcattcatgtggcccaggctggagtgcaatggcatgctctcagctcactgcaacctccacctcccaggttcaattgattctcctgcctcaacctcttgagtagctgggattataggtgcacgccaccacacccagctaatttttgtacttttagtagagatggggtttcagaatgttagccaggctggtctcgaactcctgacctcaagtgatctgcccgcctcggccttccaaagtgctgggattacaggcatgagccactgcacctggccaactaaggatatttttatcatgcttgtatatttgaattcattttggctatgcttacaattctgggttttaaattctttaatactttgaaaacactgtttggttttttattgcatccattgtttatttaaaatctgatgtcaatctggttcttgttccttgtcaggaaactttttttttgagacagagtcgttccctgttgccgatgcccaggctggagtgcagtggtgtgatctccactcaccacggcctctgcctccatggttcaagcgattctcatgcctcagcctcccgagtagctggggaccacaggtgtgcaccaccacacccggccaatttttgtatttttagtagagatgagggtttcaccatgttgtccaggctggtcttgaactcctggcctcaggtgatttacccgcctcagcctcccaaagtgctgggattacaggtgtgagccaccatgccttctcaggaaactaattttttcctgggtattttcaagcttctataatgtgtttaggtgtgggtgttatttgtatttccctttgttggcactctgggtttttcattctaggaaatttatttctgttctttgtgctaatatttcctctctcccatttcttctgttttttatccaaatgttagcatttctaagcaattcctatatctcttagcctttcttttatattttatatttcattttctttattcgtccctccaggagatttctttagtctggtcttctaattttctcatgaattcctacaatgtatccattctgctgtgtgtcctgtctattgagccctttatttcaggagttttatttttcccttcaaatatttctggttttcttttccaattgttggtatcatctttctagctttgttttactatttctacttctgttaggatctgtaatctagtatgttactattcttttaaagtctctttactcaagtgttgtggtatgttggcctgtgagctcattttccctgactaacattggctacccagcagcgtgtgcttgagacagcccagctgatgcactcctcgccagccccaaggggttcatgaaggacaggattgaatgaaccccggggaggagcacccaagcaataagagcaaccattcttcactctggaaaacgactcagtttagggctgtcaacagctcctttctcattttactgtctcacttccctgtgttatgccaaaaaaagcggtgtcctgccttaagccaaagtgccacccctcacatgcaagcttactcctgggttcctcatattttgctctgtgaggtggtgttttcctttatatgtactcaagttaatcttggtggaggtagccagtaaccaaggaagttgagcactttgggagggtctggcactggaaccccattaacatatatatgtctagtataattcaatcattcgaaacgtcaagagtggagtttcactggtgtttaagtgaaatgcataatgatcttatgtctgttgtttccagcagaaggacagaagatccataatgtaacaacgtcctgaccaatactgagtgtatttctattgggggatcccctgggcacagggagaaaacagtccatgaaagggatcctccattcttcctcccgttgccttgccctttgacacctgcttctctccaggccacctttctaaagcccagcctatgtcccttcctcagagcacagaaccctgcaggtctttaagctcgcagtgctttccattcatggacatttttataccttatttttgccaaacactgtgccaggcacaaatttatctttaaaagaaattgtaatgaagtaggcatatagaaaagtgcatgaaacttttaccatttaaagtataatttttatgcaaacacctgtgtcaccaccaaccaggtcaagaag

SEQ ID NO: 93606 - DNA, 202487 bp, Homo sapiens
  misc_feature (1)...(202487): n = A,T,C or G
cttgtttaacatgttttaggctttatgccaccttatctctgactaagattgcaacgcctgcttactctttgtttccatttccctgataaatgtttgttcatctttttattttttaagtgttctgagttttcttgcggtagatataaaacacagaactctattttcagtgataaagtataaaaatctttatttttgtctataaaacaggagattatttacatttattgatataatggaaatacttacttttggttctgacatattgtgttatgttttcacttgttattttgtaaaactccttcattttgtgttctgttttattttttctgtgtgtgtgtgtgtgtgtgtgtgtgtgtgtgtttgagacaaggtcttgctttgtcactcaggttgaagttaagtgaatcatggctcactgcagccttaatctcccaggctcaagctatcctcctgcctcagcccctcgaagtagctgggactacaggagtgtgccaccacgcacggctaatttttgtgtttttttgtagagttagggcttcaccatgtcaccaggctagtctcaaactcctgggctcaaacgatctgcccgcctcagcctccaaaagtgctagaattacaggtgttagctaccacgcccagcgtatatatgtattcttaatatttacaaagattttcattttgttctgtgttacttttgtaattatttatctgcattgctctatattttagttaaagtaagaaatgtttctgttagtttgttaaagtaggtaatgataaaaattagtgtttcttattcctccatgccttcctgcttgactagataatttatcaaataatttggattaaatttcatctttgtgttgctaaatgtcatgctacttatttgttcttttaagtggttttgttggactctcagccattagacaattgatgccattatatctcatatcatttttatattgtcagagtctatttttcctataaggtttatattgcattatactgctttaattctcatattctaacattgtagatcagtagataaatacactgaatgtattaacttgaaaatcagtccttgattcagcatgtctcttttatttatttattagaaagctgaatttcattcattattctagtgatttcctgaaggtggtttcataagaataatagtccctgagttcttgcatcttcaccattgtttgtctattcccattgtacttgaaaaaccatttagctaaaaagaaaaagaaaaccttagttttattttattttctttggtttcttgtaagctttgttgcactgatattgaatggctcgattccactaaagttgcagtgaagacttctgaggccagtatcagtatttttctttataagctactgattgctttgcctgcatgcctaaaaaaattcttttttaaatttaaattctagttactgtactaggacacatctcaatgtcaatgattctggggcaatttttcctggtaatcattgtttcttttcaaagtgaaatatcaagtcatctttcatttgaagaatgtttctttctttaataatatattgacatatttattttcccatcacttatttcttttctctaattatgtatctattggattaccattccctatcttctccatcttttgtattctctctaatcctgtctattttttctttacttgcatttcattttgttagccttccttatttctgtctcttcttttccttgctgtgtctatctcagtgtccattttatcttgtaattcttccatttatagtcttaattcgtgaaggtattttttttcctcacttcttttctgagttcccccagctatgtgtcaccagctcctattgtctctcatcatcccttcccaagttcttgcatttgtaccttgtagttttcatttataaaagcaattccttcattgtgccttcttgaaaatttctgctgtaatgttagaacaaatttctcaacttcttcatgacatcattgctatggtgtgtgttcttcaacaattgatatattttactactcctttggaagtcttttcctatactacttttgtgttgacagtgtgtccattcttttttcaattactcatatataactgagttaaatttttcttatgtaggttcttgggaaaaggagaggaaaataactcctggggttttcaaagggtttctcttcactgctgctacagagatagattcactcctctgcctaatttttgtgtatcactccattacttcctgcaagacacatccaagtgggcttctttcactatccacactgtaggaaattccagttcctatactgattggtgcaaacaagaaataaaggtttcgtaagtgacagtaagaacttaccttcaggaatcacatttttgtaggttttctgagattagccacaactgagtcccctgcatttgtcaggtttctttctttcctccttttgcagctataccccaactctatttcctgaatccattgttgtaaccagtggaaattgattttgttcttctgagtgaaagtctcactttcaagaagtttttttttttttttttttttttttttggtgtattctcaaattaggtatcattgggcccactctctgcccttctttctttcacttctgagacttctggttgatctcagcagttctgggatctcacatacaaattttggaaactgcagattacctgtcttttgattttactgaaaaaaagttgtgagtgatttttttccttttgattctttggtacattctttgggaagaaagaaggaaacctgctaatttttgccactgtcttcataatagattcagtccatgtattcagcagtgctaatcatatgtatgatatagtacatatgtaatttttagaagtgtctgcaacctcagaaacatttattattctccatttttctcactttgaataaaaacagatgcttattttttaaagttaaggctcaccaaaattttctcttgcctaaaaagtacccactgtattctgttactacaacaaatgtgactctcttaactaacccgtcattctcctcttttcttcagcagctcacataaggactggttatagcagaggctcataatctgtctttctttactcctaatctttttaatgcctataattaaattattaaatatttcttctttaagcttgaaatttatcatgatcatcattattactagaacgtctttcttagtgataaaactttttttattgtatcactggactcttaagcctcacaagggcacagttagcaattttcttaactgtgatatccctggggcctaacatattgctgcctacagggagtgctaattgaatatgtgttcaataaatagagcaatgatatttcctttgctaaccaatatctggcactcatgcagtatcagttcaaagacagggttttgaatctttctgattttagaaaatttcagcatgagaatttgttttcaattaaataagttcaaagagtcagggttttaaaattaagcttttattgtattaattgattaattttcccatggtgtaatgcataacatagtgcaacagtaatagagatgtagaaggggaaagaaatataaatgggtgagaatgctgtagtaaaggtgacagagaagttttcacccagcctcagaatctacattgaaatgcaagtccttcagcaggagagttcaatgccattccattgcttatcatcctgttcttgtctctggtgggccaagcggctggggatgtaagctggagggaggagttagaagcttgctttctctactccaaacatcacccctttcctttgcttggctgtaaggcattatagcttgcgtatttgtctttgccactttagaaccataaaatgagactataagctattgcgttatagtttcataattacaggaggaaaatagtaaaaattctcaaaggtaaattactttaataaggaagggatgagaaatattataaacagaaatgagaaaacagagatttaattaattcttggtaaccatcctctgcccaagtagccgctggcatttgcaaaatttattgttcacctctgtagtataggcaccactgagaagacttagggagctgaatgaattgtaagtctttgccaaccttttatttctatggtctttattgaaagaataacagtgggtgaatttgcatggtacacctctggatctctgaagacagtaacacatgccttttaaaagggaggtgtattcgaataattagatattttttccctaaataaggaggtggttctctcagtcaggtcattaggtaaatgttgaaccaaatattttcattagcagatatactcaacaggacagagtctagcaagttgataccgcccagcccatcaagtaatactttatctccaacattgttttttccttcatgtgaatgtatacaggaaaatctagaggtttttcatcaatatttaggtatggcctattgcattgaaaatgtttttccacattgcatttacagtcaagagagcactttttaaaatatgagaacatttgttatataagacacacttatgtaaaatgaaatgcctaccttatttattctagagactatgatcctttaggcttttaaaaaaacgaatccaccaactgaaagattacttcatttttttttaaagcaacacaaccagccagccaaacaaaatcagaatctctttccctcctgggaatgtctgggaataattagctcactttatgtgttatgttatttgaggagagttttaccagacttttttttctagtcatatcttttagacacataatctacttgctccctgtctatccccaattaccasgtgaaaattataaaataaaattacggctcacagaaatcagttaataatgttccacttgtttttatatttactgaatgtgtgttaactcaccctctggatctcgcgcgtgtatctgccctcagtacagtatctatttgcatgcgcctctttgtagtttgcgaatatacaggattgatttagagtcaagtagaggaaacgaaaatccacactacgaaagcgggaccaaccctaggaaaatgcagggggaaatgaaaagctctgtgataaagagattcagagatctttcaatccctaggtttttagaatgttgagaaaagggaggaaggaagccaagacagaaggtaatgggctgtcactatgcccttcacacttacaaccttcctagatcattgagaacacggtccgaggcaattgggttaaaacgatatatgtataaatttctttttttacctcgttagctggtcaaccccggcggtaaacaaccaaggccacccctgcccaggcaacagctccaaggggcaggcgatggttgccggcattgagctccctgctggcgccttctggcgggacagccagtgccaaagagcgcccagggaaacaaacaccaatgggggactatacagatgtcatggatgcacatgtaggatcataatctgcccagaaagaggagagaaggagggcgacaggctgcggatcctggtccaggagccgccgcaatggagcgggcggcagtgtgcgcgcacaggtgccacaggccggtggcggggagagctgtagaggctgcctcccggactcagcactcgcaccagcgcgctgaagccgcggctgctgccaagcttgggtaacccccagcctgagccacgagaggaagagcccaaggaaagggcgcgaagggggaaggagggtagggtagaaggagggcgggggagagacccatcgcctcatcttacatttcccctcccaagctcatttagtgggaacctctgctgggctcctgcgcgcctccctccccaccccctcaactctgggcgaccatctccccctcttcccttgctcaccccccacccttcctgctcttccgtccctccctaccgcgtgcctcctcccctccccctcgcctccctcccctccagcggcagtagctgtagcagcttcagcgaagccggagatgggcagagagcgcgcgcggcgcagcagctccagattcactgctctcccctgcagctccccgcgcccccgccgctgtcgctgcctcggtgtcccccagccccagtcgcgctcttaggacagcgccgccaccgccgcctggccctgcctgcctcctgcgccgcgcagccctcgcgagcgccccggatggcgctttacccctaggaccggtgagtaggcgggagagtgcagggggtcgggcgtcaaagcttggcgcggagagaacatcttttggtttgggaggcaccccaaaccagctgctgtgattccccgtcctccaggcagagggtccagggagggtgttgctctgtggtccccaaggggatgtttgatttcaactccacctgctggcaacctgaacccctctccgtcttggggacagctgcctgcagctcgcagtcccgcctcaccttccagcccccaggctcccacactagcagcagtagatggccccgaccctctggtcaccccaaacagggtcatctctactgttactgtccctgcgttcccaccttatgccagtgcacaaacgcccctatctgccacccttcacccgatctcgcgctgacaaagccttctccacaaagtcctccctgacccaccttctctcctttcccaaagcctggctctcgagcccgactgtcccgtcctattccttcccagggtgaatggtccttagtgaattctgacctcattccctctacacaatggtgcctgtccagattttctgacagtcacctcaggaaattgacacagacacgctgtgatcctggtttctgtacagttactttgtgtgttactcagcacctgggctgttaagggtattatcaagcgtgaaaaaataaagacaaaaaccaaaccctttggaaacaaactttttgttattgttgttttaaagcgcagaactatttgcattgcttaggtttgttctgttcattgagaggcgtcttagctgagtacaggaaatacacctattttacctgttcctgcggaattggtcttacttccaggttaagaacggaggacttgcctaggtggtgaatctctttcagcaacaacactatcaaaagctcagcaactcttgaggataagaagctttttcttgaaggagatgagagtagcaccaaacttaccctttaaaatcttctttgaaattgcaataagccaaagctcttatttttctttaggtgtagtggctaaaagagcgatataggaggattagaaaacattgtaccaagaagctcctgcactatttgggtgcttccagagttgtgtagtatcttagcaccagacggtattgctgtagaagttttcttagaacagtagtcgtttcttctgaaaccatgtttaccgttttattatttctagttggagtgcgagaaaataaagagttgtgttcgatgaatgaatatgagcaagggggatggagtgaacatcgggaggggtcatttaaataataaaatttgtgctctcaatttctcatgtattgaaatcttaaaaacaaaactaccccacaaaatttatggtttaatattttagagaaatgatgaaaaggcattcatttcaacatggcattgtactccatggaacccttggtcacagggcttgtgttctaagcaatacggataagaatatccagaaataaatgttaggaactttaaaaggtgccccactgaggcatgcagtgtgtcaatataaatttcctggtattattatcactataatttgaggggaatataaattaaagtgccattcttgctcttgcagttggtggagagagatgtatgcttcatcaccttaaaggagcaagtctcaggctacataagaaataggaagggaaagttgagccatcatctagggaatttgttagttaatattgccttaataccttctccaatgtcaggaatttttgttggtttgttttcattcaaactgtatctgagattttatttcccttttgtgtaagacataggcagaaatgcactgagcaagtccactgacaaggggtggttttaagtaaatgtggatagccgcattaaaagtcaagaggggctgtgaataatgagtttattgttggttttctaaatttgaaaattttagttggttatatttagggcttgactgagaacattcaaagctgttctcatttgggtaacattagggtgactactatgcacagtatatccaacagtaattaatctgtatcagaatcgatacatcccaaattgaaagcaaggagtaatactttgatcagttattgcccataattatgttaatgataaattaaagtcaatgtattctaatataattccaattaacatgaaaatattaacaaggtctcagaattatctatgagaatscaaataactagtctgccaaaaattttggcaagaatttctataaagaattatggtgagctgaaagtcaagaagatctgccaggatttaatgtcattggcattagtaagaaaggctaaacagttaaatataatgtatggggaggtaaggcacaccaatattggaatggcatatctttgagtaccattgaactgtatcttataatgctcataattatatgccacctagaggatgacgggtttaagtatttgcaatgttaaatataaattaaacattataaagagatatttaaaattatggaaattatatagattattccatcaacaagttgccattggttgaatgttccatgtgaaaccatgttttgccttgtgtgtgatgaagagaaagaatggttaaggaagagaaagctgcaggaagggagagatagagagaaagscttcaaccccttggagactggcttaaattctttaatcaaattaaggtaactaaatatgagttctattattttggtatttagttaccttatttgattctttaatcaaataaggtaactaaataaaagttctattatttggtattattttggtatttggaatagcaattgttttcccacttgaattttaggatatgactccttaattatagcaataataatacaagttttttaaaataaagccttttattccttttatttagtaaaatctgagcatcagaggcaaaccattttgtgtaatccaattgatgaattgaactaaataaaattctagacaaatttacaaaaataccttaaaaaaagcacacatatttacacctcacacatacctaaaattataataatagataaagagctaaacaatttagtgtcttatgaaggcaagaggattcagtcaagagataaccacatacaatatttttatactctaatatatatttcttgtattttctttttcattgcggtggatgtattattacgtttttataagtatttgcatttttatttataaattcatgtctctatattataaaatgcaaattttataaattcaaataacccccaaattacacttgtaagtatcaaattattacaaaaatgttcataattttgctttctatcttgcattcaggagggagtatttagcagaacgcattcttaggagcaaatatgtaaaatgaatatttcaaaataagcatgatgattcaaccaaagttttacaacaatgctataaagtgatactctcataaactctaatgtacaattaaaattcctaacagaaacatttaaattctgtgatttttacctgtgactgattgtgtaaaattcaattttattaatttagctgcaaatggaatgctcggcattcttaatagaaagattcacggaattcagatgttgattagaaatatagagaacattccatttctgttactctactaatgacttgctcaaagtttcaaagtagttaatagaaacagaattcaaatcctgttctcctgattccatgctgtatttgtctttctataaaataaaaacattttccacttcttttattttaagatgttaataaaggagaagtcagtattaatgttaaagaaatctgaaaataaaatgaaataaaaggtctgtgcttcttcaaggaccatctcaatgcctagacttctaacacaccatagttaaaggtaatcagtcaaccagactttttcattcactcccaccttcaggttaaagcttgggaaatattcaaaaattaaactgcaactagcccacctaaaaatcttttaacatttttgcataatttttattagaaattcctcacttatgcagtgtaaggtttttcatgttaatagcatgtcatggacacttccatataagcttttatagacaattgactgaaaaatattcctaaaataacagattttagtttctgtaagcaaaatgcacttacagtttcatctccatgctgattcaatatttatgtcatcacagagaaggtttcgtatccatatgtttatttatttttaaatttttacctccatagactgtgaataactcaggtggtcagggaaggtaaatttgtttcacaaagtttcaagcccacagatgaaaatcctggcacttttagctttctcttcactgatagccagagggatcaatggaagtgaatgactaaatcaataggaaaccatcatcattactgcgtaaaaaaataagctctaaactgtattcttggtkatggtggctcatcaccatcatttcatctaggaagaataacatggtgacatattttgatatctccattacattttctggaacaacactatattatctaaacgtgcttggactgatgtaaactaggggaaccagtgatcttgcactgctgggtggctgattcaaaagctgaggcattgatcttaggcattggtcttcttatagcacatcaagatgcaaatttggatgagaggaaaactacacttctaaggctcccctgacatagtttctttggagtgcaattcagcctctctttattgagggcctatggggcaagaactgaagtgatgatggcaggcacaagagtaagtatgatttaagctctgacctcaagcagcttagagtttaagtggagaagccagtaagaacaaatagaaaggagtgatgagacaccagctgctttaacctagggatgtcaccttggtattaaacaagggtgtccaggaaaaactcaaaaagaccaaaaaagaaaatctgttttgtgtaacatggatctaggcatgctgtggctaaggcttgacaacaaaaattatttagttccttaaaaaaagcaagtttccattgctttctatactaattttaactctgacagagttttttgttgttgttgttgttgttttgttttttttggacaatgcaggaacctattagtagtatgaacacaggtagtcccaaactaacaaattcagtggttgattcagtccttggaggtcatagggtaatcttttaatggaaatgtaactaagtatatacttttaaagtaagtaggaaatgcttaccttttaagaaacttaaatcttcaaggaatattcacagagaagtacaagcggaggatgcagggaaggaggttatgaacaatatgtgtaatagctatcctataatcaaaagtttaaaaaccactttagtaagttagacaaccttaaaaggtatttgtaattatctatgttttatttactctgatgaatgtttattgaacagttgcaattcagtgatagaaaaggaagatgacatatagttgggatgataaaatatagactcattaagtaatttgggagaagtatatggcagcatttaaataatacgtattacatgtcatctgacctagaacacggactggacaattacttttatagccaggtaaagtttataatatatatgttattgaaaaaaataatggctccaaacagcttctgaaggtacctgaattatactatagtaggaatagcttacgcccatgaaggatctggttaatttatgttcaatattggtttaccaagagaaaaaaataaggtcttcaatttttacatgagagggaaaaatatacctcctaacttgttgactgttttatgaatactttacaactttatgttttcatgacattcgttgtgtgaagaaagtgtctgagttacatgggtaatatgattagagagcttcaaggaaaaatggggaaatctttgacatgagatgagctacaagacataggtgttagtgataacgatgtttcactgccctgacctgtagagagccaactgagctatttcactagtcaattcctgctgactttcaagggtcctaaaaggtctgagactaatttaacccactaagttaagtatgagtgactggttgtactccttgttttgaagaggctgcatgaaggcagtcaatccaacttgtcctatttgtcttcaccaacagcttaattgtgtttgtctgtctgcactgaatggttaagcaagagttacagaaatgggagtgggaaagacatctggaggtgttgacaggtattgcatgggaaatgcagaaactgagaccatctcctgatatttccagtagtttttttgcttttgttaaggtgaatatagatcaaatcatggtcagagctttctggtgtgggatggcagatctggcagagagttaaatttaaggcacttgcaacagttgaatgagccactttttcatgtaaaggtgagatggcacyggagagctgggcaagctacaagctggaatatactctttctattttataagcgaggttcataggacccctttttacctttgttcgtcattgaatctgagttggtacaccccaaaatgaaatagtatgccagacagtcataaggtcttcaggatcaggagttcagttttgacaagagcccagtagcaagctwatagctgcttttcaaatgaggtgtacctggtacgtgtatatcctgtatgttaaggaggtgatctgtccaaaatcccaaagggctcctgtgaatggaagctgcttacgttttcctggggctccaattagaaaaatcattagtcacagaaactggtagctcacaggttaattagggatgtgggaccccaaatatagagagaaggccacagcctactaacacagtgtgttggtttctgcttcattcaaaagatgctgatattttggaccagctaatatagaagtccaagtagaatttccaagtgaggaacacaccatctccaatgcccaaatgtcccaataaggtgctgaacattgtttttgtttgttggggatgaagagacagcagtttttctttgactaccagaaggattaaacattgtgaatctgctcatttagtcccaagaaactttatttgacaatcagaaccctgaattttgtcagaatttatcagctgccgtggttgatagaagtgtgataacaccacagtcaatttccattgcaatggaagcttctaactggctgattaacaggacatcatctgtatagtgaaagctttgcaccatggagagtagggacacttatgctgacttatgtactactgatggcaaatggcagaggaatgttggtacccctgggagtaacctgtagtaatgtgggaggttactacaaatgtatattggtggctatgttgtgacttgatctttgtcctcagaagccagtggtatagaaaagctggtactggcacagtccaagacaggataccaagagtttaatctgtgcaatggattcagttacatgaatagttgggattatgggattaacaacttgattcagttggtgataatccattccaagcttctagctctcattacactgtttcactggtcatacagtgctgttgtattaaaacactgcatctcttagcacccatgttcccttcaagtctgtaatcaaggctgtgattttctttccyctttttcttcttattgtttttgttggaccatctgggaggaaatagagaacaagaccagaaagtgatttatgtgtccctttagcacttcactacatttggcctttcccaattgtgataatctccccaggcacttaactgatgatgaagtataagcacttaatatattaattactatacaatcggatatagaaaatacaacagtacatggaattggcccaaagggctccattcatgagatgatgttaacttgcctttctcactgtgaacactgcttaaactccattagctaaatcagacaatcttttctttctataaatccagttaaaaacatgacttargtgtccacatcccaatatcctaaaagtctgattcccttattttcctgaaattccccaacattcttggataggtgcatatgtcatttgatacccattgggaatagagataccctgacttctagtaatatttctctttaaataagctgagattatgggagaaggggacagaagaatcagagggtaagggaggagagagacttcatatgtattatcccagtttcaatgatattgcagtggctcatggcataaccaaattaacttagaatattgttgtccagccaatactctatattgggagcaggactcctgtggctggcaccatctatttcatccttgggratcctttgactcagtagccacagatacattgctgtttttctagggtatggggtttgtgacctctggctgactcagtcttggctcacacaatggtgactttaaggcatccaccttaatttggggcattagctgccgcaatatcttatatctcttaagttctcccagtttcagcatcaaggatagggaagtttctctgcacagtgttgataacctcaagaatttacctaggtttctttgggtctctttctcaattttctagtgggtcaattttatcagaattctagactcaatccaggccattaagagcccaaatactagtcaatgcctcatctgtggttttccacaggagtttttctgtctcagaaaaatctcctcaagaggagtaaagcttccttatagcagcaaagtcccactgcaaaaacctttgatagattttctcattacttccaagtggatctaaggttggcacgaaggcgagatttagctgtaagtcaacacagcatttgccatgattccttgagaagcagtatgatccataaccccctcctttccattgtgagccaaaattctaatgattcacctggtttctggctacagatttcccttttcacactcaatatatgtacacattactctttactattgtctgaaagagggtagaagcttctgcctacccagtgcaaatcttagtattagttgttacagtgctgcaggtctgagactggactcgattccagtctggaattctcagacaaggaactcgttccatttagaggaaaattctggcatctgtattttacctatttttgttatttagcttgcratgacctccttgattcctcctcattaaaaggcaaagaagtgaaggactgtctatcgcccagtggcccatataatttgcaaacatctttgttactgattcttacagacttctctcaaatatttatcttcctgaaatttttcaacattcytggatgagtgtgtatatcctttgatacttattggggatatggacccttagttatgtttctgtgtaaataagcgaggtcrtggtacagggacagagaggaatcagagagcagggaaggagagagacttcatatgtactataagtttcaagtgatgtggtggtggttcatggcataacccaattaacttggaatatttaataggcctgcagggctctcatcttttctcttccagaaagccatgactttgtcagcatcccatcctcatcactaacattataaaaatctctgaagggtctgagatttttctctgctcacaacttaacatgaaagtctgccacagttgaatggatgctggtagaaaacaatagactcctaggtcagagatgaaggacaatttatttttcacagcaatagcagtagcaaaaatatcaacattttggtcctgttccctgggtcccaatttccacaaggcaacatgaagtatacacattacaaacaaaaaggccctcaatttaaggaatgtcacccctttataatgggcagtgaacatgcctctctttgttccagaagatrctatttctatccaaggctgtctgctttacaaacatgttcttaaaacagttcaaaacaaaagcagtcaatgattctttcataagatgtgcaaaatgtgaaagacccatggaaaattgtctcccagtagtgacaaaagacttcaataagtgactgtttggataggcttcttatctgtggtatgatatatgttcatccttgctatttcctactgatggaatgcattaaacttttgttatctgagattgatgaacctttcactaagatagaaaataagaaggaagcttttggaacaaatatattgtatttaagctgcaatattagagtctaaattagtaatttctgactataatctatatagattacagcatagggcgtgttaaagaattgggaatttctatgtcaggaagtaaaaatgtgagcctaaaccacaaaatatattaagcatatactttgtgtaattataatgtattgtaaatcaaaatcattaagcaaaaatgtgttattacatatttcccatggccataatatttctccaatgctttatagtttgaagggtgtccaaattttcctaaataatcaaaagaaaaaggtgcaatgctgctttaatatgtttaattttttcaagactgagcataattgtcatcttctctaataggcatctcctatacactaggcttggacacatgcctttctttgtattaacacaatggcaggtttatttgtaccattttatgcctttacaacatcatattggccttatatatttatgtttccctgactggattactctgaaattaaaacttgttgcttattactcttcgtactcctagtgcctacctccccaactgaagcatggtgagtatccaataaatgctagtagagatgaactgaaagtaacagtgtctgttaatgttgaatttactttcagatattccagacaattatgtcccatgatgaataactgaatggaagatgtatagctgaaataatttataaaatttcttaatgaccattgttttacttatagtcatgtaaatattcatatcctgatactcattcccagttttgagacatcctgaaacatttcaaattttgcatttatagtgaaactttaagattttatatcgcttttatacttttagacattgaagagagcctcamaaaattaaatgtaagactttggttaattatcaaaaggtttggagtcactgatttatattatacagaatttacttctattctaaccctgcattagaaatttcaaagcatctcgcctttcttctttttcaaagaggtagactgaagatgaatacatgtccctttctctgccctgatgcacagatgttctttctttatttctttgtcatagtttttttctctctctcttgcgttcagatagatgtctgctgctcatatctacctttgcggtttctgtcaccaccccacctaatcattattgttgttatcgccagtgctgccaaccctgaaatctggtgtacttctccccttcctcttttctcaaattttccaatttcttctgactcttattgcttactcatattctaaaaacaacaaaaacatcaacaaaaggactgtctctaagggacagctgccctttccttctgtgcagtgaacttgaaggatcagataaagtgatgggttctctggcttttattctttatttgttggttattcaagggctggctgtgtcttcacttcacttcaagggctgtatttttctgctttttttccagagccattttggaaatttaagaattctaaattcttggattttcattagccaatgttttgctgttttcttcataaaaaaacaggtttttgtaatttttttgtccctacattgccttgttatttaatagcaacattaacatgtgaataccttagaacttataaaatatgtgtgtcatttcaaggaataaaaaggttggagtgaatcaaacacaagacagatatgtttttatgggaagaatggaaggtcaagaaatgactggcttgcttggagtatgccagtggcaatcttgtgcagaagaaaagaggaagatatcaaacaacagaaaaacaaagaaattctgtagagagaagaaggggcaaagtagaagttctagaaaaatagagacaaatatttacctatattataatagggcttcatggaaacactgcgttacatggaaaaaaaaacacagagctgtaaccagatataactgggttcaaattcttacctgtttattgagttaactgttcgactggtacaaaatcactgtggttttggccagtatttttaatggcaaaggaatgcttaattaaacattgagtaatgtttaatgtttttaattaaacaaagacttaatatcaactatttagctgagagattaaagtcaaatttcttagtatatctgagactctttttcctattacataaaaattttgcttaattattttgaatatggaattggataatatgtagaaatctttgaaacactgactggcactgtaaattctaattcaataaatgttacatcttctccatacttaagaatttaagaagacataatcatttcagtttgtaacaaataaaatgagcctatttcccaaatagacaattagcaagtgacaattggataatccaattcgataatcagcaactaggagaactttggaactttcagaatattatataataatgcaggaagaagcatataatgagcacggaagagctaattagaatcatactttccatgataatatgaagtaatcacttagaaaagaagttatctattttaataattattcagtcacagtggtataaaattttttccacaagaattaaaactcatgaacaggaggagttcttcttttaaccaggatgaacaaaactggaaagactatcaatcccaccatcacaaaacaaagccagaggaactacaaaaccataacttttgttaaacctgttgtaaaaccgagttcaccaggcaaacaaatatctaggttttcaggaaatgataggttcctccactgagaaacgagtcatggggatagtgtcatatgtggcagagaatagaataggacctggctgtcatacaagcgatgatagaaattattattatctaaattatctaacaagaaattctgtaaaaagctaaaatcattacaaattgccaaagactgactgacagtttagaaactctggtaatccctgacgcaagggtagtttgatgtcacccattggggcttatatgtggacttccactaggtacktatgagaaatattggaagcagggtggggacaggagggagcctcttggtaatacaggtgcagagtaagggattggctgccacttcagataaagcacaaaatcccagtctattcaagctcgcatcccacatcctaagcacaaggctagaggaatgtgaagtctttggcatcctgaagatcaactcttgactagagtaactcaatgccccaaacgaatggcttcagaatagcaaaagtacactctgtttctaggtataaatgattggcatcattcccaattattttgcacttgatatttgacatttaattgacaaattataagatatacaaaaatttaaagaaagaaaaacgattgtcaaaagaagtcaagcaatgaacaaaaccagacttagggatgatccaggagttgaaattatcaaacagggactatgactaatgtattaaagaacctaataggaaaaagtggacaatctgcatgaaaggatggagaattatggcataaaaattgaaagagcaggaaagagcaaaatgaaggtgagaagtgaaaggaaatattatcacagatcacaaattctgcaataagtggataaatttaccaacaacaatcccaaatatggtgcagctaagaacagagtttcagaatccaagaagcgaaattgatcaaactgaaaggataaaaagataaatccacaactatgggtttttctgatgaccagaactcctctgtctgtagttgatagaatgagtcgaaatcagtaactatatagaaggcctgaacaacatcctcaaacagtttgacataaatgataattatagaatactccacccaataacagcagaacatggaagaaaatacttacaaaatacacatcataaaggactgatatgcaggatatataaagaattctcacarttcaatgatcaaaaccatataacccaataaaacaagttgcaaaatatttgaacagacattttaacaatggagatacatggtaggcaaaaaaagtagtgaaaagatgttcaacactggtaattactaagaaaattaaaaaaattaaaatcagagtaagatatcactgtagacctattagagcaaaatgaaaacagaacaaacaaacaaaatcatgaccttaccaagtccgagtgaaaatgtggagcagttggaacactggtacattgctggaagggatgcaaaatagtactgcaattttggaaactgtttaatagttccttataaagttaaaaatacaaatatcatatgacccagcaatacaatttctaggtatttactcaagtagaatgaacatgtgtttctacatacaaagttataatgaatatttaagtgtgaatgaatacccatacwtgccaaaaactagaaacaacctaagtgtccatcaactgctgaataagtaacaaactggtatattcatacaatgacatactacttagcaataaaaaggaytgaactactgcccagtgaaaaaatacactcaaaaggctacatgctgcacaattacatttatacaacattaaaaaaataaaaacgtaggaacagaaaacatatcagtggtttcgaagggttagggtgggaagttgaggctgattttaaaatgacaagaagtaagattttggaggtgatggaactgtgctatatctggatatacactggtggtttgtaggcctttgtcaaaattcatagaacttgccactttaaaaagattaataatctgtttgcaaatcatatttcagtaaacctgatttttaaaaaatcatgattggaagaatgagagaagtcccattaggtaggtctacatgttaggcactttctaacagtgcctagagatggttatttcacatatttttaattccttgcaatttgaacatttgagtgtatgtgtgtaaacaacctaattttggtaaataacattttgcattattccaaagtattgacacacatctatattaatgaaatctttattaaatccaatcatcttaatctaaacttaaccttgaagagttattgggaaaggattttgagacagattagtagataaaaaaaactataatttagagaggttgcatggtttgctggtgctattaagcattgtagtcagactagtaaacatatactgggataacttacctttaagtagagttagggtgactgccccccaagatcacggcccagtgtagcaaactggtctagtaaaagattatctgcccacaactggacagtaattacttaacaaatagtgtatccttcaatagagcaacagaatatttattccctagcaatttataaggaagtatacctttgacctgctccatctactagtcatcaaaaacttagttatattgattagtacattttgaagaattgactattgctctaaggaaattggccccaaatttaaatactttacttctacttttaagtctttttaaatatatttttcctagtaatttatttctcagtatattttacaaaattcttgatggagaagaattttaaaacaaaactagtactttacttcaattggtttgagaaacactcattcccaggcattcaaactaactaaataaaaatgacaactgaaagatctgtagccaatgtggcctatggctttccagtttgcagttcttcctttaaatattctaaacttgagacctgtgtaccaagactgcattattctcaccttttgcagaactgatgtacctatgttatgttttcagtttacattgagctctgtggaacatattgttacatttaaaataggacttttaaaaaaaatccagtttattacataatacagagtccttttatgataatctacaggagaaatgtttctcacactttgtttcccggaggagtcgtacttattttgttactgattttattgaatgagcctctttttaatggctgctaggaagctcagtgtcaactttctatccctaatgactatggagagactatgatatgcmtttttaaattawgtgacttaatttatgaatgttgttgtttaattttatgtttccaaccttattcagtcagtaatttttttcgcataatacatgttaacttttaataaagtaaaggacactagaaagaaagacaagtagtaaggaaagaaaagaaaggaaggattactcaaatatgcttgtatactacatattaaatatctgagtaactctagagtacattacttctttaaattttactctcctagatacctagttgaaaaatattctttgaaaatataactttgaaaattttaatgttaagaatacctgcagtagggggaaatttaatactattgtctwtacgtgaaagtaggcagtaaaattcacccatatttccttttcagaactccctgttcttaaccaggttatgtaaactgggagtcccttcattattatctctatccatgtggtctcacagtgtttcaggctcctgatttaagcctggccctgtctataggcaggctgtgtaaccagagagataacagcatcctactgagataatatgcttttattcctaatggcaacctgaggagtagaggaacagtacgtgttattagagcaattgtaagaaaacttcaggccagatttgcatcctgttcaactcggcatgacggtttttgacggttttttgattcccggaaagaagttcctaggctgctaaccaggaaaacaatccacgctattaagaacaactacatgtggtttccagctctctacaatgagagttgaaattctgtataattaattacaccttatgcagataaaaagaaaggaagcgtaaaagcaaaccactctgctagtgaaagtatgaaaaaatattaaaagcttatttgttatcagtagtttcataaccactgccaagctttgttctaagattttgaatatattggattgactttcactgaakaaagagtaattgtaatacttttcagcttgtgagaccttacatctaagtctcactgagaactttttgatcactaattaaagctgctaaacagttagtgwacttctattgaatagaagcattttcatgattgatgagacagagccaccattaaaatggggtacagcaatccacagatagaataaaattacttataaagggaaatgactccacattcaattgaaacagcaggtccagaaaacatgtaagaaacaattaattatataggctgaaaattgtccaaatccctggaaaactgtccaaggtcartttcccttcaccctaaaattattttcctgaggcacataaaaattttattgacatagaccagttgtataaatagcacagaatatgttagamagctaattttttcaaactaaacaattatatagacaagctgtcttctttcataaatttgtcttctgatataccaaaatataaatattcatacacactcaaattcaaacacatatttgttcttatgtacatacaaatacaaattagcaaatatgtaaacacacatacaaatacactcacacacaaatgcacatatacatatatatgcttacatataaatacacacattcataaatatatacacaaatacacacacacacatattcatcctaaacttacttaaacaccctaaattaagaaaaaaaccctccaaaatttaaaaaaaggcataaagacatttaacttaggaagggaaaccataggacaaacaagaagacagaaaatataagccctatacagtgctggataagcagggtcaaactgacttcccattggtagcactttttcagtattctcttcttatttccatcttagttcttgatcttcatatcttttggctcattcctccagcacatcacccttctgatgaagcaggcacagaagcagaggcaacctctgtaccaacttgggaagaggtagagctacatcatcattagaaggagtagaggagcattttatcattataactattactgaaagataattgcctatgaggttatggttaagcactgtaaccctattacctacttatactgtccctgttttatttagaattatatccaataaccaatatgaaatcaaactggcggagaaaaaaaaagcagaaaaaataaacaataaagcaataccaaaatggaccataaagtataattcatgtaaggagcagtacatgttcttacattattttttaaattattgtctttatttaacaatttctattgaactagtgtgtaaatatttcagtgcaagataaatgccctagattaggaaatgaatcaatcagcatgaatccatttgagaagcaacggaacagaatggttctttatcacacacttactacaataagggcaatttaaatatgtgcttagaagaccaccacctacatccttataccctaaattatgcctctccagaccccaaacttatccctgcaagaccccagagggcttgtttaacaggtgcaaagaatgctaccaaagttcttaactggaggtgaaaaaargaaattagccatgatttctcttgtttttcaacttttaactttgtaagaaagatcagttttggaacaatggcctattacaaagcagaagcatgagaatagtggtttgggaactacaaggtatcagttgtttggataagaggagataagcaaatgatttaaataagagaacataggcaaattagctacaattttctaaaagctctgataaaagagggacaaaaagtcatcaattcaattaattcacttaaggtcatgaagttactaaagagaagaaatctttattagaaaaaatgatataattaccttctgtaatagattatgtcctctccataaaaccaaaatgcactattacacatatgaggagagggagggagggaaagaggaaatgaggaaaaaagagagatgaagagagaaggacaaagtcagagagagagaagagatcctatttattctgggagcattactgaattactattattggtatgacaaaaaagtgcataaatgcattgaaaacaaattatttactcccctgtttcttttcttggaacagtaaatgtcactctatatttagacttgaatttcacactcttcatctcatcttcctttgccacccataaccttattttctcttatatcttattcaatttccttttatctcttaatacatgcatacaacacatttaatttcttccatttttaagaggtaagtttggaaatattggcccatagttttgaagatcaatgtaatatttacccaggagaacttcaaaagatatcttaattttaatattataattaaaatataataaaatattatatttattatactaatataatataatattatattaaaatataatattatatttattatactaataaatataatttattatactaataaatataacatatttattatactaatataatataatattataattaaaatataatataatttatttattatactaatataatataatataatacatataatatattatatgtattatattaatataatatattatgtttattatattaatataatacattatgtttattatattaatataatataatacattatgtttattatattaatataatataatacattatgtttattatattaatataatataatacagtattataattaaaatataatataatatttaataataatattatgaaagttctcatctgcaaaagaatacttttgattttagatttcttatatattttgagccaaaacctttatacttcagaatcgagattctatataaatactaaatagcttaatatttaaaacataattttcatccaagatgttctttaaaataatatttgagttaattttgtaaggttctaagcagatttccatgctgcaagagtaacaaattatgaagagtaaatatatatctgaaatttgctattataattaaataaaaccaagagcaatgttaatctgatacattgagtctgttcatggtttgcataatcgtgatggtgcagatgattattagacataaatgctaagtaattcacataaatgactatcagtagaattacttggttaaactaactttttgggtttygtttcttcccattttgtcagtagggcctttagcggtggtaacttccccataacatgtacatttaatcatgattgttattaactcaaatataacataatgtaaattgtttcttccttacagaaccttaagtttctttcactggagagctcttcagttcatccatgaagctgagtcccagattaaaaaccattgctgtggtttgtctgtattttggtgtatcaaagcagacaaaagaaaaggaaagcacctccaatccatcytaataatcatcccaccttcctttctgctttcatatgacatttatttaaaccaagctatagctgtgcttctcaaaccttacagtccatgtgaatcacctgaagatattattaaaatgcagattcttattcaatagatctgggttgggatgggagatttctaacaaactcttaagtaaactcctactctggaaaccacactttgacaagcaagggtctgtaaaactagaaagctagaggccttttagttcatggctcttaaccaagagcctgcgaatctctgggacatttatccacaggttttaggattctatgagtcccaagaaataaatgcaaaattttatatgtatgtgggtatgggcatttttttattttctggagagttaacagttattagcctttgtaagaggcttatgaagacctaattaaaataagtgggtagtgattgaatcagtcccatttttagatgagtaaactaaggtctaaggaagctaaattatctgcgaggttcacagagtttgttacaaacctaggaattgcatccaggtttctggtgcctaatccaggggctttgattgtactagactgtctttcaaactttgatttgagagaaataagtgtaataattcagtaaataaatttaataatgaaagaacaaataagcaagtgaacacattcatgcatatgatcctttgaagagaaagcataagaatatttggcctggattaaagaagaaactgatggtattgatatttaatgactttgatatggatgaagttggggaacagcaaatactggaaaaaggggcagcaaaaatggaatttaaagattaacccttgagactaatctttttctggataaaactctgcaaatgcttagtcattagtcattagtgtgaaaaaaaatttttttgaatgttaaaaaagaaaaaaagaccctttttatcttctctgcagagaaatgtacttataaacaatatcatattttcattagccaattatacctaattgtgaatacaaaatggcacaagcacaagttcttaaaataattactgcagtgatgagtgaggtgaatgtgacagtgattgatttgtaataccagtgaaatgtgcacagaaatactggctaagactttaagctgggctatgattctgaaggtattagaagtttccagacaagtgagctaacttgagcctactatagacacctgaaacatacacctaatccctgcatcttcactgcaggtgtgtggtgccttgaacagagagtgatgcttcggagcgttgccacaaggtcaatggctcctaagtaagatgtataagatgacaacagacaacttcaagtaaaagaaatacaaaatatgtaattacaacayttttaggaaggcatgagtttccatttaatttccaattatggaatcaaatcagaagaagagtaaagttttcaaaagagaggttcagaacggttgcacatattcaccagagaggatcttctgtcgtatctgggtcagacgaattcactgcaatcttggaatctgaaacatgagtaatattagaaaactgaggccatctcaggcttctattagcagaayatctggctaaccaaaacaagccaaaacccatttttaattcttcttctttgccgttatgcgttaaaactataaagtgaatttgaaaaagaatgtgggagactatgaggaaaatatagggtaacttcctttaaattttttctattatgcttttaaaaaatgttaagaattcagaagaaatttggcatttctagaaaagcagttctcttccagaatggtagctggggaaaaatatgtccaatatgtttcccaccagctgccagagatatatttaaaatgcaaatctgactaggtccaatctattcttcaacatccatcaatgacttttaattgatatcaggatagtgtttgaatagctttaaatggctttgaacactttcttaatctagttcttgtttatgtcacaaatctcatttttcactggtccccagtttctactttaagctttggtgatactgacctgaatgaccttctttgcaccatctacatgaaaatgtggctcttctttagcttatgctttcattctgcacagaatatcctctttggcctggttaattaaccaaaaactcaggtgtcacctcttccaggaaaacttccccaaacaaccagcctggaataatcaagcctcccctcaatgcttcaatatttctaccttagcacttaatgtattattctgaaattatgttagtgaacctgcccttctttctgcattgaataatctctaagagtagatgcatgactttccttttggtacttctatcactaagcttagtgatgggcacataatttacgctcagcagatgtttattcaattgaactgaacatcattcagttatatatatgtatacacacacacccacacacacacgtatatgccattagtgaaaaccaagcaatggagtgcaattagtgccaactatgtggaatgcaggcatgagacaagagaggaacttcacagtcctcagagtatgtttatggtgataaacaacaatcacgttcgtgcttactacctatactacctactctccattagctcctcaccaatttataaaaatgcctgtaagtttctactgagcctattattttgtcttcgttttacactgtgcacccgctatctcatttttcttcattctgtctcttgaacttggcaagttttttcccacttcaggcctgtgcatgtgatttttttgtgcctggattgctcttcatttatccaggtctcaactcaagcattacctcctcctcacaggggcttcctcagtcaccgtatcataagtagccaaacccgtactttcctattatttataacatctgaaaatctctcttgttgcttattatctatcttctctgctagcagtaagatagcagaggacagagaccttatctatctttttctttactatgtctccttcatctacaagagtccaagcatttagcaatgagcaataagttgtgtagacgtaatgaaatgaataaatacttcctttccatgtggggttttcttataaagtgtttctacaagactttcttggcttaaaatatgttagaagcccatgtctcttggactttaaattcaaactattttttttttctgtctctttccttctctttcttgcttgcttttttactttctttccttcttgtttcaagtatttattaggctctcattacatgttaagtagcgataactaatttatcataccatgtatgtgacctatgacattatataaaatttttaaatttctgacttgttctgaatattgaatgctatattgtttgcagtgattataagtgattgtctttgttatcccactgcctaaccaagtgccagtgcttagttgtttaaatggtccatctagttgagaaccatttagaagaacaaaacacattctatttgaggcactgaaaatttcaactcaggcctacaataaattcatttatttatccatcaactcactagtgcagtcatgtggtctaaaaagagcactgcttattagctagtattccacaagtgaaaaggcataagagtgcaaaaccatggtgcattcctagaactagcaatcctcgatattcttggagaataaagctggaagtagaaaagggaatgaagaagtagaaggtcatgtgacattcagaaggatcagatcaaaaaacacctttcacgacaggcaattgagccggcattttattttgtcggtgatcctactctgtagtatcctggcaatcaagtagagggttggagtgactaaacccagataccacagttcaaagaaaagagatggggagagcaagaacagtgcagtgtggatagaggggaatctatgtaaaaaggtacctgttttggaggtagcattattagagcttgaatgatggaatgtgggcattgaaggccaaggagaaatctaggatgaatccctggatttggcttagtggtaacattcaccaagacactggaagatggccaagtttgttgaagttgatgttatagcagtttctttgtacttggcctttttatcacttttatttgtttctactattgtttaaagggtttaatgagagggtgggaaaggaagaggaattgatgcactagaattctcagatttgagcctacatgtgtctttacctgtgactgcccgccccctttcctcatcatcagctgccccatctcttatttgttctgcttttctctaggctgggccagtgtccctcccggtttatgcctttccccagtttttctctcctgtgacccatcttgcaaaacacgactttgtacatgtatttacacatcagtgtcttccccatctagtagactgccaacttcttgaggacagggtttatgtgtccacaaagcagccagcagaatgcctgatacacaataaaatattttatatattgaattcttatttaagtgttctgaagctaagaaattcagagtgatggattttctattactcaagttcttccctactgtgcttggtagaatacatgatttataacttacatgtaaatttcataagctttgtgtaaataattcaaaattaaatgtaatcttttactgttccctgaatgtaaacagacatctactcatattaaggtaaatgattttatctatggatttccttccaacatcccatttctatgcaggaaaataatgacagtcttttagagctactggcagtgtggtatggagaaattttacaaaaccagctgactgccctttaactggccctgaaatggacttgtgaggtgatacatttagctgttctggacactagtttttccttcataaaagcatatgtctaagggcatttccagctccaaaattctttgatctaagtgtttttattttcccttgttgaatttctatttaggacattaaacaatctgttgatatatctacagtcaccatttctgcctcctgttaatcccgatgagtctcctctygttayggcctaaaccttttatggaaaaatattattgaagggtagtgttttttctgttattgttctaatacagaaataagagaattacaattattatttgtagtaagttatgtagtcagcacatttttgttctctctcatgtttttgcaactaatgatgcttttctcctgaactttatcatcaaattgtaccaatgttattttcaagtacttgcctctggaatagaaaccatcctataactttcagttatttccagactctctgctcagttcactcccccaccatcccgacatccctaggttcatcctggtcaggtcagtgagaactggatgccaagctgtrcctgcagtcaccagagcctcccacagcctctgggcaggcatggttatgtctataggggcaycatcacaaccagcaactatggacatggaggcaagtatcagaaaccctaaccttaaatataactaagggaattcccagataagtgttagaaacaatgtctgcatcttgttgcttcgtattttaactattgttttttcttggtgaacaagtagcagatagttttccagtttttcaattttattattaaaaatttaaaacacatggagaatttaaaagaatttaaaatgtgcccactacctaaattctgtaactaccattatattacatttgttctgtgctggaatatacatctaattattcctgtaaattcgtttattatgcatagtaaattgcagtacacttcccctgtatactccagcatgcatattataaactagagatcaatattttacagctgttttttttagttatttaatgtagacttgaaagatggatattctagagatgaatcaaatcttagatacaatgaagccccaaaccctccttttttggtcttgtattagcccgttgggtttaagtgtattagtccattgagttttatagatgtattaacccattgaattctcacaacacctctgtgagatacttcccattattctgttcatttcacacataagaaaattagagtttagagcaggtaattattaagacttaatttattaagcttcctttgtgccgataaactatgtacttagcatttaaaagcttctataatggtggttatctgccatcagtctctggaccaatgggtttcttgactaaatttttatgagtgtggcaaaataaaatacattttacctgtggtgagtattacataaatttagatttgatcaattcacaagattgtcgtttattcttttttttggtctcactctgtcgcccaggctggagtgcggtggcgcgatctcggctcactgcaagctccgcctcccgggttcatgccattctcctgcctcagcctcccgagtagctgggactacaggcgcccaccaccacgcccggctaattttttgtatttttagtagagacggggtttcaccgtgttagccaggatggtcttgatctcctgacctcgtgatcctctcgcctcggactcccaaagtgctgggattacaggcgtgagccaccgcgcccagacgattgttgtttattctaagggtataactgttatacattatttgatgtcaaatgacattgtttttgttaagttatagttacaatagatggcagtcatacttatttgtttggttggttggttgtgtttgttttactgctcttactgggaaaatgccaatattattttatttgaacattttctgtctataaaatccccaaatctgagaactgttgatttatactagaagtacattattaagtgtcttacacatttaasttctcattgaagaaaattaacaaaattataattattagttattcaagagcacaattgttgtgaatgattaatcttctttgaatagcatattattttttaatagttggaaagaatgctcccacaggggctttttgtaatctcgaaggacgtaagtcagaccatctccaaggtgcctcctctgacacttgactctcttatattcatataagtcataggaaaatcaatatcagtaaaataataatcttttaaaaaccaacacattgctatctgatcagatcaaatctgatcaacagttgctagtctttacaagttcaggtttcagccaccttgaaccatcttgtggcctttgactttatttgattttgttggccttagcatcactttggctcagggtcacactttcaaaagtaatgcttgatttaaaatatatgtaacagtaactgtatttacatgtgtatttgggtaagtggttgcgagtgagatgaaagaacaaaaataccataggcattataactgacaaaatttttgtacatgtcccacattcaaaaaaattaatacatatgtgtacaaatgaaagcctttattctgggtgatttttccattacctataatttgcctctaaattgaaagagtgattccttgagcaaagatagcatgacctaaataattgtccttaaacctgactgtgattcttcattgaaatttcagaatttaatcatttaacttttgttggcacaaagagacagaactaaatagcaaacccatttgcatttacaattgctcagatttgaggggaaatattccaaaaatccatatcctttgaaaagctctgccatgcctgataaactaaagtaaacacaaaacatacaaataaacaaattgtattttctagcagtgctgctgaatcaaatatgtaacttattttcttcttatattatttgatatctgtattgacacagaatctccaaaccagcaaaccagtaataattgaaactcttagactagaaactggaatcttgatccacagtttattctgtgcttttttttccccctgatttaaacacagctgaaattacattatttagagtcacaatctgtgctgtcttcataataaaaattattttttataaatactctttttaattccctaattatcatattcaatgagtcatatgaattttaagtaatcttttattatgctaggtatgagagtactgtataaattaatcattttaattaagtaatgatgacaggcttagtgtaagtgaatttacactgtttattttaacattaattactgctgatacatacagccttatatgttctacccatcatataaatatttaaaaatgcttgatatgccaggtgactgatttcatttgctaaagttcgataaaatatggggagtcaatctaatttgggtgacagtgaaaggggtggagattgaccaggctcactgaacaggagaatgtcaggatttagggagttaaacatgccacagatgaatccttcagcaggacaagatgggccaaattgattgatctgccattatactgagggggcaaaccaagaggtgagaattgaaaagcaaaggcaaataatgctggattaaaatgactggtggaaatgtcagagcaggagctaaagaaccagcaacaatcaraccagaagaaagaaaagtgggtattagagaaaagcaagagctgaaataagcaagttgaagtataagrgaataagagaaactctgaaagtrccagacaaaatttggccagactgtcatatgctatcccagctagattttgttttatgttgttccatgtgccacatacatctagtttctgacattatcatctaatataaccattttgttgattyctagataattttcaatgactctctttattaaaaatgaattttaaaccagacactttaagtgtttaaattacctaagtatcccaagactgacaagtaagcagttgtcatccaagatagcaaatactattgaaatttgactggtgaggcacaaagcagaggaagtgggggagtagcccctgcatgtgactgtgtagttcctgtagagaaaagggtgcttggatgggaaaagctggggctgaaactcagcttgagatgcaagccaagctttgtggcctggtcaccctggggaagttatcaccatgctgcaagacttcagaggaggcatctcctttcgtagtttgcccattcctggcgggtacttttttgcagtttgcctaaggcagcttaatgcagtatgggtgcctcgaggaggaggacagctagttgaacctcaaagaggccacccaggtataaaatgcaccatgaggtagggtataattttcagctttccaaatacatcaatctgaacttgctaaagaaatgagagtaaatcagtagattcagcttttgagcagctcacattctttctttctacgtatatatgtggcttaaaagattccttcagtgtcttatttcatgtggaatagtattcagatcccttgataagctctacagcagtgtctttcaaagttgtttttttttttaactaggacccaaaaggggaaataatgtttatataccatgacccagtacacagatatgcacacacacacacacacacacacacacacccctgaagcaatcattttatgaaaattattttctgaacgtatgcaatgcactttgatttttcttattcttttctrttctatttcatttaagaaaattgttgcatgtcactgaattgatttcaaggccaacaaattgatcacagaccaatttgaaaaatattaacctacaactccatttaacatgactctaaggtttttggaacttgttgctccctctgccttaaactgtccattcagatatctctgcaggaaaggctccttcctttctaagtttctactcaaatgccattgcttcaaagaagcttggacttaccacccatcctgaagacctacaccctaactctatggacaatgattttcttcacttatttgttaacttgtgtatttcatgccccttcccacatgtgaacatacaagctttgtaagagaagagagcccatcttcttcactgctgctccccacaaattctggcaacatggcaagtgattaatgaagatatatgttttatctatcatatatgtacatctgttccaaaattccaaaatattattttacagtggaaaagaccatttttattcaatctgggaagtgttgtcagcagattattgtgctttcctctaaaggaatgctacatttgaaaaaattatcagagtgacagaaattaatcatgtattttgagtttagtggcaaccaaaagaacatctccttaataatgcaatacaccctagtgactagaaaactttatctctgaaactgtacactttctcctttctaccatgcttaaatggcaaatccaagctctatttggtcttcacttttcattaaacagagcagaacccaagttttatatgacctgaagctcatatggtttggagccccattgaagaataggaaattacaaatacaacatgtcctcacagtgtcaccgaatggaaatgaaaatgttatggagaaatggtaagaaccagtagtgttatccaattatagtagaaatgcctcagttatgcaaattttataagtatgtgtgaccctctcaggcctctctcagaagccacgaaaatagctatatttaagcttcattggcttcacaggacatttgcctctgcttctaggtatacatttagttacaaaatagttttctttttcctgaaataaagtacaattgttacaatttctgttttctgagttgcaatcttatttctttcttcttgagattgctaacaaattacttcaataagaaytgtggatatttcacaaatcttacttcatacacttaaaaaccaaaattttggttttgttcctgagatagttaattacattcattgtatatgtactttgtgattttagtttcagaaaggaaatgcatttctcaattacagatggcaggagcctcactctcctccatcctccctgccttccctactctagcccctgacaccactataagaataaaacaagggttacgatagaaaaacaaaaacaaacataggtaatatgtgagaaaatataagatgacttaagacaggcaacaagaattaagaaagatttcctgaaatctctagggcatcagtagatgatttrtagaggatgtattagttttctattcctgctataacaaattgccagaaacttggtagcttaaagcaaggtaagcttattatcttacagttatctaagtcagaagtccaactcaggtcttactgggataaatcaagatgttagcagagttatatctctttctagaagcttttgaggaaaatttgtttccttgacttttctatcttctagacgctgcctgcattctttggctcatggttcttcctccatttttcaaagtcagcaagtttcattgccctgacccttcttctatagatacgttcctctgaccacagcaagtaaagggtctctatttttagagacccatgtgattatattgggccctccagaaaatccaggatatcacttgatcttaaggtttttaacttaatcatatctgcaaagtctctttagccatataaggtaacatattcacagctttcagggattcccacccagacatcttctgggggatggggaggttcattctgcctgtcagagtgggtaagtggaatgataagtgctagggagataaatttgatgaaaatgagcagtaacattggaaatcattacatgcctaccactgttactcaatgggaagtgtttgtagcttgagcttgagaagagaactttcctgtgtaagatgtaaggaaggattgacaaagagaagcaaggtttccaaattggacaaaaggataaatggtactcccattcatgaagttggggctagaaggagagaataatggagagtgaattcatattgtcatattgatttaagttcctatgatacttaatgctacatctgggaggagatgagtgtattctcatggaacggaagcgaagaaaagagatcggcagtggatgctttgattagcatgtgctcactgattcatcaaatgttcctggacacgtcctaagtgccagttgtgggaaatgagaggcggggaactgaccaagtacaattggaactgattcaaagtctgattttcctgagtggtgcatctgcagtaaaaccaggtgtggaagagcaggaatgctatagtcagcttgtctgcatttgaatcctgattctactaccttctacttgggtaaccttcaggaaattatttactctcactgtgcttcactctcctttcttctgggatagttataataataaaartgttttcttcatagttttgttgtgagttcctacatgtaaaattatttgaatagtgcctgacacatattaaataaatactacttataaatatgaaaagayaagggaaaattatggaatggatcctcttgaagtaagggtttgattggtctaagtcagaaagtaatggataggaagaagaggcggacatagagtcatcaaatcatctcttccttccaaggttgtagccttctgggtgctgtcctctggaatccttagttctcaggctgcttttctggagtctctttctaagaattatgcaagctagcaacattcagtctcctggcatgtcaatcatcaaaatgccaaaacacatgctgctcactgataaaattcagtgtttaaatwgaagactaaaaacatttatacacaatttacacatctctttctaataaaggaagtatatcttagtcctgtccttcttgagtgggtaaacaactctttcttacatcttccacatctcctatgaggccatcctgtttcaaaggcgagggccaaggtaaactatcagagagaggtttgaaaagaggtggttggttttaatactcatccatttgtattagcatgagaataaatgagagatctaccagactcccatgttggccccaaaatttacagcgtctggagtgagaaatacaaattggacaatagttttgacttttcctcctctttagactctgttttgcttatcttaattatttcttttgtgttttgagcatctctgttattttcattcacagaaaagagagaacaagaaatttggaataattataacaagatgataatgaaagggtgaagttcgtgatatatgggattagctaacgtggactaaatagttactatgtgtcaggcagcgtaaaatatgctatctgtcatttattcctcataatcattctacagggcagatataatcctcatcttaaaaattagaaaactgaaaaataaaataacccactttgtagaagtgggtctaccagaattctctgctcacaaggcatctcgaaggccatgtgcaaacagggttgcaaggaatgggtgcctatgttcatttcacatctctcctctgctcatatgcatgctccawcaccacactagatttcaaaacacactttaaaagatatagttattaagaatttcaagatggcagcagcagagtatttaatgaagtgtaggacccttctgagagcagggacctgtgtgaatgcacaggtcacacacccatcagtctgtctctgtgtttaccccaamctaatttgagttaaaattcaatagtttaagatgttaaaatcaccattttaaaaattttgaacagaaatagggttctgtttaccatcattccatttaattaaaaatgcaatgcctgtttagtttgtagtttagtttttcagtcatgagcaactgctctcttcattatctaacccagtgcttttcaagcgattctaacagaagagttgttttcctctcaattcattaccaactgatatttttgtgaaatacaaaaccacacagttggatatcttgctcttgtcaaattgctttaaaagtatttaaatgcctatcctctctttctgaactaatctcaatgggacttggaaataaatagtttacataccacactttaagtagcattgatctcagagatatcctatgattgcattttaattatacagattattttttaatgttaatctcagtaagaaactgcttagaaagattacctcagagtcttttaattcatttatggatgatgcagggatatgtagctgtcaagtctctttttctttttctttttacattacaatgcagtttacttaatttattttgacaactacttctaattacttaacgtaacacattatatggtaataaaaacacttaataatgtaagacctcattgctatttcagatcaactgagtgatgtgtgcatatattgtccaggcatttgtggcgtggatcatgtctctctctctctstgtgtgtgtgtgtgtgtgkattggggcaatttcttcagataaatttttggattctccaatgtgaagagattaaattccacgtggaatgtgaaaaaaatgagtagtaaatattgccaattctcagctctgaaaaaaaatggctaaacattattttagrttacattatatactatatattatacctaatttacatacctggcctttgtggggcatgcttttatagggcactagattatcatgtctctttttcatttttaccctatgaaatagtaataaaggatttttaaaaacttgattcttgataatatagatactgttacatgactgacttgaaattctttttgaaaacaataaaataggccaggcatggtggtttacatccataatctcagcatttagaggctgaggtgagaggattgcttgaagccaagagttcaaaaccagcttggacaacatagtgagaccccaactctaaaaaaaaatgaagaaaatttgctgggcatggtggtgtgtgcctgtgctcccagctactcaagagacagaggtgggaggattgtttgagcccaggaagtcaagattgcagtaagctgagattctgccactgcactccagccttggcaacagagcaagatcccatctctaaaaaaaattagtaataaataaaactataaaataatagtaaaattggtaaactggaaatttgcaaatcaatattatatattaaatatgtgattaaatacatgatttgcaaaccaatattatatattaaatacatgagtaaatataataaaatattacatattaaatacatgattaaatacaaggaatctaattccttggattagaattctggtggtaaagagcaagcatccagacccacttgatgtctctgaaaaaggactgctggttttccacaatctttgagaattgtggttggattgggaagtgtattagttccttcttaagctgctatgaagaaatacccaagcctgggtcatttatatagaaaagaggtttaattgattcacagttctgcatggctggggaggcctcaggaaacttacaatcatggtggaaggggaagcaagcacatccttcttcacatgatggaaggaaggagaagtgctgagcaaaagggggaaaaccccttataaaaccatcagatctcatgagaactcactcactatcatgacaagagcagcatgtgggtaactgcccccaagactcaattacttctcactgagtcccttccacaacaggtagggattatggaaattataattccaggtgacatttgagtggtgacacagtcaaaccatatcagaaagtgttactaaaaagaactgaaatgtctggccaatattgtcactctttctttccatgatatttattctctgctgagttccctgcattttattccctaattctttcaccccatagcttcttggaaaatgcatcacaaggttccaagtatttagcaatttctgttattyattaagcacagtttattttcctcaactcccaattgattaagtcaaggcagaaagaaatakaaagttggaaagccaaatctcatgtgctccctaacctggccaggttgtggctcaaagaaaataggattaggaaggagaacatcagakaattttccaatggaactaacttggcttcactacagatactcagatgtcaagtgccagaaagatgttggggaaatgactacactataattaaaagtttctagttttttggctattttactaatcaagatactttttgaaacattaagaaaaaaaatctgaaaaaaaaatttgtcaacttttcttcatgaaggtggtgtggagagaagaatagaagggaaagcttagaaagcaagtaaatatttaataaggtcaaaacatttaaaatataaaaataaagtcttgaaaataatattgtgtcttcaccttactgtttttttttgtcttcattcaatcaccatccagccatgcacaccacaaagcccaatcatcactgaaaatataycaaaaggaaagtaattttaaaattatttttaatgcaagtactgaatcagactaattagcaaacctttatcctggtctactgagaaagatgtcaaaataattcgtattttcatcacaataaaattaaataattttatacttattcttcagggttattttagatttttaggattttacatgtctaagaagcattaaagcaaggcattttttagttcatttggtcatttcacttacttttgtaatttagaaactttaaatctattgtatccaaaatactattagaactatgactacattaaatggaagaaggaagtctttctattttcaatgaaaaaaaactccaacaactgaacctgagcctgaaccattcaaacttaagaaaataaatttataggcctggtgcagtggctcatgcctgtaatcccagcactttgggaggccgaggcaggtggattatgaggtcaggagatggagaccctcctggctagcacggtgaaaacccgtctctactaaaaatacaaaaaagttaaccgggcatggtggcaagcgcctgtagtcccagctacttgggaggctgaggcaggagaatggtgtgaacccgggaggcgtagtttgcagtgagccgagatcgcaccactccactccagcctgggcaacagagcgagactccatctctaaataaataaataaatttattaacaaacatatttaaataaataatcattgcagcactggccaaaatatcatgtgttatatgttttttagcaattttgcaaggttcttatggaaagctattcggtatttgcttggctaaactagtcagataaattgtatataatatttatttatagtattaaatttttggtttagggaaattgtgaaattatatttgtgaacgtaatactatatgagatataaaataaataaatcaggtaagtcacacatacttctaatttttggatctgtttaatcttgctaaataaagcacaggatgtcataaggtgttgcaatagagtgttgttgtggtgagtgagatgacaagaaaactaaatcttccactgtttcaaggtcagtttcatcaaatgaccatacttcttaaggtgtttttggcccagggattttgtccttttaagtcaagatgaggggacagatccattcactccttcaatcaactcttctttactaagtctttactctgagctgggtattgtgcccagtgctggggttataacaaaaatgaaagagatagatataggttggtccttatggaccatacagtatgacagctgtttactgtagtattgggcacttttaccccaagaccaagtccacatgctagtgtgtaatgtgaaatatgctctatagaattcatttattcactcattcatgtatttaagtcagcaatttttgagtaactattatgatccaaacactctgctaaaccttttgactacaaagataaaagaaaagaaaaatccttctgcacttaaaggatttacagtctaaataaaagggaaacacacatgaccattaaaattaaaaacaaaggatataaaacatgaatacaatgaatatcataatgcaatgtagcagatagattcaaatgtgaaacaatccagcatacttgaagttggaagtttaggcagaaatattgatatcagcacatggaagagccctaaccacatattaccttataaacttgtttgcagtcctaatccctttgtatttcagtacttcatatgtctgaaagagcgagaaaaaaatagtgcatatatcacaaggtttaaaagtgagcattaaatgtaataatataggtaatgttcttataagagtgcctgacacatattacatactaaagaaatattagtggtcattttcatttttatcctttctgattttgtgtttgtgatttccttttcttcattagatttccaaggattctttaaattaattttcattatatcaataattatgccccttgatttagtaatsaaatacattgttttattggttataccaacaaacaggaaaaataygaagatattgtttaatatttccaaattcattaaattctgctcttatttaatactgtatttttccttctgattaattgatttataaattatgagtggtctgcttagtgcattgatttttcattcttatttaataatgaaaacatttaatgttacacatttgcctttgcatatagctttagtgatgtgatataattttgatgtgcagcatccttctgctcagtaatttatgaatacatgtgactatacttttaatttttatttgacccaataactaggataataatttaaatctcgagttaatggctgtttggggtttgttttttttctttacgtttttcctgtttgaaaaccattaagttaatttcaaattttagtgtatctttgtcaaagattatatttagtatatgcaatatctgctttggtaatttatttagattttaaaaaaatcttctctttttttcctttttttttaactttattgttcaagggtaaatgtgcaggcttgttacctaggtaaacatgcatcatgggggtttgttgtaccrgttgtttctttatggtgtggtctgttttcagttacacagactatagataattgttttttgttttcgtttttgtttttgttttctatttctttttcttttttttyttttttcctagagatagggttctgccatgttggccaggatagtctcaaactccaggcctcaagtgatctgccygccttggcctcccacagtgctgggattaaaggtgtgagccactgaccctggccggactctagacatttgaaaagaaatttaccactctattacataaagtttagtgtacagttattctatttctaatataatttattatttgtcttctatgttgaaacaatttatcaaaatatcaaaataatatttgaagtagtatatcaaagtcttgcattttagtcttgcatttgaagtcttcttctatttctatctagcttaagttctacttttaaaaaagaatttatattttagatatgttgagtytctgctgctacttgaagtttcatgcttgttataccttcrttatatattctctttttctgcataaaatgacaatttgtatctaatttaatgctttctgccttggactctatcttgtctaagactaaaataatgatcaatatctgctttcaacttttcaaatacccacatatccttatttcccattgagtggggtagaaaaagacaaatagaatctggttagtctctatggcaaagtcatacatatgagatctagaaacatttttcttttgccaagggcattaaaatggcaggtggagaatcagtactacaaacaggcatatctgcttttagttttcttttattaattgtttatgtaacttatactagactgctcatgatcaataaaacatgcaggaagttacaagacctttttccatgactatcactaattcagtcagggtattagtagtgaagaagaaaacacaatctcaatataagcaaatatacctagtatccaacaaaataagctctcagctgggtgtggtggcatgtgcctgtagtcccaggtacttgcgaggatgaagcaggaggatcgcttgagcccaggagttcgagtaggcagagctatgatcgcaccacatccagcccggatgacaaagcgagactccatctttaaaggaaaaaataaaaaaaaaamcctaagcttttaaaattagtcatctaatgaaccactgaatacgataattatgtcttacatatttacaatatacactctctgacttaacgatggtctgacttgggatttttaaatttaagatggcataaaggcacatgcattcagtagaaaccgtactgcaagtacccacacaacaattttagttttcactgttagtgttcaataacttacatgagatatccaatactttattataaaataggcattgtggtagatgattttgcctactctaggctaataaaagtgttctggcaaagcaagctagaatgtttggtaggttagttgtttaaatgcatttttaaatcatgayattttcaatttataaagggtttattgggacataatcccatcagaaattaagggacatctgtatgtaattcttaattgtggataataataataaaagagaggttggatagatgaaaacagctacatttcatgttttactatcaaccttttatttttctcatgcttcaatacctagaagagtggtaaaatattgcagtttgagtgtctacttctttattttatatctaacattaggaagtgctaaagtgtggaaaaccagacaattctggaatgcagagggaggagagaaagcyccagtaagctacatgcttcagacataggcactgaataataargaaacagaaagaaatatagaaactgaattgctaagrcacttttattgccactcctaagaaactcaacattatcagcagtagtaatggccatcatttatacatgttgattttataaacttattttttttaaagttctaaattgctctctctccactccctaaagctggattaaaacctattgcttccaaatgctgaattaaggaaattctgtgccacaatttttgctacagaaaattagtgtgagcacagaacgaagagcaatcttatatgcataggagcctgctgttggagaaagctcaataagagacatcaggaggtttggcttcttttcagaggacttaggaagttttgatacctaaatgatataacataagactaacttttgaagtaagtgctaaaactatttatatatactagacaattttctcaagatttgtcctttttgtctcttagactctcactaaaactccgtcatcaagttgtaattcacacatgtagacaagccttcagcctctccaaacatttttaaaatctgtaaattcaaracatttaaaaagaagacacatgatctcatctggactgctgcttgatctkgtttgatattcttcagcactctactttttataacgggtcaatagcagacgggckgtaactgatctccttatttcagagctgaaaacacaaggcactttgcgttgggtgcagttctattctgttatgctactcccgtttgtcagtaggtaaaaacttttcccattccccagaaggcagtacttctatgaatagttgctttagacaagcattcattgttcaaagggtttgattcctcactgagcaaaagctacagcattataaagatgccagttkaaatttttttaagcttgaattttttaaagctagaaaggaaccctcactgttggggaagtcatgaaagaaaaccccttttcacaagccctggaacaagtggattaagagagtaagagtaaaagtgcaaagactgggaacctggctttattccaaaaaaaaaaaaaaaaaaaaaaagccagaaaaaagccacagttagaagtaattgaacactttggaaatccctttgaagacctaatgcagtagaattttttgaaatgaataaaagctaaatgcataataatttcaggtaaaaaaatacaaacgaatgtttgaagaacmaaataataaatttataaatgtttaaygcagcgggaccwagcagtaccaacctttgataatgtatggtaagcattagcaatgttgttacttggaaaagacaaattaaaaacctggcaatcttacctcatgttgttttgtactttgtatacttggcttggtttatagtgatgatattatctgtactgattatacttgttcagtagaattttgtacacttgcaaatggaatttttagacacaagaaacaaggtacaaaaattgcctaactacaaaaatttcyccctcttttatattgggactaatgatatgttaaacaatctgatgtatcactttagaaaaacagtaatggcagttgcatttrccaggaaaatgttacaatagattttagctctcttaatagaacataaaatattagtttttaatatcttgctatatgtggtgtttttaaataaaaaggcatagaaatcattgatatttgaagaatgttgatataaaataatctgtgtggaggataatgtaggttgtgaactaaaacggaaaaagccccaagagtgtatatcacactaaagaagagtgtattttctgctaaatggagtatagaatgttgtgcatttagtacataggacatatgcttgcaatcctcccctaaatatcccagtggtttctttgtgcaagttttctttagactcatttctccatcttgatctgtgctgactccacgtgaggtcagtcagagaataatgttagtccaaccacttgtgtgcacacctgcatacacacataccagaaagttaatgttgttttactttaaagcagtgattttactctggaccatgtgtatgtggcagaaggatgatagtgacttgtacataagcatctacagaggaggaataactgatatgtatggtggagtttgacagaatcctggatcaggaaaaataacaatcttaaggttggaggagatttttaaaatcatcttgaccagctatccrtttcattacatcattcctcactctgaggctcatttctaactggtgttaccttggaagatgactaatttttagtgcttgttttgaatttagtttgtggaatgatttctcagcttgccccataatatctactctgtacagaaaaatgttatccctttttctttgcaaagtgtgamtataaagcaatgaggctgtttttcttttatgagtcatatccggtctctgaaaacagttcctaaattggagttgccaaaatatttcatgtcatggaagcatggttagaataggcttatcaaggtgaattttctgaatggtatttcagtacttatttttatagtctcatagctctataatcacatgttgaatgggattttaatactaaaaaagaggatacataaaaacacattgtgtctattatctgcatagaacaatcgcctactttctttattaatagatcttattttgtgaaagctacaccttacaaaattttatcttgttctcacctaattatctaaacacaaggaatgatcctgctctgaattaaacctttccatttagtgtcaaactgaacagatgcaaactcacttatggggagccatcctttggaaataaactctttaattcaaaaaatatctaataytagaatattccacagaatatgaayacctacttaaattcatttcgagtaccaaagaatatttcagtaataacatttacatactaaattaaacttaattatacagcataaaacatttataaccattaaatacagaacaattattttgaattgttaagtgcttccaacatcattgacataatacattttttgaaataatgatgtaaccatttaagtaaatttttatattttattcacattaaagtttatctgtaacacaaagcataacttttttcttttctctctctttttttttttttgacatggagtctctctctgtcacccaggctggagcacagttgcgctatctgagctcactgcaacctctgcctcccaggctcaagcaattctcctgcctcagcctccccagtagctggggttacaggtgcccgccaccacacccagctaatttttgtatttttttgtagagacaggttttcaccatgttrgccaggctgttctcaaactcctaacctcaagtgatctgcctgcctgggcctcccaaagtgctgsgattacaggcgtgagccatggcacctrgccagcatacttaacctttacagaggcatttttagctggacatttacagcatttaaaggatggaattcaattaataaaaaagactttttataacattgaaacagtgagtttaagagagtaaatctgttgccattttagttagttttgacaaagcaaatattataaatggccaaatacataagcctgttattacacattaaaatgtatcctatatttaatgagcattaaaattgaagtttactagtaattccatgggatattattatgaagttataagaataggagagaacttatagtttatttctgtctcattttaggatcttcctattatggcacatgaattttaatcgactttataatggtgtcattgaagcagagtctatgatattatcattctagtatttaactacatctccccttaagaatgattttatcacccattattctttaaacctctcaagatacttcttaggctctgttctctctggagttgtgtaaattctaataatcataacatatattattatcttagaagtcattaagtcttctcttctttatttgtttttagtattcctagtttctcatgggtatagttttacaaacgctttcattctttgtatcagttttcatttcatatttgcctttcccaaaaatgcatcaaactgcttccttttttattttcttgtttcccatggggttggtaaactccttcttaaaaccttacagtagacttatgcaaagtctcatggaatttttaatgctttttatatttttttctgattttattttgttaaactgatctccactatgattctaagatctttttcctcttagactcatgtagctgcccatctaagccttgtaagtcctgttcttcattcaagtggtgtctagctacttttcattgttagcattatttatactgtaattctttcctctctggtgctaattacccaatcacaataatcatcagcaaactcagaaagctcttaatctctcctgttttatgtagagggattctcccagagtacttctttcctgaggaggcttaagagaaaaactgaaccaatgccactactgacttacagaaaacagaagcagaattacatattattttgtcttatctgatccatactttggaagtcaattcgatctttaccattcccatggattggcttaattaacaatattttattttataactataccagggtttgtatagtatatgatactattcaaagaaatacctaatgcagatgacgggttgatgggtgcagcaaagcaccatggcacgtatatacctatgtagcaaacctgcatgttctgcatgtgtatctcagaacttaaactgtaataatgaaaaaaagaaaaaaatctgaaaatatatataaaatatttaaagctagaaagtaacaaatagaaatcaaaatagtaatataattattaaaactataggaaggaaaaagatataggaagtaaatgagtgaactaaatctttactctctatagctgagagtcaaccaatgatattcaaagttgataaaccaagaaaatatcagtaaaatcatgttatttggagttatctatgtaaataattgaatgagaaaacaaacatttaacctctggaaaacttgtttaggaatgcaaaagaacagagaagggaactttgctttttgttttatgtcattctctaatattatgtttttttccccatgcatgtgtatctattgacatttttagataaatatgatagatagataaatagatatatagataataggaagggagggaggataggatggagagaggaaaacctacatacctagggtttaacactgcatagtgaaatttcagaagatttttttcttcattatacctttttgtatggcttggatattttacaatgagtaggtaatgtttttataaaaataagaggaaaataaactgtttcccctttgtaaaaaaagaaaatcttaaattaaaacaaggatcaacaacaaaacaacaacaaaacaacaaaaagatcaaaaacaacaaaaaagtgccttcagttaaatgatctcttttaatactggagagaaaaagagttaaagtagctggcctataatccattcacttactttctgaggaaacagaaatgggggtgttgctggaatgatgtggagcagggaatttggtgtaatttccttgtgaaaagataatgactaaacctcctcgtaaatgaactaatagtattagaagaaaaagataccttatctatgaaatactcttagcaggatgttcctggtttaaggttgcttataaaacatcaatccagaatctgtggatttatggaaaatgagaaatataaaagctggctgacaatttagggtgtattaggccaytcttgccttgctataaacaccagaggctgggtaattcttaagaaaataggtttaattggctcacggttctgtatgttttacaggaagtatggtgccaacatctgctcagcttctggggaggcctcaggaagcttacaatcatggcagaaggcaaagggggaacaagcgcatcacatggcaaaagcaggaacaagggagagagtatggggggcacactttacaacaatcagatctcatgtgaactcagagtgaaagctcrgttattaccaagggaatagctcaagccattcaggggcattcgggggcatgatccagacacctcccaccaggacccacctccaacactggggattacatttcaacatgagatttaggcacagacaaatatcctaactctatcatggggtatgaaatgtaaatatttaataacttatgcttcactgttttgtgagatagatgaaggcaatgaagcattgcagggtcatggatggataaagttactggatctagtgagtacataaagtgggaagcaaaaagttttatctttggagacgtaatttggtgaaggatcctgaagatgccacctataccctgcncaccaggcagatgcaccaaagtatctcagccaatttcattgagattcagactggcaaggagcttatggtaaagtctttataattgaattaaaaacttaagtaattgtttctgttatttaaactcactggaaaagcttcaaaatgagacaatgatttgaatgaaccagyagtctcttggttacactattagggataatagatatccccatcgatctagaacttataatgkcacaattgctaccaaagttcacaggasagttagtgtaaggaaatccagaactactcacattggggtagaacaattacctcatttttgctagctcaggattaaccattagtggataagttgcttgttcacactggctttctgtgataaagaactcatcctgcacctattattaatgttattaccatggtattcaaccaatagtctcatatcttcatcagaaacttgttacctatgagtttagtactgagacccagcctaggtctccctgctgagaaggagaactgaatgaggggcatagagaatatagtaatggatcctgtggaaaatgatgtgttttctttgagcattcatcaccccatactggcaatgtacaaagagaatgtgactgacttgcaggtgcatagtaaagacagcaaagaaaaaaatgagggggctgatggcgtcattagagcaaggagctcttagagtcttctcattcccatgggagaacttggcacaaaacctctacttggaagtaacttttctttggctcccagcacacacacactgatctacactgaaaaaaatacaaacataaaagtagctcttatatagaaaagtgggtggatctttaatcagtttgatttgtcctctattcttggcttatttgtaagtagcttctattcaaaccattctttatctttatctttcaccttaatacacacacatgcatgcatgtgcacacacacgcaaacacacatacacacaccattcaattttctccccacctcagcctgcattagctattctagaactgaatgtcgaagaaatctgttgagaaagctgctgtgctagccaaagcaatgaagaattattttatgtgtatgaagaaatattgtagcatagaaaagtacatctcaaaatatgttcttagattgctacaacacaatactctaaacagtaaaaatgaaaattcccttgcttcactccacatttggggtagggaccaagaaatctatatttttagtacatgttccatgtgaattttaagaacaatgattagtagaaagaacactagattagatgtttctggaagagttactagtgtcacgtcgtaactcttcttcttcctgtctaggtagacttggccaaattataaaaatattctgagacttagtttccttattgtaagataaggcaattaaactgaattcccatggtggggcagtcaaggtcgaactaataaaattcactgtctagttgttcagtatgaatgttttgaaatgaactagccatacaaacaatgctctcttaaggatttgcctttcaatttttcctctccttgcatgctctgagaagcctcctgtarccacaggagcaagaacacttggaaaaaatatgtttattgagaagattgccaatggttacaaattcctggcaacttgctcagttctctaagtaattggccatgtggctactccatctaatatgatgggatgtgaccagtatgttaataagtacaatattgttctatctctttaagctccaagtctgtgaactttctcgggaatttatatgcaatttgaagaaatgtgaattaaaaaaaattgttagcatttgctttgtttttcataacatttcctcctttgggatatgtatgtagacaacagctacaaaactgctatagatctattactttgaatttttaattacaagctatatgcctaatatactttattagaaagtttggtcctctatgacataaataacaaaattgataggaaattctcagtgaaaatacttaacagttatgatcygcaagataacagaaaggaatagattgttgtcgcaagataatggttgctgactgtgagataagtgtcaaggcaaagtcattccaaagtctggccatttatcaaaaatgaacattgaagaaaagtaggatacatttatcaagcaactgttttagtacaaacattttatttttcttttcctagctaatstatgatttagatgctgtcatttcacttgccaggtrtttgtgcagctaaatgactcaggtcaccactgcattgtttagagttacacaaccctgatttttgagtggttattgtgtttatcccaataactaccttatagtaaggaaatagttaagaaagttaattgattgggctctgttttagtttcttttttctttctatttagaattttgcttattctcatctgtttctttaaagtgatttagtatggttcacattaaaatgcacatttaatacatttgtatatcaatataatattgatataggatagaaatttaaataaaaaagctagaactaagggggatgataatcagaattattttattataagcattatgattctaacaagtatactgattgctctacacatcgtcctctgtgacagatgtggcttatttaaccacaagtatgatattatcatttggtactgacagcgctattgtcatccgaagccatttattcctgtcaccactcataaattactgtaaaaaagaggccactgttctcctaatttaacatgttcttccacattccaaccatgatggtgattttgtaatccatttgtcttcttaaagcaataggaccataggccaacttcctcaaatggaaagcaagcccccaataattagtaagctgatagagtacataaaaatctttgtataactcatacaaatatatgtactttatttccagaactacttgggaaaggcattacttgaggaatagacatagtaaagattttcctcgttctcctccctgaatattcagagaaactgtgtgtggtatacctcttccagaatcttgcctaattcctggatcttgcacactcaattttttcagttgtaggagaggctgaatttttaaaaatgaacatcatggaccctaaaatatggtttacctaaaagctttatattcttcattactttcttaattcattcatgtgttcagccaaaacttattgaatagctgccatgtgcagagtattgtatattgttaaggttaaaaaatatagatcaayaaggcatgacctctccattgaggaattcctagcttaaaggatattgatatatatgtatacatatatatatatttatatatttattaggctatggatayataaactcattaggctatgaatatatatatawgaatatatacatatatgttgtatacgcacrtactcatgtttaggtaataataagtaatcattacaactgggaacatatgtttgaggtagggttgaggggcaagtgaagaatgtccagaaacttaatacaactttagaatataaaagaccttgtgtactttgtcaagaagtttgaattttatcctstatgaaacagaaagatttttaaacagaaaacagaagtgctttaaacataggaatgacggagtcacacctgatcgtatcagaggcatcatgaaagcataaaatattggaagtgggaagtctttgctacactttaaataagagttagtggttgcttgaaaaagcaaaggggagtagaggtgatgagaagggcattgagtatgcaagagaccagattgacaggtcttggtaaattatttagggatataagaggaaagaatgactcaaggatgactctgatgcttttagcttttagcttggaagtatagaattgtggttggaagtatagaattgtggttgtgtttcttttttaaaaaagaaaaaaagaaccaacttcgtgtggagactataaagctagtttttctaccttttattttatcagtatgtccttgggcaatttcctcaaattttgtgcctaaatattcttacttataaaatatgtaatacgtatgtttatttcataggattgttgtgatgattaatgagttagtacatgtaaagctcttaaaatggtgtctggagtataataggtgttgaatgaatgtttcttttttattattactataatgtcactattatcatacatcatttttatcattataattatgcattatctgaattaatgaattccaacagaaaagatgattttgaagaaaatataatgaatccaactttggattaatcattttagtcatccagatagaagtgacaagtttgaaatgcagttctggaaagaggggacagctagtgtatatatttggaaatcaaccatgtacaggtcatatttgaggccatgaaatagcttggcttgcccaagaggaaagtataagaaaagaaaaaaagacagtaatattgaraaacaaaacaatcctcctagaaataayaatacttaaggaatgagtagaagatggtcctcgtagtagtctgaagatcagagatatactagaagaccatgcaaagacgggtgagttaaccaaaaatacccaatatgaagatgaagaaaactgcattgtcaaattctataataatagtatgactcagcctaaagaatgttagttggaattctacaaataattgttatgaatgaagcaattaatttgataattgagacatcattggtgacatagcaaactatttttatccttcctctatcgcattgattagcatctgaataaattgaaaaataaatgtgagacttaaagcagtttaagtartgttaggtatgaacttcagatttcagtgggctaagctgttactggagaaatgaggaaagttatgctttggtaaaaatataattgtagataatatcttctcttaaaatgagttatatgccacctaaacttgctatccttcatgccattgtgaaaatagtgtttgtaaattttgtccatgggctgaggaaagaagctacccatatatggagaacctaagaaaatgaactggagaaaaaaagaagtaaaattgtgaagtcagataaactgtctggaaacaagcatgttaaaatccaaagactttttgtacgcagataataaccaattaaaaatataaagaaaataggattctatttacagaaacaaatgtaaaatatgatagttaagaatcattgaccgggcgcagtggcttacgcctgtcattccagcactttgggaggccgaggctggcggatcacgaggtcagaagttcaagactagcctggccaacatagtgaaaccccatctctactaaaaatacaaaaattagctgggcatggtggcacgtgcctgtaatcccagctactcgggaggcacaggcaggagcattgcttgaaccgggacgctggtggcggaggttgcagtgagccgagatcgcgccactgaactccagcctgggctacagagcatgactccatctcaaaaaaaaaaaagtaaagacaagaaaagaatcatcttaccaagaaatgaatgagatctacaatattttgctgggcttaatggaatgagtaatcagattgccaaatgagaagattggaaaaaatcttagtgacaagatttttaaaaatatagttaatttaattttaataaaaatctcaatagaatacctttaggaaatttaaaaatcaattttaaaattcagagaagtgaataatttttggtaagataatttcaaggaagattagtaagtagctaaacagaacaaactattatttttttatttttttattttttattttatttttttgagatggagtctcaaggctctgtcgcccaggctggagtgcagtggtgcgatcttggctcactgcaacatccacctcccaggttcaagcgattctccaacctcagcctccctagtagccgaactacaggcgcgcgccaccatgcccagctaatttttttgtatttttagtagagatggggtttcgccgtgttagccaggatggtctcaatatctggacctcgtaacttaccctcctcggcctctcaaagtgctgggattacaggcgtgagccaccgcacccagctaacagagcaaattattaaaacacagctaaaaaaacacacaaaataattaaaacagagatcaaagaaaaaaatataatgggcacaattcatgaataaattataaattattcattattttacaaacaatagtgaatgaattacagaatatttaacttccttaataataaaaatatgcaaacaaaaagcacttgagaaatattatcttaccttgttgatgagctgataagtgaggagacacctatcctagtatgtttgataaaaataattacatacttaaaatgtttacattctttgtcccagaattgatatttctgtgaagctatttgaacaacattgaaatacagaaaaaagacatttatttaaatacatttattaaagcattatttgtaatcacaaaatattgggaaccttataaatgtcccacaaaatgagaaaagttaactatggcaaaccatattatgtaatactatacaagccttaaaattgtaattatgcctgtaattccagcactttgggaggccaaggtggcaggatcgcttgagctcaggagtacragaccagcctgggcaacacggggaaactccatctctacagaaaatacaaaaagttagctgggcatggtgtggcacacctgtagtcccagcaacttgggaggctgaagtgggaggattgcttgagcctggggagcagaggttacagtgagccgagattgtgccactgcactccagcctgagcgacagaggaaaaccccatctcaaaaaaaaattaattaattaatttaattaagttagaattacatggaaaatcattattataaaattttgaataaaaacttgaatgtgaaaatatgtatgcagtttaacttacaaaccagaatgtatatgtatatgtataatatatcctagattctctttcaatcatttttctcttgggatctgaattatgcattrctttgctaaggatgcagtaatctaaatagaaacattgaagcatatgtaagtaggggcttatcagatagatgttagtcttctcgcttaaatttagcatatatatttaatattactgcatgacaaaataaatatgagcactctcaaaatgagttgatgaaaagtgwyattaaaacaatctcagtctatcaaggtagctaatgcatattggataaaaattctttgaaatctaattttgcattttatgaacaaattgaaagtaaagaaatttcagatgtagtagaggactttttagaattaggatggaattctgacagcagatgtgtctgcagttggaaattgactgcaggtcagaggtgctgttctgcagcagcagtcattaaaacagctcctgtaagtgaggaagtatgtggggctatctctgggagcaatttacctcagataggatttgttctagttgtctggtaagggatagtatgttctgggaggtagttattatggagaggataaagctgaaaaatatgatgcaaaaattaagaatttataacaatgtttacacatttgcccagatataataactattaattttctgcctctattattcattctgattaatgatcacagataaaataattctggaagtaaaaaaattggtttgcccatggcaaatcaattattttaaaaatgaagcttaaatgtcgttttagtgaagagtataaagagcaatgggctgcaaatctgaatacctggaagctatggcagtttaaccattactacatcaacaaaggagcaagactcacggcatttttaaaaattgtcactaagatctcttctatccctaaacatctatgaccaaaattttaacaacagccaatcaataattatataaatgataatagttaayatttaaaattaaaatttaagtttttttttcttttgtagagacagggttccactatgttacccaggctggtctcaaactcctgggctcaagcaatgctctcatctcagcttcccaaagtacttggattataggcgtgagccaccacacccagcccaataatagttaattttatttattgtgactattaaactagatgtggtgcaaaatgctctctatgaattattctttttaatacttgcaatgacttcatgaaatacattctataggctgggttcctaggcaatatagtaagaccttatctctatttaagaagaaaagaaaagaaataggttctattatagaytccatttcttaatgagaaactaggggtttagagatgttaattaacttgctgaggtcatatagctgcaagtagcagagtcaagattcaaacccaattgactataaatcccagactcagaaccactacactaccctctctccatatctcttatcttatttcgtaccaccttatttctaagcagtcagagcataggaatgactgattataaatatggaaaatgtgcattaaaaacactaatgatgtaaaaaattgtatctttctcctattattctctgcatcactttgtagattgcatcacaaatatatctttgtcaaatacactgaaagagcatttttttcctctctatatactcacttgtcggaatctttaaaaacaaaacaagggagaggatcatgtttaaaattactattccataaaattactagtccataatgatgtccacaattcactaagcttggcacgtacctctatggggtatgcacatggttatttttataatgcctttgtgttccatgaakttttgccttattcagatagaaaaaggcaacttttttttctatctgaataatgaagttcactggttaattcattagtgaaagaagattttttaaagtttgtcattttgtgctatattttaactgaagtactttgatgttaataaaaattgcacaaacatagctatgtaaagtttatagttactctaagcatgagtaaatgtggctaatggatactttctagtatattgagcagatagtaattatgcaccatacataaagccttatttgacaggcatatgtcagagccagcatatgtagggcactggagttacagagaagaagcagacactcctcctacctttaggagtctttccatctagctggagagatacacatgaacaaacaatcagaaaacagaacaaatgctctgacttgcaatgtgagcacagggaacaccacgttatttctacctggatatagtgggaggatggaaatcagatgtctcayagagaagaagagatttgaactgtcattagaagaaacattggccaggtgtggtggctcatgcccgtaatctcagcactttggggggccaagacaggtggatcacaaggtcaggtgtttgagaccagcctggtcaatatggtgaaacctcatctctactaaaaatacaaaaattagccaggcgtggtgacacacccctgtagtcccagctactcgggaggctgaggcagaatagtcgcttgaacccaggaggctgaggttgcagtgagctgagattatgccactgcactccagcttgggagacagagtgagactccgtctcaaaaaaaaaaaaaaaaagcattgaaaagataaaggatggtattactgataaacatgcaacgcaagtaaaggcctaaaggccagtgagtgtgtagtattcaataggatataggataagcaggtctaaatatcaagagtgaggtcaggttgagaaatggattgaacattatcagtatcttgctattaattaaaatctttgcacagcatgagaagcagagctagaagaatagaggcttgaaagggcgatggggaacagaaacattaaaggcgcgagatgctaatgaggggcccaagatggtgctttaacaaattgtttccctccttataaattgttctatatccagtgctgcctctcattagctgtgtaaccttgtacaaccctcatcctgacacaacatctgtcatctgtggaatgaagaaagactcattcattcattcccaacttgaatccccacaggtagtaatggagttttcaaactaaactaaaattccatttagattttcagtmttacaaaataacagtataactacggcttgtttactgatttaaaatcttttaaaatttagggcctgcaattaaaataataaaaaatatctactagtgagaaggttgcaaaccattagcccagatgattccagttctaaaaacctgttattttattatctcaccgaatattagcagtagttggtttttaacataaaatttgtactgcaccaaacaatatccacagtgtccccatccctgagaatgcagcctgcctggcagctgcacgtggcctattagcacagccgtttacataaaatttgatgatgtctgttttctttggtttgttaaaaaataaaacacagcatttacaagcagagctagaagaatagggtcttgcaatgactttcttcccagtcatttcttgggaagaaagcaaatggtataatgaaagtaatattgagtttggacatgaatttcctgaagaagccaagtttattaatatatagttaggagtcagatttttgtttaataataaggctcttggaagaaactaaaattagtcttctggcatgtcccttttcttctttgttaaagggataggatcataactgctctcacttcatacttcatggacatttcctaaagaatattttggagtctcattgttcttttgaacattaggttcaaaaataaggtcatttaaaagcaatatggtcacctatataactatagtttttagaagaaaaattacctttatctctaaaactttgctgttacaatcaaatattgtcactgtataaaatataggcaataaagtaattagatggttttagttttaatttaattattgttttttttaagagacagggtctcattctgtctcccaggctggagtgctgtggtatgaacacagctcacttcatcctggaactcctgggttcaagtgatctttctgcctctgcctcctgagtagcaaggactgcaagctcacgccaccatggccagcgaattttttttttttaattctttgtagagacagaggtctcactgtgttgcccaggctcattagaaactcctggcctcaagcaacccttccaccttggcctcccaaagcactgggattacaggcatgagccagcacactgggcctgattttagtttttaggcaatacacctatgtattatatagatgtgtgtgtgcgtgtgtgtgtaggtgtgtgtgtgtatttctgctttgtcagttactagcagaaagctactatagcacataaatcagaaatacaacaaaaagtttgttgtgttaggagccaagtttgaaactaataatagtgaagactttaaacartaggagaaaaatcaaagtttcacattccctttgcatacatcagaaacaaagccttcgaccagggtttgataccaagaaaacttgagaaaccatggaatcctaaattttaattttgtaccatttcatatttagcatctgtaagaaaatgatggaaattttgtgcttcagaaatgaatctcactttcctgacaaatatatatgtatatatactagttcttcttcttgcaaaagcaggtttgacatatatacaaactcaagttacttatgtataactttttatttccttaacttttaataattcattcatttcattatattttgaaaggaaaattatacggacttggatcttcttataatatgaatgtataactgaatctaatggaaattagtacacattttaaacctttagatgtttaaaactgcctgtcttattcaggctagtgcttcatcagctgaaattagtatcagccgattccttaaattttatgtcaacttaagttcactgaccgatttgacaatgggtcaatgaaagaggcctgtaggattctaaagtttaatacatacataagtaaaagaatgacatttcttttcccctcgtacatgttttgcagtaggtattaacaaatatttatatccccaaatagcctgttgttagagtgggctttgttcttccacctcttaaaacataccagaaaggatagttacacaagctgcattgttcagactatgtcaccagcctattatttactataaataatgaaatgactgggcaagtggtctgaagtgagctgtgactcagggcagtcagtttctctgtgggtaacatatccatggaattcagaaatagcccagattttcaggccctttctttaggagctgatactacataaagaatgcttgcatgtttgcattttctacaccaaatggtactttataacttgatgtcaagatttaaggaaatataggaagactattttgggctgggatataaaggaggaaatattaatagtgattattaagatatctttacacaatgttaaggrctgcaagttcacttgatagacagccttgctggtaatctgggaattacctgagggctttcaagtggctattgaattaatttatattgctttgtgaatataaattgcagccttccttcatccaaggagacaaatatccacatgctttttgagttttcacctaaaatatttaggcccattaaaataatttatttagcatttcgccatgtgagataaaactgacaaagccatctgatttctttcatttgaaaatggaactgctgagaacaacatatatacttggcattggcttcataagtataaagtaaataatttaaattattgtcartgtattatactgtttgatatatagaaatataaatattaaactcctaatgaaattcaaagttaacataggcatgttgtaacactgttttatgtttgcagtgttatttcctctgggcagttgacatgtttctaagagtagttatttagttctcaaatataccacatgaactgctcggctgcaaatgttgttggccttgttttacaaactggaacacttttttgaagtttatatatcagataaacaaatagactgtaataaggaaactttgattattagttcactgatggctctcttcattattttatgaatatgcaaaatttttatcagagcaatatgctcaaaagcataaaaccattatataatacaaaaagtctagtaaaggaacacttccattccctccccagcccttgccttcccccagattgacacctcagagacacaatactcacaaatacacaaatgcagacatggttctggtataattttcttatgatgctgtgacttcattaatcaatgctattgttgtttttgactttgtgttatggtaatgaggttaggatcctcacagttgctcccccaccaacacacacacatacacatcccttttacccaatctcataaactaagaatattagaaactttagtcagtttatatattattaggattgtgtaggtactcatttttgatctaaattctctactattctttcttatacaacttcatgttgttcttggagttaataatttctttttctttattaatgtgcatggttttctacgtaactgttcctatttttccatagtttatccaaactatcaaaagccttttaatgtaatttttaaaaactcaaaattatctggtaatctatcggcttcttccccctcctctcaccttgtaaaatctcctgctggagctctccaccctttttccatctggattgattgttctttagtctcagcaagcagtgatcattctgtagattccctacagctctttgwtggctggattattgttttctgagttctctttctgggttttctctcttgcttttttggagcatatcctacaataacgtctgaaagaacacatgaaaatacactttggagtctttatgtgatatcaactttaatctatcctcattctaacctcacactcaactaataatgtagtcaatgcttaatagccagtgttttgtggttaagaatattcctttggttgttcctttttatgtgatctgcctccacatcaactttatagtctccattatttgctctttatccctagcgttccgaaatttcaaggtgctgcacactgtaagagtttctttacaacgttactttcttaggtattcagtgagcacttgcagtcatgatcttagttattttgttcgtgtttattaaaataatttttaacttgtttcctctgtgttctatttccgggatgcatatgaatgagatgttggaccttcagaattgactctacttgttttaattttttcattacaactttctccctttcaattttttctacattccgggagatttcctcaactgtgtttttcaaattttctactggaattttaattttggttatatttccatgagctttttcttgctctctggctgctctggcttcatataattctgcttttgtttcagagatacatcttcttttatagctcagatattcaatacacctttcctcttatgaaccttcttacagtgtgcttgctttgatctctttctttcatattagtcttcttttttttttttttttttttttttttttttgagacggagcctcgctctgtcccacaggctggagtgcagtggcgcgatcttggctcactgcaagctccgcctcctggattcgcgccattctcctgcctcagcctcccgagtagctgggactacaggcacatgccactacgcccggctaattttctgtatttttagtagagacagggtttcaccgtgttagccaggatggtctctgtctcctgacctcgtgatgagcccgactcggcctcccaaagtgctgggattacaggcctgagccaccgcacccggcccatattagagtcttaaccaaatttttcatgatcgttaattaggcattcataattaaacaaaggtcaaacaaaactaattgaagctctttatgcattaggtgcaatttgctagatatatttcatttaccgtgattaatcagtgagttggtcttttttcattgggagacatcaatatttaggcttttgcttctccttgcccctgccgccaaccattctgtttctgaaaagaagactccttaatcttcttatttaaacatatattcctgtggctagagttttgggctcaaagagtcccaccatttcattttcagatccttgctgccttcctgtatttggctctgatctgcactttatttctttactcctcttcatacgtgcccatgttcagaggcaccatgttttaatttctcttgaaaatagatattcaagattttttccctgtacattttcaaaggtggggaagggagactaggaaacaccagatttatatgcattccttcgaccaaccttccattttcaacaactttaaatttccacaacactcagtgccttcaaatactgagctttttggacaccacagctatattgactagtttcttgtcactctccctctctctaggtatttaggtggcatctgaagtcagttactactctcgaagttaagtcagttactattctttcatttgctttctgattcctcctgaaattgttgaaatctttcaggtgctgatattcctctctgtttcccattccccttgagtatttaaagacatattattcctttacagtcattttggtaaggttgttgaaaggcaagaaaataaatgcatgagattaatatatcatttttaatggaatattgttttattagtcttctcgatattggcatcaccagtttgtcttctaatgtatgagacaaaatgtttctgaggacatttaggataataatcctattgttctacaatatgtttctagtgtaaaaaacatcacctccatcagaaaaagcaacataatcggaactgaaaactttcatattttttaatagttttgtgaaaaaaataagaactctactacaatgttagctatcaaagtccattggcaggacaatgatgtattttaatagcataggaaaaactacttgctaaatttaataaactctaagaaaataaaagtttactaggggaaaataaaaatggatatagctttaaaaaaatggaaaacaataatgattctcaccaaaaatattgtctttgcctttacaacaatgtatctgacaatattattgctttgtacttgaagaagtagaataaactcaggacattaaatatcaaaagaaatacaaattcatatatatttgtgactttgcactttttaagaagttatatttgaacaaatcatgatgaataaaatattcatcaaaccagtattcaacattttatttttgctagtttctatgatctatttctcagtagttctcacaaataaagcttaattgtgtttctaaaaaaaaagccagaaagaatgacataataattttttcaatggttatttgtaagaggatataaaagtgtagctataaataacttctttaataattgtctaraatctaggacttattttagtagactttacataagaggagtgaagagatcaataaaatgaaattttaaggtacatttttctatgccttaggcaatttagtgaaagaagaaagaactgaagtgaagcaaagacgaaaatgtctttgcctacttattaaatgtatgtatactctgcctatttcaaaactgaatttgaagtaaggtattacaaataaaacactatattgggaaaattatgataaaaataaggtatttaaatgttccaatgatgattaaaatgtaaataactcatttattcaaactttaatatttgaaaaatcatgtcttgaccatgtaccttcttccatttcaatccacagtccttcctaaagtggtcatatccagttccatggtttaaaatgaatgccatctgtatgccatttgtgcctaaatttgtatcatcagccttggtatatctccttatttcaaaatgcatatatctaactgtcaacttgagatgttcttgggtatgtctattatacatctcaaaaatggcaagtccagattcgaactcttatttcattggtaaacatatttcttatttgaagaattagcaacaacatgtaccctgtttattgaaagcacaatcttgagattaatttataatatcacattttcattcattatgcacatgcaacacatcataaaatcttaccagcaataacaccaaaaattgtttgaaatctgtctattctctccatctccattgctaaaatcctattcacactaggatttatttttactagttataatatctgtaaaatatttcatgaaagaaacataaaaagtatatgtaaagtttaaggaatatttttcaatgaatatttaacatcataaataaaacaatatcaataattttgaggctccttaaatgctaattaaattgccatccatttcttgcaatgattcacatgttcttcattttcttactttttaaaaagtattctttcacacacaaacacacacccttcttggataatacattttttagttttgattgtctttgaatttttcttaaatgaagtagtattgtatatatttttctgcaatttactcctttctctccacatcttgattgtagattcacctatgctgatacgtctatttgtagttcatttgtttttattgttctacattaggcaattgtcttactatcttacaatgtatatataaattctaatatgggtaaatatttgaatggcttccaagatgatggttgtggttttttgatgtttcattgttgtccttctggattaaaaacaatgctactacaaacattctggtaatagtctattgtaagtatgtgcgagaggttctacaaagtacatatttagagtagaagaacaaagttgagatttccacatgttcaaatgcaatagattatgccaaactattaagtgtttgtgctgatttacactcacattagcaatagttgaacattacactttctccattccctcaccaatactcattattgtctctgacttttaatttttgtccgtctgtggagtataaggaggmatctttttgttattataaatttttgttttcctgattgctaatgcagttgagcaatttttctttacttaatggctgtttatatttcctttcctctgaaatgtacatttggtcatttaaacataattttattgattgttttgtaattattgatctggagaaattctgtattctcaacactatagtcatttgtttaatccacttttataaataccttcttccagttcaggtcttgactttttactctttttatggcatattcagttaataaaatatttattttaagtaaatatatcaatattttccttttgagtttggattttttttattattctttagcagaaacttttcaacccttgaagtgcggtgatatttttctatattgtcctctaaagcttttaaaatttgcctttcacattgaaatatttaatacctcttaaaacaagctttgaaaatgacacatgtagagatttactttcactttttttttcaaacaatatccagatcccggcaccttaaatagtatactatttcctgatgatcagcagtataacaaatagagagattccatacatgagtgggtctattttaaaactatttctgccattggctatttgcctattccaaataccacattgtctgaattatataacaatagcttcataatatgtctttgatgttttgtatagcaaatttcttcatctgatacttgagtcttggctagtgttgtcccttatttagcagagagtcttggctagtgttgtccctttattcttctatatgcattttaaaaattagttttcaattttcttaaaatctttaaacaattacattgaacctatctactattttttggagaaattgcatcgttaatatattcagcctttccactcaaaaacatgttatacttctccaactctaacttactggggatttctttaatgtcttttagtaaattgttatcattttctcaagaaagagctttgtgcattgggtttacctacttatttgtttatttgtttctagatactttatgttcttggctacattaaccataagggatatattttctggttgcttcatttagaaatgagagttcttcaaaaatttttttagctggaaaatgacagtagctttttaactgggttctctgttttacttttgtctccctatagtccattctccttactatcacacactgaacattttatatttccttattctttgatgtgtttgtgacctatcctttctcaccagaattcagttttctaagagtagaaactttgtgttttcttatcaacactgaatcaccagtgtctaaaacaaagtgggcacttaaaaaacttgaatgaatgaatgaagaggtgagtcacatgtattaatatttctgaatgtgtaagtcaagataagggctctgtctttctcacaaatagatagattgtattggctaataattaatcagcataggccaaaattttggagttgcaaaacaaagactatttataagtagcagataatattaaaaggactgctgtccatttacttattctattctgttctctggatgcattgacttacaagttatcattgaacatagcatagaatgatattgttgatcacaggtcacctagttctacctttcatccaatgttctagcctctctattgcatctttcttgagtgccagctttcttgagtgttaagagttccacttaaaccccttcagcagctggcatcacaccctcttctcagatttccattccattgtcaagtacagttcgtcatactgaactaagctctgcttctcttgagttaccatttattgatctgagctttgactgccagatcctccacattaaaaagaaataaataaaaaagaaattcaccctcttttagcataataacccttcaaatattttaagtactgcgttcgatataatagcatttctcttatttaatctaagcatctgtttattttcatgcatgtattctttcatctattcttgatgactatttcttgagtgtcttcaagactatttcttgagtgtcttccttgtgtcaagcatagaaaaggtgaacattaataatttgagaaaacattccttctcacatgtcattatatgataactccctgagttaggtcttaacctttcagaatgtacttgtcaattgagtagatatttagttgagatttggggcgtcttcttaattctagccataacaatgaactatttttaacaagaaggcgcttaggaactttgaaaattaaaacagagagagagatagactaaagtgacttatcacactaaaagtcagactgtctagaagatcatatctctttatttccttttaacaactaaaataattttaagttgattctccaaagaattccatcaaagagaagatcttaaatttcctggaaagaccatctggcactttttataagtgttatgttgttttttaagctacagaaagcgctctaagaagaaagcattttgggataaaaactaaaacaaaaaatttcagttttcaattttgtcccaaatcactcttgtcaattacaaatatatatctaaatatcccaggtttatctctaattctattaaagctagagcttaaatgacttaccttaaagttgactggtagtttttcagagtgtgaagttaattttctcacacacacgtttgtgactgactgtgcgaatactcagttattagcaaattagcaacacagtaaatgtgtctcatagaaattagactaaggggactagctgtatatgagccataaaacctataaatcttgtggacaagatcttgacatacaaattagaaatagaaattattttgaagccttggatactgatagttgcattacttagcacactatggtcttcagtcccaacttctcattactgattcccatttgtatgtcttcactctccacagacatttactctaatgtttgatatacatccctgtttatatatataacccttgcaaaatatactatgtttcgtgtgtgtctattatttaattattttatataaaggatattatgatgcaccaagtgtcataaagtattgttttgttcagtttcttgttttactgaataatttctatccacattgctaaatgtatgtatttcccagtttgactatttgaaaggacttatcaggctccacagaacatattcgcataaggcttttatttaaatttttttaaaaatacagtacagcaaaagaaaaagtgtataagcaaacattagagattccaaagatatgccatgtacagggcactatttctggcatagctcaaaggatgtcttagtccatttgggctgctacaacaaaatagcatactgtgtagcttataaacaataagaatgtatttcttatggttcaggaggctaagaatttctagatcaagatgccagcagagttgatgtctataatctataagggccctcttccctcatagatggcagcttctagctgcgtccttgcatggtgaaagagactagctagctctttgtggtctcttttataagggcactaatgatattcccaagcgtagagcactcacaatctaatcacctttccaagaccgcaccttctaataccattatcttgaagtttaggatttcaacatttttggaggacacaaacattcaaactatggcaaaatataagttccctgggaagcctttctttgtctttttggctaaataaacaagccaggtttgtcaaaccccagtggactagatgcagtcataaggaaaaaaacttaccctggaggttctcaacacatcataaattcaacttcccttatcttggccaagggtcaaatgcaaacactcaatgccctggaaatatagagtttttcagcatagttataaattaattctatctccacaatgtactctatttcattgcttctaattgctttatagtagttcatgccttgcatccctcaagtattatttagtcgttcctctggaaatggatacccagctttccaactgacacaaacaacattgttatgtttattggtaaatatcctcttgtgggcctatatgaaagtttctctgtgaaaattggatgtaaaattacttattcatcagtaggacaattgtataatttatcctccacactaaactaattttaagaatggaagagggtattattaataattatgccatgacaacatcatgaaccagagcctgggtaaaccaaggcatagagtactctgaatcacaggctgcacatattcacgttaacactaaccagacttttctccagaccgcataaatgtacctgtctacacactttattgccaacactttgtgttttcagatttccaattttgaaatttgacatgtgcagtgttccttccgtttgcatttatatccacatatttgctagctatgcagtctacctttcttttaatttctgattcaaagctttggtttatttttcctgcttatcaatttgttgtcagctttacacctagcagttattttccttcagtttgtcccctattcattaactttgtcttttaccagaaattcttaattttgatatagtgaatcaactcatttctcatctttaaattatactatatgtaatgcttaagaaatatttccccatcttaaagtcacaaagatattctcctgtattttccttcttaaagtcacaaagatattctcctatattttcttccattagctatatgattttccctttcataatcaggaatatactggactttaattttgtaatcaatatgaaataggaacccaagtttatttttttcttcatatcaaaaatctggctttgaccacagagttcttgcctttgtgtgtaatccttaatcttaactaagaactcattatctaccatgcacctttgcattttctcagttatttaatattttccactgcttggcctctcttttttgtcctcacactaaaggaagatactgtctgaactaaggtattaaaaggcacaggatgatatcaggaccctgctgtcacagagaataggtttcctgcaattcaggagtgtgcagcctgccaattttcggttagcacctgtgcctcctatatagtcagtggaacacatgccatctcaacacatggggatcagcaaggagacaaacgttacgcatatgggtgaagaccagttcttagcttttgttcttcctgttgtacttgtttttaaaaatctagacctggtttttagataaagaaaatgacattcttacagagccaaaaaggaaattcaagagttgccttattttggattattggaatatttttgttatctcttttatctctattattggcttattacctaaagttatttgttggtgttgctttcagatttgtggtgtatatttttaacttatcatagtctacctccaagtaacatagcactctacatatgtcatgcaaacactgcaacagtaggtttatattttccccacaaattttttttttttttttttttttgagacagactctcactctgttaccaggctggagtgcagtggcatgatctcagctcactgcaacctctgcctcctgggttcaagcaattatcctgcctcagcctcctgagtagctaggactacaggtgcgtgccacaatgcccagctaatttttgtagttttagtagagacggggtttcaccatgttggtcaggatggtctcgatctcttgacctcatgatccgcccacctcggcctcccaaagtgctggaattacatgcgtgagccaccacgtccggccttccccacaaatctttgtgctattatcatacattttacctctaaatatgttacgtagaagttgtaaaccccataatatagtttttagttttgctctaaacagtaaatgttctgatatagagaaaacactttttctgcttttaaccacatgtttaccatttccagtgcttatcactctttggcatagatccatgtttccacaaggatcatttcttctgaagggcttcctttaacatatctggtaatagaggcctgctaatgtttattagctcttgtatgtgtctgagaaagtctttatttttcaaagacattttcactggctatgcaattctgtttttcagtactttaatgatgtttccctgctgtcgtttggcttccattgtttctgatgagaaatatgctgtcattcttatctttatttcctatattacataayatgtcttcttctttggctgctttgagaaatatctaatgtaaatgacaagttgatggatgcagcaaaccaacaaggcacatgtatagctatgtaacaaacctccacgttgtgcacatgtaccctagaacttaaagtataataaaacataaaaaatataaatataaaataaaaaaataaaatgttcttatttcatttttaaagcaattttattatgatatgctgtggtatagtttcctaatgcttcttgtgcttggagtttactgaacttcttggttctttaaatttatagctttcatcaaatttgaacaattttaaacttttgtttatttaaacacttttgtcttctttctcccaatttttaggactcctattattacctgtatgtggtttgacatttccccatagctgtatgattctctgtttgtttgttttgtgtgtgtgtgtgtgtgtgtgtgtgcgtgcgcgcgcgtgctccatattggatagtttctattgtattatcatcagtttcactagtctgtctctgcagggtctaatatgtggttaatttcatttattgtatttcttaatttcataaattatagttttatatttagaattgaaaatgagtctttcaaaaatactcttcatgtcccagaccttttgctaccttcttgtagtctatatctaagtattgcttaactgcttatttttccaattccttgcatgactggctattttttaaatgaatgtcatatattgtgaattttaccttgatggatcctggttatttttgtgtatctctaaaattttttagctttgttattgggcacagctaagttacttataaacagctttgaccatttccttttgaggactgtttttggttttattaggtaaaatcagagcagccttaattcaaggattaattttgatcccattactcttctacatactcttcttgatgttccatgaattatgagaattgtttactctctttgattggaatacaaactataactattcctggccatatgtgagatctgaagggttgctccttttcttcattttggtagttttgtttcatcatggttagttttcatacacacatttgctgattaatactcagctaaatagccaaggagattcttctgcatatatctagagacttactgtggaactatctggatactttcccctgagaattctaccctgctagcctccttgagttcctaacatttgtcttctcaactctggcaggcaatcaggctccacctggtgtccctttccctgagctgcagcctaaaatctccaacctgtcaggaatctggggaagttatagggcttgtttgcatctcctttctcaaagaacgtgtgctgccagacaaccaacctttaaaattgttgtttgatgtatttgctttcctacttcttcttgttattgtcacagctagaaggtagatctgatccatattcctgcattgtgaccaaaaagtacaacaataatctgagttactaacagtatacatcgatctcaccccagagtaagatggggagctgaactaagctttcagcatattgacaggaggcatgaacgcctttctatccaataacttgtattgaaatactgccctaccaacacaaagaagtaaccaggctatgagtggagaaaaaaggaatcataacagcgcttttaagctataaaagtgtggcctctaaatccacaatacccatatggcattgcattattagtgcaaggtaagtacagtttaaggtagaaataatttttatgtataatgacgaatatttggtaatcacagaaagaacaatgcactaggacaataaatcaaacataagcctgtataattctgaaaagaacctgaaaacatggttgtattataggaagacttgacaaaaatacaaagatatgaggagattttaacacacttctataaaattatgaaaaaccccccaaattaataagtttgaacaatacaagtaccaatggacatatagagtgcttacggcccataagaaagagttaacattattttcaagcatgtgtatatgaaagatacatacaattttttgggggatgaaccaaaaagatagtatcaataaatttcaaaaattagcatcttgtatatactttttctgaacacagtcaataaaaaagtacttttggaaataaatttgtaaagtcaattgtttatgaattaaggaagaaatcacagtagagatttaaaatattttttgtgagatattaatttttgaaaaaaattcttgatgtagttaaaacaatacttatagactacaatttatatattttaaaagtagatgaaagtgttcaattttataagcaacaggaaataattatatcaactcataattatatcaactcaaattttactatttatatagtaaaataaaactgaaatttaaaaactaaaataaaacatatatttgacatgatyatcaagacaraaactgatgctaagtaaaagatacacatctctggtaagattgagcagaaaggaaaaggaaaagcaaaataaacaatattaagaatgaaaaagcgatgcaactatagtcataacagatcaactttaaatcacagagacagtatgaaatagacaattattaaaaaaaagttactacaataatagtcatacacaccccaacagacacactcattggtcatatttgtatgtaatttaaacacctaaagtaaaaagatgttaatttattataagatattgaattaaaataaatgcaggagtccataggattacacaaacaaagggaaagtatgagagaaagggaagcatttaaaatttgaatgccgctaacaaaagtagaagaaatttgtaatatctaatgcaatagtaattgattcaggcaagaatcatcaataaatgttaaagccattgagaatatattctggtggggaggaggctatttaccccatctcaaatatcaccctgcagattactttttaattgcaatgggaaatatgtacactgacatcttatagatcactttcttaagcaagtgatgtaacttcaccaactgaaggagagcctgacattatttgactctcatgcaaataaaaaaccaaatagttcaaagcgttatttacgtattcttcccataaatgtttaacctaaatttaaccatgagaaggttaaatactgaatttgaaatattttacaaaataaattagaatattattttctaaaaattcaatttttcagaaaccaaaggaaggaagaactcataaattcattgggacccttctgtattaaagaagactaatgagtcaataacaacgcatgaatcttcattatcatatcttggatcataaaagaaatcagttttatcttagacacaagtgaaaatattgcatatgagccccatattatgtgatatgcaattatcattgcctttatgggtatgacaatggtattgcagtcaggtagaggaatgccctttttctaagaacattttgaaatatatagctgagaaatgtcataatacttgcaatgtattttcagatagttaaggagagaaacggactgagtgagaaagagagagagtgagagcacaaatctgtggcaaaatgttaacaattgaaactagttgaagggtttgtaggtgatctttgcaatactgctgcaatctcctcatcaatttggaaattttccatttaaaaagttggtaaggaggggctttgccaagtccagatggtattacaagcaagttttattgaatctttaaggattttgagcgagaaaatattttcagaaataaagtttccatactaattttataatgtgagcataatcttgaaactctattagatcaggacagtttgagaaattcaaattttagtatactactatcaacatagatacaaaaatgatatttgataaaatattgtcaaattacaaccaatagtgcaattaaaaatagtatactatgacaaagtagggtgtatcccaaatggacaataatactttaacagtaaaaaattgattgatctatttatcagattaatagattagagaaaaaccttgtaatcaacgaaaatttccagaatattttgacaatatcgatctaaacagcaggtaaaatgaatgaattagagctgtataaatctttatgggaatatccctgaaacataatactgagtgcaccagtcaattggagaatgatacttatcctatgatacacttgtgtgaaattcaaaaataaagaaaaatctatattatgtattctgatagatatattcacaacaagtatataaaaaaagaatgttgagagtatattccctaaataaaatattataatggcttcctataactcctaagattaatatcagattctttactacagactctaggaatctgcatcatctgatttttgctgacatttctagaatggtcaaatattatacttcttctagctgtctgctccagcttcacctgacttcttcattcwtacacttgaatgtgtcttgtcacaactcacaatcgagactttgcatatgtcatttcctctttctggagtattttagctctattcttcctcttaaataacttatctttcagctctcatcccatattcaggagatgcgaggtcaaattcmgtcatttttctttataacatttcataccattctttcccttttctttttttggaaacagggtcttgctctgtctcccagactggaatgcagtggcacaatcacagctyaacctcctgggctaaaacaatcctcccacctcaacctcctgagtagttaggacttcaggtgcatgccaccatgcctggctaattaaaaaatttaaaaaaaatcatagagacagagtcttgctatgtttcccaggctggtctcaaagtcctgggctcaagcaatcctcctgccttggcctcctaaagtattgaaattacaggcatgagccaccttacccagcctctattccttcctttgagagcactatttcagttgttatttctcattgacttatgaggttttgtgattagtatctatcctcccattaggcttgttctccccacataaaatcagatatggcatctattttgctaagcatcatacccctagtaccttgcacagttcttgacacattaaaggtgcctaccaaatatttactaaattggtgaatgaattggcaaagtcgtttctttcataggattctcttattttgatcatgatcctgttgaaatagctttctcttgataattccacactttcatttatcttttccctgtgactaatgcagtttgatgtggtttgggcatctctacctgagtgacaggatatagatactatgattgacagtatcctctagaagtatgggcattgaagcatttaagaccagaggaaagggatatgctaatcttggcaatatatatcaacatatgttaagaaatcacattgaagagttaataaattaaattgtattaagaagtagaatatttaacagaaaatatccctgcaacaaaaattagaatttaaatatgtatttctccatgcccatattatttatgagcaaataatcatcacttttccaggcataaaaatggcctcaaagttattgcatgaatatggatccacatacacacacaaaatgaacttttaaaatattaccaagaaccttacacacaccatcttcatctgtgtaatagtccttcagaggaaggtatacattactgttacaatgtttacaaatgaataaattaagggacagaggagttgaaaaactttccccaggttatacagcagcagagtcaaaaataaaatccacatctgtatgactactgaaccctaatttggtgcattgcgagccaaggatatgaaagttttgctgaaattaatgaggctggaatgtatatgtcatgttttaatctaagtcagtgtttcttcaaatttgatgctgctctgtgaaagattccaaaatcaaacaagttttggatacgctgcatgtcatattcaatagtcctcccttatttgtggtttcagttacctgtggtcctcagtgatctgaaaagattacatgaaaaattccagaaataaacaactcacaggttttaaattgtgtgctgttctgagtagcatgatgaaatctcatgccatccctttgtctagtgtattcatgctgtgttggtcattttgtagctagctggcttggttatcagaccttgtcacagtatctcagtgcttatgttcaagtaacctttcttttacttaataatggccccaaagcacaaggatgctggctatttggatayggcaaagagaacacataaagcactttctttaatgaaaaagtgaaagttctgtactaaataaggaaatttaaaaaatcgtatgctgaggttgcaacctatgatgagaatgactctgctatccatgaaattgtgaagaaggaaaaagtaattcatgcagagcatatattgggttggtactatcagtggtttcaggaatccattggggtcttggaatgtatctctcatggataagtagaaactactgtactcaaaaagttctgacaatgttttttaataaagaaatagcttttttattgcttaacccagcacttctaaaaacatacctgaatagggaagctattcttggaaacttccaggctagagggaactacaaagtttttttcttcatttttttttctaatgcaaacctgtgtcctaggaagacaagtttttgttgttgtcattgttgttgttatttcaataggtttttggggaacaggtggtgtttggttacatgaataaattctttagcggtgatttctgagattttggtgcacccatctcctgagcagtgtacacggtacccaaagtgtagcacaattttgatagcactccatgtcctttctcacctcacgcttctgctcaggctcttcttttggcctggaacacctacgtcctcttcgtgatatgtggtaaattcttatttacacactagtttaaatgtcacatcatctgtgaagccatctattaacccttcaatcacatgcccatatatacagaataagcactaatgagctataatttcataaaataatgtgaatgatccctcacctttaaagagcatctcctatgtttaaacccagctctaaacattgcaaatctcatttcttaatacttacaataattacttattattatctaatttccctccagttcacatatcagttctcagattctctttccaggaaactcctctatggagatgattacattgcctgattgactcctttcctcaactttcgcttgaatacattcaactaggcttgccccaccattcaccatagcttttcctgtctaacataccaacagctgctacattaatgaattcagacaaagtatcagtcctcatttatttaaattatcagcagcatttgacaaagttagtccctttttagaagttcaaacccattcttcacttttctttcaggatgctgtcatttctggtttgctttgtacatcactggcaattttttttatggtttactttgccggttcttctcatctttacaatttctatatgttgtcctgccccagcctttggccagtaattccattggtgatttcatcaaatttcatgttgggcattatggctaagaggacagacctttgcaccaggctgtctggctttgaattacagctcaactagtttgttagatgtgtaaccatgggctagcgatctatctctacctttctatgtctacctctcttttacctcatcggtaaaaatagggattatagcagtacctcagtcatagaactgttgtcatattacatgatgtgatgtttgtaaagagcataatgtccagcaatatatgtttttgctgatattacctataatctaatgactcataaaacctatctagctgggatttctgctacaaacttgtgaatcatatatccaactacctatacaatgtctctacttggaagtctaatatatatctcaaatttattatatatagaatggaaagtcttatcatcactcttaaaccaggcaagcttagtaaatggcaactacatccagttgcagatgcaaaaagactcggatgcttccttgattcctttctctcagaccatcaatccatctgtcaaatctagattgttctgaattgaagttttccagaatcttgctacttctcacctcaatcattctaatccaaccccccaggatccctcatctcaataattgtactagtttactgcctttctgtggactatattcaacatagcagagtggttattttaaaatataagtcagctcatatctctcctctgcttctaggcttctgtgactttttacctcactgattaaaatctggagttcttacacaggtttataagaatttacctaatctgtcccatcactcccttaatctatctaatcttgtctacaagtttcacttctttaagtccactctcactgctctggtcccctcacaggtcctgtgggaatctagacatggttttctctcagcctccttgtgcttgccattcctctgtctagtgtgttagtgtctaaggcatgtgtgtgtgtgtgtgtgtgtgtgtgtgtgtgtgtgtcttattctttcagatctttacttaaaattcaccttcccaaggcctttgcctactctattgaaaattgcaactccactctaccccagcccctttttctccttacttttttcactggagctcaaaatgatctagcacaatatggtttttattcatttcttgttttttcaactcttccttccagaacataagctcaatgaggggaggaatttttatttcatctgttcactgaatatctctggtgttagagcacccagcacatattaggcacttaagcaacagtcatagaatgaattccttcccataagggataaagaaagtgaagctcacagagacaaatcattttccacgactatccaaaatttacccaagggatccaaagtcaaagcacagaattagaagacacaggtcagcatctaggctacacatactgaaggaatatgtaattcatagaagataataatagaatagccaaatgcatactcttcttctcactagaagggatttccctgagaaaaggagcagttttagtcgtctttataaccctggcacctaatatagtgtgggaatcacagcagcagcggtgtgctggagccagctccccaagctcagaagagtgggttgtgtgctctcttccaatcctgctttttgcgacatatgtaggtagcttggaattggccttactgagaatatttacaccatggaaattagcaaacaagtcagggtttattaaatatgtacctgaaaagcactgcaaagaagatagttaaaaatatatatattgttgtatgagtgaatgaattcatgagtaaaatgtatgaggtagatattatagtctgaggcatcttttagcatacagatgctgtagataaggtgaaaacgtaaaaactgttgatcgataactttcaatgaattacaaaaacaaacaataacaaataaaatctttgatataggacatagttcaatttcttactccatgagctctatttagatagagctctctgtcttccctatgggataataaaaaatacggctcaaatttcctcctaagtatagtaacccacataatgtatattcactttgtattttatcattatgtgtctgtgaatatacataatttttccactagacaagtccttcttaaatatttttaaatcatcatttattttaagaaagtcaccttcatataaaaaggcaaagatacaaaaaaatatgcatacaatttccagaggagcacagaccttcaaaataccgtgccacccttgctcccaccccaaccaacaggctccaggttaagaactctgcacttgaagtagaggattctagggtcaggctatttgtctaagttattgcctattcccagcatgtgtctgacatactgacacttaaaaaaagaaaacaaagaaaaaaaaataagacttgcagattgaataaatggatggaatgaatagttattttagttgcttcttagatcttctctttccctaaacacctccaattttgtcaactactttttataaagcatgattttcagaacctataacttctggatctccctcctctgacactcaatgttcttgattttggagaaagtcaaactactgccacattcccccaaactcaaatacagagttattgttgtagtttaagattcaagtaatgttccaggcaacatttctttaatcactcacgatccacagtgatctttcatttagctaaaactctagattcttttcacctaaaagactatagctagctccttctatcattctattgccctagtggacttttaaatttaactccatatttttaccattaaattccattgtcagtttcagccactgttctagcctgtgaagctctttggaaattacataacatagttgtcccagttagagtcattcccaaatgtattcaatatgtcttatgtgtcatcaaatagttcattaaaaattactttaagaataatagaagccagggacctcctgcagttttacagtgagccattaatcaatactgtttggtaggaaagatctatcacctacagattcaacaaactgcttaactattcaacccacatttattcatcctatccacaaggaaatcttaggaaatttcaaatgtgctgttgaaatccaggggatttagatgaggcatggtactgtctgttactgtaacttttccctgagatactgttgtatacacctcctttgtgctctcataaaattttgtgcatgtctctgtcatagtctttaccaaaatgtaccctaattttcttttgcatctgtcttctcaagtactgtgaagtccttgaagaattaatctgtgcatcctttatctctgtattatcagaaccttatgtgtaatagttaataaatatttgtcaaacagacgagtaaataataggagtctcatattttaccttaggatgtgaaaatctgtataaagttcacaattttctctggacttattctaggaagcaaatcactaaagatgattcacaacaatttgggagaacagaggagccatttcatttctttgtgcctcacttacaacattcttactattttaactttatgcacatatggaatgtgtgacttgattttataacagaaagacatttttatccttcttaagctaaaactgtacatgctattctgattatttctgttttcctccttttatgctaaaactgtacatgctattatgattatttctgttttcctcctttatatgtaaccttttgtatttctttttaaaaggtcagaaacagtatctcattaacacttcagaaaaatagttgccaatgtttccattcatagacctcatacttggagtgtctcctttaaaattatatgaaaatgataaaatgccacaaaatcacagtgttcctgaatatttatgcaatcttctatataaaatttacttcagactttctgctgcttgcctgatagtaataaatttattagtgtatttagaatataaaatgtcatcattttatgcctgccttttgatggccagacactcatcaatttttttccaaagccagatttctataaggagacactcatcgataaaatatccagtgttcctgcacagaggttgagtaattagtttctaccacagactgaaaaactcaatgtatggagaacaaaataaccttgtacattatgtgcaatctttattaattgaactttaagctagctcttgagatttttatgcagtctgcaacaaaaaggtcaatggaatggcaatgaatcctcttgtatttattagttcattttgcaaatgctaacattgggtgagaattgattcgatttgtttgtgatccagtaccaaaggggtattattcattaagatttacatggaaaataacatacccaagggaaatcagaaggaacatttgcaatagcaatggtcttactagaggttgaccatgattttcatttcacaccatttcttaaaattatcaaaaagtgtcctcaaaggaattattacttggaatttaacacacacacacaccaacacacacacacacacacacacacacatatataatatttaaaatgctgttctaggctccaaagttacaacataaataaaacagtcaatgtcctcaaaaatctcacaatctaatgagaaaacagaaatttgagaattcattcattatagtacaaggtaaagtaaaggaaatactttgatgtcaatatgaaattatctatgggagtacagaggatttaaagatgaaactttataaagtgagaaagatttcacttttgtcttagatgattagaagaatttcacatgttttaatagagatattaatcaaaagccaaaatatggacaagaactctggaaatagctaaagaaatttacaattttgggaaatggagaacagagctgtatgactgaggtatggtgaggagtgatgatcgataagccaagaagtgaagacgcaggttagaatttgaagaaccccctttcttttccatgttaagttgtcaggtagtgaggtactactgaacagtttgamctttggaatgggttgagttaaacctgagtgtctatgttttagaaagttatcatttgtgacaacacaccgttgtaaaatctgtagttttcctaatatatgtgaagatactcttggctgtgacaatgtattaaaaggaagggaaagatacattaaaagttagaattaggacttagtgtttgaatgaaaatggaagtttaggaggcatcaggattaaagacggcatcaagatttctacttagtacattgcatacatgtgtaatcaagtgtgaattattaaacaaaactagatacttcatatctcgttatgtaactactacttaatatttttaacctaagtgttcttaattctgcaaagaattctaaatttaaaatgcctaagtaatctttttcagttcatgcaaatatatatgtgtgggcatgtttgtgtgggtgtcttgttttactaaaatatcttcaagaataatgtttgagggaaaaaaatattaagaacataaaaatgggccaggtgcggtggctcatgcccataatcccagcactttgggaggccaaggcgggtggatcacctgaggtcaggagttcaagaccagcctggccaacatgatgaaaccccatctctactaaaaatacaaaaacttagccagatgtgttgtgggggctggggggtgcctgtaatcccagctactcaggaggctgaggcaggagaatcacctgaacctgggaggtgaaggctgcagtgagctgagatggcactactgcactccagcctgggcaaacaagagtgaaactgtcttaaaaaaaaaagaacataaaaatgtacattttaccctcatgttcaattatttcattaaggaggtcacaagtttcctccttgaggaggcggggaaatcttcattcttttacatactccaattctggagacaagatttcattatgttgcccaggctggagtgcagtggtgcaatcacagctcactgcaaccttgacctcttgggctccagctatcctcccatctcagcctcctcagtagctggaatgacaggtatgcaccaccacgcccagctattttttttttttttttactagagacaaggtcttgctatgctgcacaggctcatattctccctttctacctggtcaatgtcaccaggaatttatatcattttatcctatgattattagaatatgtttatatatgaagatatatttaatagttacttatttcttttgatatcacatatggatatgtatgcacgtgtgtgtaaaaatatgtgtgtaaagtctcaaaaaataatcagaggttatttcaataaaacacaataaaactttcctgatttgtcatgacaattgtatgcagatataaactttctaatatcacatctttatatggaagtaggtaacaatgttattgagagatcgttgtttatttcttaaaaattatgtgtgctaatgtaaatgttcatatgtagatgtaggtatttaaaagatggcatatattataaacatatttattacaatgacaagtaagaacaatatatcagaaattttacatataaatacagcactaaatttacctgagtttaaaaaaaaaagattattaggtcattgccattaatttaaaataataattatgttttgtttttactgagataattttctaattcttacttccttttccttttatttgagtccttggatctgtaattgccttgaatttttttggccaataaaattttcatgtcaggtgcttctctaagaggtgttataaattttttctctcaaagctgacccaaatgggccatgagttcacttttgagacacattttgctacaatacagtcatcttgtcttagagttatatgtgtaaacagccttaagcctataactttacttataakcacatatgattcattggatttgaagttcaagcttcttaattttctttttttaatcagctttttcaggttgaaaaatcttaagctccagatgtagttgagtttgatacccacatcaaatatcatgtagaaattgcgtgttttacccctgtataccaaatttgaaaagaaaacatcttcccattataccagagagaatagtttaaatttagtttcctctcatgcatcatgctacactggaatgtgtgacatgctgtgccaatagacattacatatggaaacaggagagaactttgaagagctgacagaaggctagagtgactaaagcagactgtacaaagccaagagagtggtaggcaggtccagacttccttggtcttgggctatgggaaaatagcagtcagaaatagactttcaggacttcagcatcagctaagtgaataaggaatggccaaatgcttgaatggggagtaggggaggagaccagtgcatatttcaacaatattatcatgtgacagcattatttaagatgattttaagttcagtcagggcaaatacacacacacaaacatatacgcgcgtgtgtgtatatgcatatgtatgtattttctagacactttccttcttcctctttgtcctaaatttccatctctcaggtgaacagaattcttattctgccttctttatattcaagaactcaacactacagcatcccaccgttacctcaactactctccttacccaaattaaagttaaatctatgaggagtgtgttaatttcctaaggctgccataataaataaccacaaactgggtggcttcaaacaacaaacatttattctttcacaattctggaggctagaagtccaaactgaaggtgtcgatagtgtcaggctttctccgatggctccaaaaagaatcatttcttgctccctctatcttctggtggttgctagcaagtttcttggtttgtggcagcttaactacaatctctgtttcttctttaatagacttctttctgtgagtctgtgtgtctccaaagctctctcatatcaccagtcattggatttagggcctaaccctgtccagtgtgattttcatctttttctttccatcttttctttattgacgtatatttgatggatgaaaattgtataaataagatatacagmatgcttttgatatacatatacatagtaaaataattactataataaagttaattggtggatccatyttaacttgattgcactggcaaatgatgtatttcccaataaggtcccattcacaggtaccaggggttaagacttcaacatgtcttttaggggtgccataattcaatgcacaacaggcggctaatctcagctaagtgtttagaaggacaaccacattatctgattaaatcaatttacataaaagtcagaataacactgcctttctaaagaagtttataacacaaatgtactgaataatgtacacactgttaagggtaagagcattcctagtaactgctttctatccagagctttcaactttccaccttcagtaaactcaaggccaaggttatatttctctacccatttgccagagtagatcagctacgaaatgaaaaggatacttaagcagaaaatttaggttgtgtatgttatttcctttttctttagtaatgttttcacttttagagtaaatattttaatattatttgaccaaattatatgaaaaatggcttgatactttattttaattttcccatgttaagatgaatttagatctgcatatttgccatacatggtccatatatgaaggatagatataaaatatatgaaggacattgatgaaaaatgttggcagtagaaaactacccaagtgtaaattattttttttgttttgtttgtttgtttgagacggagtctcgcyctgtcgcccaggctggagtgcagtggtgtgatctcggctcaccgcaatctccgctttccaggttcatgccattctcctgcctcagcctcccgagtagctgggattacaggcgcctgccatcacgcccggcacattttttgtgttttcagtagagacggagtttcaccatcttgcccaggctgatcttgaattcctgacctcgtgatctacccgcctcagcctcccaaagtgctgggattacaggcatgagccaccgcgcctggccacacaagtgtaaattattttgtgtagttttctacacaaaatagaaggcaggtacagattttttggcaggtacagattttattttttccaaaatacattctaagtgtttattagaagaacaaataagaacaaagataaagagtcatctcgaggcttcgtatcaggcaatctgggttcttccgtgcttacttagagtcagatttattcatagtggtggaatgctcacgcctctaaggaataagttcagaagaatgtggtacttttatttaggctattaaaatcctgaaattcaagttttaaaatgattcaaaaggagataaatctgttttaaaacaaaatgcatttctttgtatgcagtgagtcagagtactgctttgtggtaaattgccttatgttctgaacaatataatgtatttcatttttaataactcagtttatttgtaaaccatgtattattaacacatagctcaaactattgtatttaatatagaaattgcagttaaaattggagtggactctttttctttcccagaacattcattgtttgaggagaatttaacaaggcattttgatttttaaaaatccctcatcagtgtaagcacacctttaaaataaaaatcatattattctaaattcaattgccatagcataaaatagctatttaatatttttgctaggactagtatgtcttctttgttgattacaaaatacatactatgctaaattttatcatttgattattgatttcccaagagccttttgtctaaatgaaaagctgtgtcttaagttttctaattaaaatttatagtgatagaattatttttcatgcagttaatttatactcaagaagagttttaacagttatttaaataatgataagtttctatagtttttttattcagttgttttgaacactctggagctgatctcttatttttcacagcatgattcccaaacatctgcaacaaattcctctaaaaattaggaacattgttagatatggaaattcaggatcttacccgtacctattatcagcatctctggaaatatacttcataaatatctgtttctaataagccattagatgattcttatgcctattaaattttaagaacccagtgttaaagagaacaaaccagtgtatcctaacttttctgacattagtgatctctagactttgtagtacattgggataacctgttcaatgaatgtcagcttcttgtagaagaagtcatccaggggtcaggaaagagagaaagcctgaactgcctcttactacccctagagttctggagttctgggagcctgactgaagatagcaggcagcatgtatggagctatgtcaatgagaatgagcccaagataaatcatcacaatccatcaacccttccttccttccttccttccttccttccttccttccttccttccttcatcttcttaattcttcctctatttttgtcagaagaattgggagggagggttattgggagaagagcaacagcatatcaaaaccctgctttatcttatcttgacgtcatttaacactcttaaaaatatgtgcttttaaaaggaagtattcaatttttttcttgttattgccatagacaaaaaattaataaaggggtatgaagtgtcaccaactgtctgaccctggcctactttcccaatcccagttccaagaggcatgtacttcttggtgggtgtgactgttatacaatctttggctgactttacctcttatctcctatcttcagatccttcttcctgggaggattttaacatgtaagatgaggaattaaaacaccatctgaataagtatgaagtgcattgcagtctttggaagcaacatgcagaacttaacccaaaccttattctatccatcagaagctcccaggctactgactggtctgtctctcccaggcctgttacaagaaaagtcatggcttatcattcatcggtttaattattccaagacccccttagagctagagaaatgaagagatggagtgcttaaacttgattgatttgattgaaagacacaaagtatcaaaccatttttcagacatatgtctcagtgaaattaaaaaataaaaaaattcattttggtttaaaccagaatttggtaaactacagcactttatgtatgtctgccttcatattacaaaagcagagtgaagctgatgcaacataaattgtataatatatgcgtacctataggacatctttgaatttgcctcctggcctacaatgcctaaaatgtttaccatatggatctctagggcatagctttgctaacctctggtctaaatgaaaacattcatgatttattttctccagcatctgaaggcaaaatatgcatccaccgtattccataaaaaattattcatacatgtcttaaaacttgcatattttattttctaacccccagcataagacaaccataaatgtgtaggaacaacagccttagccccaacaaccacaacagcacctaacataatagggattccataaatgttttgatwaaataagtctttaaaaatatatgtacattctgcattttatttacgatatactgtctctctattttagaacaaatttcattttctccaatctttgaataaaatagatgctttaggaagaatgtacaaggagatttctagtactgcttaaagctcaggagaagaagctcaagaatttgtcctgaagtgtgcaagttttaaaagaacaaagcagctttcccttccccgaaatacatgttgaaaatatttctatcgataaagtatatgtataaatttggacaaatctatgtcaaacatctattataaccattactaatctgtattccaagcataagtgtattttaagttcttaagacattgatgtttgtcaatggtcctaagtgttactaattctgtcgcctccagcaactcagcatgtagaacagactatatcattcaaggctagccttctacagaacatccaaccctgttcaactcacgaggatctacatcctattcactttaactatagagtcaagacagatcattcaagtgagctaagtgagagagaaggaataagaagaaagcacaacccttgaaagatttcagataatgaaaataaacaagagctgtagaagtaagtacaaatcatgcacgtctctcatggccactttttttttttttttgtcagatattgcaaagctatggacctggggagatgacctttaaatcatctagctcagaatttgttccacaataaaaagcttaagaaatgtccattatttccctcccttcttctcattcattctcacttggctttgttcttttcagtctaggattcttattcatatttctacctaatgtaaagagccaaccaacattttttggactgtgaggggaaaattttcttttccatgtacatttatgaaaaagaaattatttagagccaaatcatcccatgttgtatgcaagaggcagacacatcacaccaagaatgagactctggaatcaatctgtctgggttccagtccagctgtaccacttacaagctgaatgaccttggacaaattgcttaacctctctgtgcatcacatttctcatctctaaaactggaatagtactacttcataagctcgttgacaggactgaatgagaacatatatgtatagaacccttaaaattgtgcctgtatatagtgaacactcttttatcactacgtgttattattattagcgttaatgagaatcaagctctcagcatgacccaggggttctccagctcaccttcactgccttgtgcatgtcttccattacactctctaccactctgttccacaraggccaatatgatattagtcctaaawtgacattatccttgttatgcttatctttgctcatgctgaagtgccttgtcrttattcagtattcactttgcataacctattttccattaagcttccaccttgcaaaatagaatgccactacattgtacccgaagccagacacacacacaccgttcatttgtacacacacagttcatttgtacacacacagttcatttctctttttccccttccacttctagattgtgaagatttcaagggcagagagagagtgttaggaacccttatggccataacccctaccaactctctgttacatagaagacatttagaaaatgtatgttgaattaaaaaaagcttaaagaccagtcataaaattttgatttcataaaattctacttaaagtatagccacaggatttggctccatgacctcttttggcagcaatgctcacttattatcataaacagcacatagtacttgtcattatttttcaaaattcaatgtcctttaatgtcatctggtcagctgaattaagaagcttgcttctattaatggaattcagttttcaatatatctgaggtgtttctaacaacaccattcagagttctctgaagcttctttttaaataaataatgctccatttggtcatttctttgttcttttatatttatagattgtatagtgtttttcttaatcatttgcactaactttaattcaacagcaactgaaaacaattatataaaactagtgtgtctccatattcttcatctttggtgaatttttcsccaaatttactaaagtatcttgcataaagatctatattttattatttaaactgacccttctctacaaaaaaattactcaacaatgattcaaaaatgatgactcaatgatgcatttgtgtttgtgaaatgaccatactaatgaattggatttaatactttattcaaatatatcaaatgtattgcaaatccaaacacttatttccaccaaacctaacaaccaccattgtctctcaattcaaggacagtaatagcctttgaactggctactgcttccaggcttgcccctctattgtcaacagaacagttgaagtgatcatttaaaattgtattcagatcatgctagttccaagccaaaaccttctcgtatccattgcactataaagtctaactctttacaatggcctttgaggcccatcaagacctgctgctgcctggctgtcttacccttcccctcacacccagagcactatgggtgtgaggggaactatagctacaggtatactggggtgtttttcttttttgtttgaacatgcagtgcttgttactgtcgtgggactttgcactttgtgtctactctccttgtaatgctagatcttgaatataaggctgagtcattgtcttcaactcaaacatgacctccttcatgaaatcttccttttctggctgcttctcttcagtgggcctttccatcaggtgctggcaactctcagtcagttctttctcagctctgtctcttctaatggccttgctaattcagcctgcccttgatcttggtgctcagattcctcagagtctctactacttttctcttctgacatctggttaaagctgcgagcctcataaacgtttttggctgagccattttgctcatagaaggcccatttatccccctcaacttattatccatattgcatgatagctaaaggaaacttgggattgcaaagtgaatctgtcatgccacagggcctccttgactgctacttgggatccgcatgttagcttgggattactcagcacagtaatgtcctccaaaacttgaaagcaaaaaccctgagcatcccctcaacttaattaagaatttcaaaagatacatcccctagaggattggcctcgacaagctgggaagaaaaaacaagagcggtggcagccacttttctctaccattgagctctttctctccacctattctggcatttctcaaaagaatgcctgaaggcttttttcctattgtgcattttttaagggtatcattctgttgccaaggctggagtgcagtggcatgatcatctataacctcaaactcctgggctcaagcaatcttcccacatcagcttcctgagtagctgggactacaggtatgcacaaatgtgcctattttttatttatttatttatttatttatttatttattttttgtagaaacagggtctaattatgttagccaaactggtcttgaactcctgcccttaagaggtcctcctgcctgggcctcccaaagtactgggattacaggcatgagcgactgtgcttggcctgttctttctacatgatttgaaactcctttatacaaaattccatgcaaacccagtcatttatatttgttggcaaacattgagatgaaaagtaaaaacacttagtgaatcatcttaatgtttcatctttaagttactaagcatctgggtcttggcaaaacatccaaataataaactcacccatcaagcctggtcttgatatagaggaagaaactgaagggctttctaaagactgatgttaaactatacattaaaataatgctttaaataacagaaattgagtgtctctttcccacctctaccccacggcaggcagatgccttatcattgtaggcagaaagacatgtagaaaagcaaaagagaaaaacgtactatcattatttgactggcttggacacaaatatagggaatggagaaaatgattttctccctatacataatagaaaaagggagatagagataataaaaactaagttcaaataaatcattatcaacaaaagtaatcaaaagagtagctcaattacttaagtgtgatttattcagcatgctgagccattaaattataaccatgatttgggaaacacacacacacacacacacacacacacacacacacaaatctgagttaccaaatagataaaagaactcaggccacttcctggccctcattatttgctctcattctagaaataattctaaatccttgatttttctgacttctcagccaaggtctttttgaaagcaccgaatcagatgttggatggtaaaaacaaaaacaagaaaacactggtacaatgaattcaaatgttgtgacagcaaatagtaatatatatatgtatatatgacagatgtttgggagccaatatatatggatgtctatgcctcttctctagtttttatttagtgattattttgatcttttatgtgcagaattataaccaatacactgcatactttatatgcaatattgtgtttgtggttttactcatttaacaatcctaagayagctatacacagtttcaacaaagaaattcatttactctataaagcattttattattttttctaattgggacttctaatagtattgaaagtagatagttaagcagaatagtcttacaaacaacatccggaagccatgtgcaagtgaagattgtaataagaaagaggagacactttgaagtcaggtttggatttgacccacggctaccaatacctcccagcttcttaatatgtaccagttatctgagttatcagaaccttttaaaatgaggaaactaaaacctaccttacaataatgctttcataattatatgacaatcacacacacccacaaaaacactaaacaaatgttacaaaatatagacaaatttcttcatttacaatgtcttatgcatttgagaaaaagaacaattaggtgatatttgactttttaaagacaagacagatccatttcttcatacttgtattatctttaaatgtgtttgaatccaatatcaaaatataagggtgaaaaggtactaaattcagtggaaaattaaattatttttctttcaagcatagtccaaggctatgtagaaatccacaaagaaatcagattgaattttgttttaaaatctactgctttaggaaagaaaaaaaatgcaagtgtttgagggacataaaatcagaacataacgttgtttgtgtgtgtgcgcaagcgtgtgtgcatgggtgtatgtaatgagaacaagatgcttaacaagtattttcggttagttctaagtgtaagaagccccttgggtctgtcctatagcaaaaatgcatttttttgacgggataagcttatgtaacatacttctggtggcattatcttaaagagaaaactgaatctgccctttataatactttaagttattccatagtttaaagatatttgttcttgattgggcaaaacatccaaataatagcatttacctctgtttatattaatcatgtatgttggctgacacacatcaccattaaaatgacagatgtttaggcaaatcatcgaattatttgatctttatatttctaagcattcagatagttgtatacatccagatgatttagcaactttttttgtttgttttttgtgacatgggcacaatttattctgtaaatgggaaactttaaatatatttgattatcgagatatcttatactcactttcttagagtttcaactataacctagaacattcattctttttaatgatatttcccttattatatattgtaaccatttaactattcaataacttttttttgagacagagtcttgctctgtcactgaggctggagtgcagtggtgtgatctcggatcattgcaacttccatttccgaggttcaagcgattctcctgcctcagcctccccagtagctggaattacaagtgcctgctaccacacccagctaatttttgtatttttagtagagacggggtttcaccatgttggccaagctggtcttgaactcctgacctcaagtgattcacccgtctcggcctcccaaagtgctgggagtacaggcatgagacattgcgcccgaccatcaataacatttttgtaaaatttaacagaaatcgggctgggtgcggtggctcacgcctgtaatcccagcactttgggaggccgaggcgggcggatcacgtcaggagatcaagaccatcctggctaacacggtgaaaccccacctctactaaaaatacaaaaaaaattagccgggcgtggtggcgggcgcctgtagtcccagctactcaggaggctgaggccggagaatgtcgtgaaccagggaggcggtgcttgcagtaagccgagatcatgccactgcactccagcctgggccacagagcgagactccatctcaaaaaaaaaaaaaaaaatttaacagaaatcacaaatagatatcaacaaagaacacaataatacagaaagatttatgtttttagcatgcattatttcttttggatttcttttggttatctagctacatatagagtacatccagtgcatttaactaacatactactttatttctctttctcatcagatttagaatgtaataactcaaggatttgataatacagtgaagtagtataacaactgtctacgtgcttcccatgatatgttctctatattgtaagtatatatttactttctcaatctagcttgattgtgggagaaatgtgttcacttagaacttatagatgatttatattgtttcagaaaattttgaactaaaactcatccaagttacagaataatttcagaaggttagcttctatgaggagatcttttataaacttagttttaacattctatcaaagttaaagttaaaaataattttctgtcatggtaggtaggataatacatccatcatgtctaatcatattttaaaataaatcttacagttaataatcttaaaatttctatattcttttgtttcctagaaaaaagtaaaaaaaattagacatggaaaattttatgttctcaatataatttgcaatctaattttgaattttggtcaatttctttttatattagttatcttttgaaaatgggttttaatttggggtagataatgcctgtaccaataaatcattcttacatatgaatataagaatatatttactatatatattcatatatgtaatttatttaataagttaaataaaaaaagaaaagtagtctttgtacagatatgaacctcttactgttcatttcacatgattaaaaaataaggaaggaggtagaattctgggatactgtgctttgtttttgagttaagaaatactacaaagcaataagtgttactcatgtcaatgagaaagaaataaaacagcccaatcccttttccttggatgaaagcaagctatggactggagcccatcatgaatcagtagtgtccctacaatttaaggcatgtttagggtgtcaggagatgctgttccctaacaacacctaataccgtcagacctagaatcgcttctcaagccttactctctattctctccagcacttgttttgctgaagctcctgtctgagaatataaagctgtcagagaattgcaggtggtggtggataggttattaacatccctgtttcagaactctgaatgcattatgacacaaaatatgatttaatacatattttatagcagtgctatctaataaaactataatgtgaactgcatatgttatttaaatttttctcatggccacattttttaaaaagtaaaaagaagcaggtgaaatgagtcttaatgatatattttatttatttagccctgtacattccaaatatagttattttaacatatgactaatgtaaagaaaagaatgagacaatttgcattctttttttctcactaagtccttgaaatccagtgtgtacttatagcacatctcaattcagatactaaagttttgttgaatatacttgatctatacttagacttcataaaatttacagttggaaaagtagattcacaaacccaaattgtcctacaaacatttaaaagtgttccaataactaaatcaagtgtcagtttttaaatttaaattgataatcatctcatcaatgacactagctgtatttcaagtgctcagctgtctcatgtggctggtagtttccatactggaaactctgctccaggtgaccgctgatataatgcttcggttctgctacctaatgaattttgaaggccaacttcagaccacatcaaaggagcacatgactttaaaatttcaatgacagaaaaagtcaaaccctaaacttattacttaaaatggatttttacagaaccccatgtttatgagaaattatagagaagaaaatataccaaatgtgtacttctaagctatatacatgttggaatttgggggctttttgtttgcttccatgtacttgctttgttgtaactaaaggaatttgctgatcacagccctcctcattacaatgagtaaatcaatagaaaaaaaatctaacatttaaaaaaattgttccatcaaacacattcttaaaagaatgaaaatataggcatcagacttgtaaatcatgtatctgataaaagatttgtatccataatatataaaaaactcttaaaacgtaataagaaagtaaatctaattttcctggtaaaatatctgagctttaccaaagaagatgtatggatgactaataagaatatgagaagatgttcactaaggagatacaaatgaaagccacagtaagatgccagaacatacctgttaaaaatgaataaatgaattaaaaatctaacaatatcaaatattcataagcatgcagagccacagagactgtcattcattactttcattactgttggcaattcaaaatggtacagtcactttggaatgtacaagtttcctatgaagttaaatgcttacttaatatatgatccagtgatcccattcataagtatttacccaagtgaattgaaaaacatttttgacacaaaaaaacaatatgggaatatttacagaaaatttgatttcaattgccaaaatgtggaaataactaatatgttgtcttcagctggtaaatgaatgaacagactgtggtaaatctataaaggggaatactattcaaatatttttaaaaggaaagtattgatttatgcatatcatggatgaacgttttagtgcatcttgctaagtgaaagaagggaagcccaaatgactgcatatttaagatatataattcaatgtatcttaaattctgaaaaagccaaaacatagagatgggaagcagatcagtggttgcccaagttagagatatattgagttggagttataagagggctgactacaaaatcattgattacatgaggaaattttaaaggggggtggaactgtccgtggtgctgaaaaaattactgtgctcatcaaaacccatagaactgtacaacacaatgagtaaattctgcagcatgcacattaaaaaaagaaagaaagaaaacaaataggatgtattatcccaaaatggggtggaaacagtgacaagtgaacctaaccatcttacaaatgtaatatataaacttactgaaggtgatgcagtcaaaggatctagcctatattttggaaaacagtattttgaaaggamaaaatctgcaaagaatgaggctaactctaaaaagaactatacatagacattgtattttagttgatttttttcaaaggagtgcaggttagcaattatgaaagtactttgcatgtatattagggtggaatgcataagtaaataaattatagatattgggagataggtttcacattgctagagaaagaagttataatcagcaaggagagatggctaaaattaaccttgcgttgctagatgagagatgtagatattaatttgtgaatctatttttattttaaaatacatagatacagaaatgggtctacacacataacatttattagctctatctactgaaaagctctagaagcagtgataccacattagcaattagcatgcctcatgcccaaattttagtttcatgctcagtttagaggtttctgtatatacatcataatgcttcaatcttagagtgagcatggaatgtaggaaattcaaatagaattctttatttaaacacaagaaaagtctctgagaatttaagtgacttgcctaggatcagcagtttgtaaaggatggagcatctacatagaacaatcttacttcattcttaatcttaacttgtaccacatcaagaagtctacacratatggaaatattcttatttgttaaattatttgttttcaatttccagaaataatcaagctctttctcttaatttaaataaaattctggcaaattttatatcattaaaaaactattattcacatttaaattcaaaatttttacctgaaatgtctgtttcctgttgagcttcaaagtcccatctagaggccaggcatggtggctcactcctgtaatcccatcacattgggaggctcaggcaagcaaatcacttgaggtcaagagttcatgaccagcctggccaacacaatgaaaacccatctctactgaaaatacaaaaatcagctggtgtggtggtgcacacctgtagtcccagctactgggaaggctgaggcaggagaatcgcttgagcatgggagttggaggttgcagtgagccaagattgcaccactgcagtccagcctgggcaacagagtaagagtctgtctcaaaaaaaaaaaaaaagtcctactggactgggaaatcattattgctaatttatttctgttatattggacacacatatgctttcactttaaggaaatcctatgcaagaaccaaaaaaaaaagaactacaaaatacagtcatgcactgcataacattgcaggcaatgattgaccacatgtacatcagtggtcccattagattataatagagctaaacaattcttatctcctagtaactttgtagccatcagaacttagtagcacacaactcacatgtttgtgatgatgctggtgtaaacaaacttattgcacttccagttgtataaaagtgtagtacgtactgtacaattacataaggtgcataacaatgataataaacaattatgttatagtttatgtatttactatattttatcattatttagagtgtacttctactaatttaaaaaacttaattattaaacagcctcagacaggtctttcaggaggtattccagaagaagggattgttatcataggagatgacaggtccatgcacgttattgcccctgaagacctcccagtgagacaagatatggaggtagaagacagtgatattgatgatcttcaccctgtgtagacctaggctaaggtgtgggtttgtatcttagtttttacaaatttaaaaggtaaaataaaaaacaaaaatatttaaaaataggaaaaaagcttatagaataaggattaaagaaagaaattattttgtacagctatacaatgtgtttgtgttttaagctgtgttattatgaaaaaactcaaagacttaaaaaatattttttaagtctataaagtaaaaaagttacaataagctaatattaaattactgaagacagaaaaacctttttataggtttaatatagcatttgtacagtgtttataaagtctaccgtagtgtacagtaatgtcctaggctttcacatccactcaccactcactcactgactcacccagtgcaacttccagtcctgcaagctccattcatggtaagtgctttatacaggtgtacgattttttatcttgtatacagtatttttactgtaccttttctatgtttagatatacaaataccatcgtgttaaaatttcctaaagcattcagtatagtaacatgctataagtttgtagcctrgaaacaatagcctaagtgtgtagcaggcaataccatctaggtttgtgtaagtccactctctgatgtttgcacaacaatgaaatcacctaacatcacatttctcagaacatatctccatctttaagtgacacatgactgtatataaagtgttttttacttcaaaataattatgtctcacaaaagcattcatcatgtattttcttaaataacaatgttccctgctgcaattttgttagatttatacatagtatctcagaggaaataaagtcattttataaagccaagctaacctgccatcctttcctttaataccttcatcactatgcccatctgctgcaatttttataagtaagtgtgatctcataatccacacagttttaatatgaagaaaatttatagcatactcttactaatcaataaatcaagctttctccctattgctttccaatcacaatgatgacttctaagggagcttattttattaggtaatttgaaaatactttactaggctatttgaggaacttcttgaatatgagggggttattaacaataaaagaagatacacccaatagagaaacaatttctataccttcaaataatagtayagtaggtataggaggcaaatgcaaaatcagtgtgatccattatatatttaaccctcatttgttatctgttacaatgcataaatatgttttgaaaagaatattatcaaatctatttgaattttctaccatatttaatgttcagaattctcattattttatttttttctgatttaaagtccttctaccatcgtagaagtctattttatttgttttgtttgcttgttttgtttttgtttaaaagactattcagaagagttcctttttataagacccactttttcttttttctttctttttttttttttttttttgagatggagtctctctgtgttgcccagactggagtgcagtggtgcgatctcggcccaatgcaaactccgcctcctgggttcatgccattctcctgcctcagcacccccagtagctgggactacaggcgtccgccaccacgcccagctaatttttttttaatttttttttaaattttagtagagacggggtttcaccatgttagctaggatggtctcratctcctgacctcgtgatcygccygcctcggcctcccaaagtgatgggattacaggcgtgaaccaccgtgcctgggcaagaccacctttttttttttttttttttttttttctgtactaagactttctactattctgcctggtgaataacaggtacttaaaatatttgcggttttgacttctaaacaaaataacattaagcacatttttttttttcagttaattttaggagtaattggggtagcctggaagaaatcacttatgggagatgctccagagctccactgtttgtgatgaccattcaatatgcaacataaaatgagtcttggtggtgtctcaaatctttctcctccacaaggagaagtagatggagtatagatggatgcacgggtggatagagtaggacaaatagatggaaaaatagttggatttttcttacacataccgtccaatatcttccataccatggacagtattttatccttacttgtttctaggacctaaggaacatagttggtaatacagaatcctgtggaactccaataatttcagagaaaattgaggatacagtatttttaccctctgcacctggaagaacttactgctttattttggtaactaaaaaattaacattaatttacttttgccttgatagtagggtcaaaatcaatgtctatggaagactacctataatagtgactactttaaattcttttctcttcttatcccttataatgatatatccwtactttcaacatgcagatataagcagttctaagtctatgcttcaaattacatgctctggggaaagaattagtaaacaaagatgtcaagaaaatctgaatttattattttcaaattgttcttaagttttatttttagagactatcatttccttatagctactctacaaagagacaagaaaacacttcacagtgaactagcccccctaggaaaaacactgtggagtgaatatttatgttatcaagtagttagaataagtagaggcagataaaaataccctaaacttttatttaaaaccatgcatattaaccccgtgggctttcttgctatccttataaagtcaattatcgctctataggtttttgatttttaatttcagtttattttaaactatattgtatctcttcatattaaaaaattaatcttctcttttactttgtatgttccaccattcctttttaattcatgtcacttttgtactctaaacacagtaggatgctaatttaaaatttgtgaccttaaattcatgtcatttaaatcccccaaatgaatataatgattcatccacttttgtgtttgaaatataatctgccttaaaataaayatgttgctaaagggtaaaacctagtatatgcctcttgattttatgagagcacaagatcaaatcttcattatatttagagcttacactgaagatggaaagctgctttatatgataaagtgagagaaacttatcagtaagtcttcaagcaggagaagatgagatgcgctggrtagccaagagaattttagtaaagtgatggtctgtgttcaatattagcttgtgcactttgctatgatataacagctctccatctaaaacttctgctaacattgcatgtgccttatatgaaattttaggggaaattaaagagactcagtttcacatccaggtcaaagcaatcagagaaaaaggaacatttatggtagttaacacatgaatagaatttggaaatctctagtgcagaagtccaggaccctaagtaatcaggagtgtctagaacccctttaattctcagaaatcttatggggcattggaatttccaatacaatattggatgggtggctggaactctcaaatgcagaaactacactttaggttacttttcttattacacaaacattaaagcaatatttaaaaggtcaatccagtcagaatccaaccaccacagaaattcacagaattatttgcctatgtttccttttatttctaatccgtatgtacacataattttacatggtatagttataattttgttttgattttgtaatcagtgtcaaatcataaacattttaacatgttcattttttgtaggtgcccttataatgactatttgcctaacccttttcttatcttgggtattggattgtacttgagttttcatatatatataaataacacttcaatttaaatatttgtcaaatattttgctttcatcaaataaaaaatggaaataaaaacaagcttatggccgggtacggtggctcacgcctgtaattccagcactttgggaggccgaggcgggtggatcacgaggtcaggagatcgagaccatcctgcctaacacggtgaaaccccgtctctactaaaaatacaaaaaaatagctgggcgtggctagctgggcatggtggcgggcgcctgtagtcccagccactcgggaggctgaggcagaagaatggcgtgaacccagaagggggagcttgcagtgagccgagatcgcgccaatccgctccagcctaggagacagccgcgagactcagtctcaaaaaaaaaaaaaaaaaaaaaaaaaaaaaaaaaaaaaagcttatattgtagagctattgtgaggattaaatgcaaaaaaatgcataacaaagattatgcatagtgtcaatttggaccaatttctagaatctaattattgaccaaaggatatgactatatattctttctgaggctgttgaacgaattactaacttccagagtgttcagctggcaaaataataaaaactggctgtcaatatcttaaacaaaaaaacccaatgctgaagtgatcacttattttaaaaagggcaaaatataattgtcaggcacagtctctcagagcagggaagactgctaatattatagagggctttgaggaagagtgtaattcagttactggttgacttccagaggcgtaagtgtattgacgtcatttgtagaactatggttcttcaggtgagaattcctttgattaatcaacttccagaagtgtgttctttgaagtgagtctttttctgattaactgactttaggaagttagggttataactatttggttgacttgcaaatgcatgttcactgagaggcagagccattaattcttcaactttgtgtaaaatcagttctgatagtttctggaactgtcattgattaagcagttttaaaaccacttctggtgactacttgctaccatagctacagaaaaatatcaatcatttcctaggagcgtggggacattttattctccagctatagttgaaataacttatgagaaaaaaatcacagaggaaatgatggaaaatgccaagggcttttcatgaggaagagggggaaataactagaaacttgtttttaatgcaatcttctgcttgagaaatactgtgtcagtatccaacagtgaaacagatgtggaaaggtagtacccattgaaaagaggagtagaactaggatggaaaggtaagcacattttatgtaagttagttaaattgctaaagaaaacttatttcctattttattgtcaagaaattatataattacacattttgtgggatcacaaatgtctgcttattaaacattttagttcataaggctgcttttctttttttcttttttcttttttttttttttttgagacagagtttggctctgtcgcccaggctggagtgcagtggcacaatctcagctcactgcaagctccgcctcccgggttcacaccattctcctgcctcagtctcctgagtagctggaactaaaggcgcctgccaccacgaccggctaatttttctatttttagtagagacagggtttcaccgagttagccaggatggtctcgatcctctgaccttgtgatcagcccacctcggcctcccaaagtgctgggattacaggcgtgagccactgtgcctgaccaaggctgcttttctctaaatccatgcttacatagattagtgattatctttattttttatttttgtttttttgtttcatttttttgcattttctctctctttaatataaattgtgttcttacttgcttatattccattctagaatggcttctagtctcctcccagaaggctgaccctgccagttctaaatttttttctgactctcatcctcctgaattttgctctcctccatagtcaacaattttgtacgcctccttttctttttttaaatgacattcagtttctgaaatattggcttctctcattatacttccacccccattcttccaccatgcaaaaaataactcttcctctctcttcttttggctaaactttccaaaaagatgtataattttttatttttgaaaaatgtgttagtgacatycgtcctggttaacttattccaaataatgtctctatcttgcattctgtcttactgttctacaacytattccagcaccatcaacagatgactcatttcagcctgacctcatgaaaagagcttgcattctaggttcagacagaataacaagagactcctatttttaccatttgctggctgatgtaatcttacatgagtaatttaagctataggggtctcacctcctttatctgtaaaataggaattctagtacatgggatggtaatgatgatgtaaagaaatcatgtatagaaaacatataaatagcatactctttctacccaggaggagctacataattgttaaatcttgtgtttatttcttattatctcttactatgttgactgttcttccaaattgcataaccaaaagatccatgaggcctaatgtcaaaagctcaatgtctttgtcgtcttatgaggcaagtcagtttatcttatcttgttcatttagggataagaataattccttctctaccttaattacattgtggcaatggcaaattgaaatgtgatattgattacagaagtacttaatcattataataacaataactgttagcattttaaaatctggtattgtctatgtgtaagtcactgtgtcggcacttaataaatgtaagctcagtctttacaattatctaacagggattaatattatttctaatgtttatgtgaggaaactacagctcggcaagatgaagtcgttgggtcaaggatacataggtaggagggaacagggctagaattgaagtcttctgaacctccacctgcaccctcagagccccatgcaacagtgaataatcaaatgcattcagtttcctttcattaaaaatgctacttggccactgcttgaaccatgatccattactacccagctcattttcaaaggatcttgttaactctcctaaaagcattttagagctagatcctgccttcgtttattttcattatagctgctttcttttctatgtcattaattcatgcttctcttttgtaattttactgtcaggttctccaccaagtgctctagggaattaaaaacacatgcacacaatatttaagcttttcagcgagtgaaggttgacctcaattcctgtttttcctccctctttgtgctgtcttcagggttgatatgcctccctcctcttctacccccaatagtgcttaagcctctctcatgtcggcgcaggttaaaactcgtccacagcctctgtatgtttcattagtctgttttacattgctgtaaaggactacctgagatagggtaattgatgaagaaaagaaatttatggtacggcaggctgtacaagaaccatggcaccagtatctgctcagcttctggtgaggtctcaggaagcttttattcatggaggaaggcaaggagagccagtgtgtcacatggcaaaacagggagcaagcaagaagaaagggtgctgggctgttttaaacaaccagctctagagcaagaagtcacacattactgccaggaaggcaccaaacagttcatgagagatctgcccccataaccaaaacacctcccttcaggccccgcctccaacaagatgtcattctttgcttccctaaagttcttaggtcttcaaagcactcactcaacaaagcagaaaactatttataccatagttttgctattctgtagatccaggacatattgcaaattatcaattacatgcaatgagttgttagacttcagtgcattttaaggcaaaggattctctgcctctgcgtcagactaagagattgagttggtctttatatacacaggtttgtaaattcaaactacactttaattcatgttatttactattataaacatacttatttcacctaaatactttcaatggaggtagaggcaatatcatttctktattctttaacttccctgtggagattatagcatggccaggcagtgaatgagaaatataaagtgatgattaaaatggaaatgagccatctgtaataatattaaataattgagcagaaaatttcaatctaagtgtcaaggcttatcaaccaaaataattcatggaaaactattattaagaatggtttcaggttattatttgtctgaggattaataatttcttttgttaaaaactactgtttttttaaacatttattggaggtccaggggtacacgtgcaggtttgttagataggtaaattgcatgtctcaggggtttgatggacagattatttctttacctaagtaataagcagagtatccaataggtagtttttcaatcctcaccctcctcctatcttccaccctcaagtaggccccagtggctggcttttgttcccttctttgtgtacatgtgtactcagtgtttagctcccacttataagtaagaatacatgatacttagtttcttgtttttgcattagtttcttaggacaatagctttcaattccatccatgttgctgcgaagtatgtaatctcattcttttttatggctgcatagtatttccatgttgcatatgtaccacattttctttatccattctatcattgatgagcttttaggtttattccgtgtctttggtattgtgaatagtgctgcagtgaacatacctgtgcatgtgtctttatggtagaattatttatctttgtttagttatatatccagtaatgggattgctgggcttaatggtaattttaagttctttgagaaatccccaaactgctttcaataatggctgaactaatttacatttccatcagcagtgtataagtgttctttctcctcaaccttgccagcatctgttattttttgactttttaatagtagccattctgattggtatgagatggtatctcatggtggttttaatttgcatttctctaatgtgatgttgagcattttttcatatgcttattggccatgtgtatgtcttcttttgaaaagtctatgttcatgtcctttgcccacttttaaaggggttgtttattttttgcctgttaatttgtttaagttcttatagattctggatattagacctttatcagataaatactttttaaatatttttctcctattctatagattttatgtttactctgttgatagtttcttttgctgtgtagaagctctttattttaattagattccacttgtcaatttttgaaactactcttttaaaaaagaaaattgtaaagagctttttaagccaaatttaacaagcaataaacttttaaaattaacagattcaactacctaattatcaaaacttcagtataacagaaaaagatactataaacaaaattaattttgtctttaaatttaaaaatctgggagaaaatgttccccccaaaattagacaaaggcttaattttgtaatatgtaaagagtgttcacaaattaattatccaaaatgccataataaaagaggcaaataaagtatgaatagtcatttcacaaaggaaataaaaattatcccaataaagacaataatgtccaaccttaccaattaattacctgacaaatgcaattttgtggtctaatgggacactttttcatttgtactgtattaaatagttcataacattcatcgttattaagtgttgtggaaaatttgattccaggtgaagcaagttggacccttttggataacatactggtatgttcataaatttggtaatacttacaaaaattttaaaaacatatattgtttgacccagtaattctacctgtggtaatttattcatcaaaaacacttgtatgcaccactaagaagccttcaccaaaatgtttattgcaaatttagaatgacaaagyattaaaaataatcaaaatgtccatcaataggagaaaagtaaaatatataataatatattcttaccaatcagtgctaagcaaccattgaaaataacttggtgaatatataaagacagattaaaatatcaaactaaagggccaggcacagtggctcacacctgtaataccagcactttgaaaggctgagtaggaaggatctcttgagcccaggagttcaagatcagcctgcgcaacatggtgaaacayctccacaaaaaaatacaaatagccaccgggtgtggtrgctcatgcctgtaattccagcactttgggaggccgaggcgggcggatcacaaggtcaggagatcgagaccatcttggctaacacggtgaaaccccgtctctactaaaaatacaaaaaaaaaaaaaaatagctgggcatggtggcgggcgcctgtagtcccagctactggggaggctgaggcaggagaatggcatgaacctgggaggcggagcttgcagtgagccgagatcacgccactgcactccagcctgggcgagagaatgagactctgtctcaaaaaaaaaaaaaaaaaaaaccagccatggtggcatgtgcctgtggtcccagctatccgggaggcagaggtgggagaaggtcacctaagcccagaaagttcgaggcttcgaggctgaagtaagttgcaattgtgccactgcactccaacttgggtgacagagtgagaccctgtctcaaaaaataaaaataaaaaataaaacagcttcaaactattcactataaaaagcaagtctcagaataaaataaacagaagagtctcaattttctcttaaaaatcatatatatgtataaatatatctaaatatatacaaatgtgtataaagttttgaaaaagttctaaaaggatatatgacacactgaaacaaaagtggttacctcttggggaagagaatgggttgaaagagtggcaattggtattaatttggtatttagtattaaaatttggtattaattattttatatacacttgaattatttacattttaataataaaaatatattcttctattacttttatagttcttataagtcatgcaaatacaggtagtataactgaagtgagtaaatgttttcagaaaagatttgatgaattatcagtcaattagtgatagtgttctgaagggtgggcatttttgaacatttttcctgttatgccttgaattttttaattaaatttcaaaaaaattaattttaccacagttgtagggcttagctttggctagaatcaaaattttatataaattacacgtcagttggaaacaaataatcagaacctcctcaataaaataacattgggaggtgggagagggggtacgaatctcagcatggtttttgggagataaattttttaactttatatttgaaaagtactttttatttgacaagtaaaaagaaaaagaatcttagacaaggcagtatgagaaaaattaattttaaaaataaatttaagaaaggaaaataagttaaaatttgactttctctgctatgagagatagttgttatgtaattttataaatattataagaaacttcacctgtcttcatgtattaaataagatgaagtaaaaatgtaacctggtgtgaatgctaatgtcacattaataatgccattagttatattctctccccaccrtcatcttgaatgtctcagtgacacaataacatgggctccatttagtgctttaaaaattaaattaactcccatccttttttgaaaatatctctctaaaaagcagagacattgttcttggacattaaagaaattctgtagattaactgcaattmatgagcctgagtgaaactttcaagcactttgatcattgctataatwatgaatacccaacctgtttttacatattatttttaaakgttacaaaagtaattctttttcctccttcaagataatacagtaaaatttgttttctttgacacaattttaattgaactacatacacatgttttccaacttagtttggcaatagaaaaagtgatcattattcttctgactcattctaaaactcttacaatgtacgaggaaactcttggagctttgcttttctctttactgtggcagtgcaaacttattgcttgctmctctgcagctatttctgaactcaagttattttagaaattcttcaaaatttaacattttctcctgatccttkttgaggaatcagtacaccatagtggtcgtccctgcttataagacggggttaataatattaccacctacactgttggtttgagaatgacacaagatggtgtgtatttgttatgtgcaggacccactacctggcttgtatggaggagccctttctaaataagtactgctagcattattttttcttctatgagttcctatttctcttttactctaaattatcatcacaataggctatacattatttattttccaaaataaatgttatggtaactacctgcatgaagaaaagtgaaaaaaaatagaacatattatgaatgactatttctgaaaattcaactatctagcattgtacaaataacaccttgacgagtagcttgatttttctcattttcaacttattttttctttccttctctttccatatttatattgtaagtggttgccagcactgaccaatgcagttatccagactacaaatgtagtgttgtcatactcctccaaacacacacatacacacgaacacacacacctttgtttcaaatcgtcaaccttaatcataattgtttaagcaaaaggaggaatgcaggctacaaatccctatctctgagaagaaagttttatagacagcttattcgcattctactgcttctagaccttcagaggaaatatgtgcttgttccataacctcagaatgctttagggaatcccagcttccacgttcattcagtgattcttctgggagtcattctcataagtaccccaaagaaattgagattgagaaaagatttcctataactttgcagacattatggaaaccaaaagaagtatcctttttttcttcacctggtatacaacaaatttattgcctcttctcaaataagtaaaccatttctctaacatgtggagaggaattagggaaggggaggtgatctaaaatttactaaattgcctaaaacatgtcagtaaattacaagagttatttttcctatcatcacagttctatgaagaggatattatagtcttcatttctcatatgaacgagtctcagagaagttaaagattttcctgagtcccagcatgaaatgcagaagatgcaaatggtgccatttatcaattgcatttcttcctgtctctctacaaaatgcccacgttacccatgatacattgttttttctcatcctaacatttacatcactagatattggaacaaaatcaaaagtcatttgtttttgatattatttgtttttttaataaatgctaatactttatgggagataggaattcttttccactccatgaaactttttattagtactcaacatcattccagaaaactgaccgaaaaacaaaggttgaaagaacatatgtgtctgctgttccatttctaaaaggctttataagctgctcctgaaaatgatcaaaatgtcagtgtttctgcccccagtagaacgcatcctctctggtttcagctgcaggttagtcattactgtgtgtaagcatgcattccacagcagaatcatgagggtttggataatagaggaaggttaattagactgtagtaagtacataatwtagaggaatatttttcttcacaaaaaagctgaaaattgtccctggactgacaccaaaagagaaagggcgacaattttgggggacttgttagcactaagctacatacattttgccagacatttataggtactcaactttattatgctttcttatgttctgtttttggtgatttagacacattcattctttatatgagaaaatattttataatgtgttttgatatactgtaatgtaatttgtgctaaaatgtaaaaagcatataacagttcctataagctttcctaaaacatttatgaagtataattgcccaagcaaaaaaactatttgcagacttttagtctaacattcaaagcaaatacacaaaaagcatattattctgttcacttcagaggactttatgtatctatagccatttatttatttatttatttatwatttcaataggttttggggaacagatggtgtttggttacatggatatgttctttagtggtggtttctgagatcttgttgcatccatcacctgagtagtgtacactgtacccaatgtgtagtcttttatccctcatccccctcccaccctttccctggagtccccagagcacttttttaaaaataataataacaacaatattcttgtcttttagggaaggtatggaccatttgtatgcgtgtgtactgggtaataatataaaatgtatttcttactgtgggtctaaactaaatgtcattgccaaaaaaggaaaaaaatagccctagaaaggtggaacttttaagaaattttccataaccagaagccacttctgtggtgcttcacttacatcactgaaagcagctaggagtagaatacagggatgaagtaaaaccaaaaaaaggaaaacagtagagaaatcattgtgaacatctgagtaatcaattggttattttttgaataataagacagatcttataattcagctaataaatattgggttcagacctcagctctacaactggttggttagggaaccctgaccaaaattatttaactacactaggttccacattctcatctataaaatgaggatgaaactaccctctgtctcctcaggcagttaattaaattaaggtgtgtaattcatacattgaacttactgccacacatggaataaattttcagtaattgtaaactattcggttaacccctctcctggagggattacaaagtgttaatttacagactaacctaaagtgtttttgttttgcatgtttgtatagtatactttgctaaaattacttgctaaattastagactctcaagtaaataataaattttgctttttatcttcaaagatatattatttatttgtaaggtcttatgattttctaactatcgaataaggatagtttcactttgtttaatgttttactayaggatgttaatagttaaggtaagtaggcataatttttttaatgatttcaaagagatatccttaagtacttctttttttgactcctaagtatagaagcccacaaaatatgatgacaaggttttcagacacatgagtttgggaatgagttaaatgagaaaaataaagagaagatatgtgaacaaatagaaaaaaattaataaaatagttttctgttgtagaattaatacatgttcattataaaaatttaggtaatagccaaagataaatagaataatattactatttagatgtatatgtttcaaatgcatttgctgtgcacatatacagctaataacatttttttcacaaaatgaaatcataccatacataattttataacttccttttgtcctgtgactatatcatggatgttttctatgtcaacacatataagtcaataatactgtttttaagagcagtataatattccattctttgtttggatcataattttttaaccaattacttattcaggaacatttatctaatatctgatatttagaaattgcaaacaatgctctattgttttataaaactctctgtgtccttctccaaatatttcaatatgataaatttctccttcagttcataaaagtaatcaccaattactgaatgctatttgacaattatagtgttaaaattttatatacactatttcatgggactattacaataattattacaataatcccaygaaacagatacatcattaactacattttaccaaatagtgcaactgaaaattaataaagttgaataattttccaaaagtccacagaaagcaggaattataaccaggaacaactgattccaaaactcatgtgtataaccactacactatactacttctctcgtgtagtatagtttgaatattttaattttttattagtcttacttagtttccagataatttaaattattttttgataaataatagaaattctactttgcaggaccaacttcaatgtatttgtcctcggtcccccatgaattgtctaatatgtaaacttgtcaagtagctgcatgacacattcaaattacctggcatttcaaaaaggtgcaggttgctgtattgcttcattgcaaagttaaggagtaacatgttgcttggaaagaaaattactctttcaatgactttattgaatgtcacataatatgaatgggagacaatgtggaagwtaaattatcatgtgtattatggatgatatttttttctatacaatcttacaaaagctgaggtgtgtatagtataatcaaatgttagtatatgtacagtacatacttatctataaacacacacatacatgagggacatttggttcaccaaaaatttgtgccagtagaggtatttctttagttactgcttattattattttgaacaatattgtagcctcagacaatgtcctattggaattagaaatgaatgagyactacttattgggcccaagagaaaggtgttaaagaaggaatggcaaggtttgcaccttagtgccaatactcaaactgctttaggctggaaaccagttggccagccaatttaattattcttcaccatgattcaacataaaaggaaataatgagcattgggaatataataatattatggatgctaagtatactgcataaagacatgcrcagcaaatgcaaaactgccagtttcaggaaaaaaaaggtaccgggggagaaagaagtgggaggggagttgctgttcaatgggtataaagtttctgttgtagaagacgaatgagttctaaatatttggtgtacaacattgtgctaatagtgaacaaatactgyattgtgtacttaaaaatttgatraaggttagatcttattacatgttcttaccacaattttttaaaaatataaagtagaaggaatggtgcttttgaaataagaaagtgggaaacaaacatttctttccaagaccaacactgtcatctctgtgatttcaagtggctttctcaagcagcatatcttagtgatatattcgatatctagtatagcctgaatcaattacccattgccaaagaaatgacttttctgagatgaaggtaatagacttcyttagcaagatcaaaaggaartcatgtaaaagagctgatggcttatagattgactttttccaatccttaatgattgcctttatctcctacttgcctgagaaatatattgatggggtatcagtgggcatattttaaaatcacatccatatattgcattagatcattaagaaatgcatttgaggaaaatgtcaccaagagtaattagaaagtcatttgtcttgacttcctcatacttgagtgagtagaataatttaaccttttagctttgagcatgatatgttgatatgtgatggggcaccaaaagttagattcaatgagaaatatctcagtattcaaaactatctaaagaggttctgaatgcttcctgaaaatcttgacagatacaattaaaagttttgacttaattttactaagaaatgaactcattatgcttaggtcagatataaacagcatcatccttcttgcagttatgagctaatttatgcttattatattttatctttatattttagttataataaacattttaatgtacctaacattggcaatccttttgaatactatgtatccattgagtgatcagcagatacagaaagacttatatcatgcttaggaatatcttcttcacagcatttgtatgttatcacaatgctttttatgcacagaagagagcaaattttattccaaagaaatgtagtcataagtgtggtaaagctctgtgtttgagagggtagcagcattgtgggatttaaaacaatagcagaaaaaaaataattrcgaggctactctcaaaccaaatgccattctcaaacaaatttcacaaataacaaatttgatataacttttagtatcccttaagaatatcaacttttaatgacttatgaatcagacttgatatttacagcatgcagactgcattcccccaaatagaataggatacgagaaaatggaaacctttagacagaatttataaatctttgacatttaccttttcttgtcttccatatacatatcaaataaaaatttagattcatggttatctgagatctgtcagcaaatatttatcaagaacttattaattccaggcatattatgaggtgctgtaaggcatggaaaccatgagacacaacagtgaagtgttttaaaaagcaaaagaatgggagcctaccaaaagaaaaaaatatgagccaaccaaaagagcccccaatggccaattttgagtaacgcataaaggagtaatttgataaacaaaataaatattgcagtattatattatactccagtgtagagaatgaatatccatgagtgcatagttatataaataaatgattaaatacataaatgagggagaaaggcagatgtgtcatacagaagaattcccaacaagttatgtggatacttcaccctcaagtagaagcataaattccaagtccataattgtgagctgcacataataacctcctcccaaatagtacagtatagaaatggagaaaaagaggaactttacagtggagaaacctgataaacattgcctcagcaaggtgataacacttaacatcaagagtggtaagttgtattaacagccaataataacttgatatgatgtgatgagaatgacatttcacctctttttttctagcaacacaaaacagagggaaaaagaaaaactaagaaaataagtaaaaaagaaaatatgaataaaatattgggtttagtgaataataatatattaatattgactcattagttttgatgaaagaaccatagtaatataagaagttaaaaatagagggaactggatttggaacatacaacaactttctctactctctctgtaaatttcctgtacatctaaaactattctgaaattaagagtttatttaaaagttacatattaaggkatgcctgaaggtttagtctaagagggcatatggaacatcccacttatgactaaaagtaggcaaacctgtctctatgtgcttataactgctcatctgttgaattgctggattgttccatgtttattattttgatggacattgtacatactctcccatattcatattgcttctttcagtgacaagctactaaaaggcataaaccctagttctgagttactcatgccctctcttgattaaaaaatagggcagcaatggttttccaagacagagctgggttttctatatctttggagaaaatgactttgcaaacaaagaaagaggaattgtaagtctttggatgaatgagtcaggatgatcttagcaaaggtaagggcaatttttgcttggtttttattgtttactctttcttttatgcacttctatttttttctttgttttactgtaaaaatagatcaggacgctgacaaagaaaaattatggctttccaaaaaaggatatgtgcaggaatattcttgaataaaagagcacaagcacctatgtgttccttgcttttttttttttttgacacttcaattttgcagggaaagtgaaattaaaaatggcacttcttcatgcaaaaaagagagcaaaagctcttagcacagatggttagcaacaaggttgaggacacaattaacagtctgaaattatatcatcgtatagtctgtcagcaacttcgaagctgggcagcagcatccaggacttaattggctttattaataaggcatcctttcatttcctttctgtctaactcttatgtcacttgtcaccataacagattttttttaagtatctgcaaatgaatttgatcccaaaagcttatcttttctgcagcatgtgtyatttcttttaaaatagaagtttctcttgaacttctacttaaacttagtatggagctttcaggtaaaactctcaaacaaaaagtgtttgacaccagcaaggcagagatcacccttttggaaaaatatatcaactacttattgattgccttaaatacagataatgcaaatctcaatttaatctccatgttttaaaaaaaatgaccagcagatagaaattaacattacaggtgtatattggtccattttcatactgctatgaagaaacaccagagactgggtaatttataaggagaaagcaagttagttacttcctagataaaatgggggtacaggcattgtgtaaatatacctgttccaagtgggagaaaatggccaaaatgaagggcctgcaggccccatgcaattctgaaattcaacaggrcagtcaaatcttaaagcttcgaaagacctcctttgactccatgtctcaaatccaggtcatactgatgcaagaggtgagttcccacggtcttgggaagctctgcccctgtgtctttgcagggtacagatccctcctggctgttttcatgctctggtgttgagtgcctgcagcttttccagccacatggtgcaagctgttsgtatatctattattctgcagtctggaggacggtggcctccttctcacagctccactaggcagtgccccagtggggacactctgtgtgggggttctcaccccacattttccttctgcatcatcctagcagaggctctccatgaccctccgcccctgcagcaaacttctgcctggacatccaggcatttccatacatcctctgaaatctagttggaggttcccaaccctcaattcttgacttctgtgcacccacaggctcaacaccatgtgtaagctgccaaggtttggagcttgcaccctctgaagcaacagcctgagttgtacagtggccccttttaaccatggctggagctgaagcagctgagatgcagggggcaccatgtcctgaggctgcatagagtggggcctccatgcctgtgattggaggggggctgctgtgaaggtctctgacatgccctgaagacattttgtccattgtcttggtgattaatatttggcttctcattacttatgcaaatttatacagctagcttgaatttctacccccaaaatggggttttcttttctatcacattatcaggctgcaaatttttcaaacttttatactmtacttcctcttgcatgctttgccacctagaaatttcttcctccagataccctaaattatctctcttaagttcaaagttttacagatctgtagagcaggggcaaaataccaccagtatctttgcatagcaagaatgacctttactccagttcccaacgagttcctcatctccatatgacaccaccgmagcctggactttactgtccatatcactattcagcattttggccaaagccatttaagtctctaggaagtctcaaactttcccacatcttactgtcttctgagccttccaagtctataggacgtyacaaactttccaacatcttcctgtcttcttctgagacctccaaactattccaacctctgcctgttgcccagttccaaagtcgcttccacattttcaggtatctttatagcagcacctgtagcagtaaactggtaccaatttactgtattagtccattttcacactgctatgaaraaatacctgagacggggcaatttataaagaaaaagaggtttaattgacttacagttccacatggctggggaggccttacaaacatggcagaaggtgaaggaggagcaaaggcacatcttacatggtggcaggcaaaagaacgtatgcaagagaactgccctttataaaaccatcagatctcatgagacttatttgctgtcacaagaacaacacaggaaaacccatccttatgattcaattacctcagttacctcctactgcatccccctcatgacatgctgagattatgatctactctcaccactgagaatattcatattcttcaatcataatgttcaaatatctaaagtatgtcatgcattacatacctaaaatcttcacagaaatgcagttacatttgaatgataaacatttgttttatgttatattgaccttagaactaggtaataattaaaacaaacacttcagtttctgggttgtaaagaggagttttgatagaatattcaatttttgctaaatatagccagacatgggattgttttcatttctttgactaaaattaatgagatttttgaaattatctcaaaggcattatgtttgtgacaagttatctataacacaatatggaagctatcctttaatgataagtttcttctgaaatgtatttttattactgtttttatacttttacaatattaatcttaatgataaaatctagacagaatatataggyttttgtatcatttttccaaagtttggaatactactagttatcagagatttttattagctattctatgaataaagaaaaagcattccacaatcaaataagtttcagaaatgtttcctattacagtcctctctgtatytttctattagcacacaaaatgktttggtaagtcctgtaaaaaagactctgaatcaggtgagatgcaggagaatgaaaagcctcaagggagaatgaggaaattaaagcaagaaagtggaggggtccagggggatcagagaagctggggtttaggtcaaaagagaggaaggtggagcagcatagcagtctaaggctgaacagaaaggagaaggcagatattcacagasgcttgcactttgtgtaatgagctagaacagtgggaatagaaaatataatgaattaactcacttcaaaattttaaagagaactcaagaattatgttgcaagctgagaatccagggattgtgggagatctggggaatgtgacagtgataagtcagtccttgctagggcttatcccactggcacagtactacttctccagattctggctgttgcctttgagattttcctagctaaggtttgcctacttttcttgactacagtttaaaatttctctcttcttgtctgctgtgtactcatcttccaattctaattttatctcttctccattttacatcccagccttctgaagtgattacttagtccaaacacacctataaaatatgtgtatattggtgaaaatacattttaatggcagtatcaggagtaagaccaacagcttacacactgggatgttttgctcgtgaatattgctaagaaactgtacaattcttttaaaacctaataatttcagaggttgaacagggtatagaaatatggcaaagaaaatcaatcccatttaaattttctagtcctaaggcaaatttctaggtcctgaagttcatcagtacagctgctttttgtattaacaagcgataagtgatactaaagataagagtaatctcatatcttgagaaatactcaattttattccttctggctataaatggaaaaaaaaatgaagcacaatccagtyatgaatactggtctgggccagcagaggtctgggctatgtcagtgtcagatctaaagtggtaactggagagacaaagctggtgcatcttgccaaaagtgaacaagaggccaaataccagaagatctataaaagaagaaaatgatcagaatccggacagacttcaatgaagtgctattcaaaggttcatcattaactaasatagcacaactaagtgaatctgatcctacatcagaggctgtctcttcrctctcttttgtgtgtgtcccacccccacctgagaagttcatttttttctgtatgcagwtctattatgaggtcagtattgcaggttgttaacaaaattttcagagagaaatagctaatagaaggatcatgatatattattttgtttatgcttaaaaatattttttaaattataaggagtagtatttatatacaaacacttttggacactgcattttatgctaatataggtttcttatttttttaacccaagaaagagcatatagtggagaatatacataggattatcaagattttattataattataaaataaagtcatagcaacatataattttaaaaactatttttatgtagattatatcatgggtatcttcataaaagcctgtggttttgataaggtagatattttgtctacatttcagaaataaagagaaataaaatcttagtgaactttagggttgctgtggtctgaatgtttgcgcccctctcaaaattcctacgttgaaaacctcatcaccaatactatacaattaggtagaagaggtgattaggtcaggagggtggaacccttgttactggtattagagcccttataaaagaagctctaaagagctgcctcacccctttctgccatgtgatgacacagtgagaagatggccctcaccagatacctaatctgttggcaccttgatcttggacttccctgcttccaaaataatgagacataaattttggttgtttctaagacattcagttcttggtgtttgttacacagtccgaaaggactaagacaagagttttttgcttagtggcataactcatcaatgtcatggctagatagcagatagttcatatggttccttccttcattcattccttctttccttttttccttccatccttcctttctttcatctcctcctccttctttctctctctcckttcctcccatcccctcccttttctcctttccttcttcttatttttaatataccctttccccatatctcaacccccaattattagaaataccacatcctcaatacatgtgtgttaggcacagggtcatttggaactgtttactaccagtatttgtccaaaaagattattttaaaatataaaaatataaaatcgttgggtggattgaaattttagataagatggctgagtcactgtttgtttgcacagaggtaagtgggaatgtactatcttgaargaagctaggagggagtcatataacagaggatagagaaatgcccatttaaataatttaagcagattgcccttgcttattccacaccacccaactgcttttaatttttaccacttggaaataggtaatgctggttgtgtacttagaaagccccaattcagcaagtgaagagataagtcttcccagataaaatagtgaactgtaccccttaatccctgtgctcttcctctccaaactggctctcctgtttaccctgctcttgttcagaactctctcttggatatgttttctcgacatggaggcttcagctgcacacactcatatacgtagagtaatgcaaacttgtttgttatatcatctgtgactcctgcttttgggggaagttagtttctaaatcctttttcttccttagtgattttttttccaattagttgaacgaatgatggtatttgtttgcagcttccagtgttgcccataaagaagagtagttattcatttagggaaattgcttgatcartgctatgcagggccattatatcttctttgtgctggtaggagaaaagagtgatattctagattgaaacaactggaaaaacagattgctgaattaggagtgaagatataattagatgcaccctacaataattggatagaattgaaagcatttaagtctgtacataatcaaatattgcctggaaatgctacagcatcttcattttatgctaaacagatttttatggaagggctataaaggaggaaatctgcttgctaatttgattaaaaacaccatggatctccgtgatttcagctattaagattccaaatgggaggaggctaattataaaagaaaataagaaattgatttcatctttaagatctattatcaaacattgcatagtttaagtggaattattcataacaaagatgcacttcaataattgctctaagaatagatatattcttagttccattttaaactgaaaggaatctaaagaaaaaacaacactgtatcatcagtatttatgggagaggtattttattaaccacataagcccattttactgaaaagaaaacaaattaaaagaatatcacttgctgaaaactatcctcaaacacagatatgtagtgtctcataacttaagaactgtattcattctctgtttatactatttaatttctgtattatatcatagctattagtagacacatcctttttgtcttattattattattctttattatttatttatttgtttgtttgtttgagatggagtcttgctctgtcacccaggctggagtgcagtggcacratctcggctcactgcaagctccatctcctgggttcacgccattctcctgccttagcctcctgagtagctgggactacaggtgcccgctgccaatcccagataatttttttgtatttttagtagaaacggggtttcaccgtgttagctaggatggtctcgatctcctgaccgtgatccgcccgcctcggcctcccaaagtgctgggattacaggattgagccactgtgcccagtcttgtcttattatttattcatccattaaacagacattactgagcagctactatgtagcagccagtgtttcaggcacagaggatacagcagagaatgaaggagacaaaatttcctaccatcaagaatcttgcattctgtttggaaaggggtaaagtaaaagataaataagtatgatgtatagtgtgttggatagtaatgaatgctaaagaagataaatatgaagtggaagggtaagattatttttgagagaatggtcaaagaaggcctcattgtggaaacttgagtaaagatttgaatgaagtgaaggagctgaccatgctgatatcttaagaaagcctccagacagatgtgcaaaggcctgaggcaggctgcgcacggcttgttggggcaacagcaagaaatgatgttgatagagtacatctaggcaggggctggggagaaggccttcacaggttgtaggtcacraggtctcagtawggattttgatttctattttaatttattttatttctttgcatttcatttttttgaggtaaggtctcactctgtcatccaggctggcatgaccactgctcactgcagcctcaacctcccaggttgaggtcctcctacctcagcttcccaagtatctgggactacaggcatatgacaccatccccactaattatttgtagagatagtctcattatgttgccagggctggtctcgaactcctgggctccagggaccccacctaaacctcccagagtgttgggattataggcatgagctaccacactgggccagattttgactccaaagtgagatgggaaggagtggtagcactgaacagaagagacatgatctaccttattttatcagacatgagcttctcaactgcaggggctactctgggccatgcagctttgtaaaaatgatctaagtgatatcctattctatctactgggctgcagatagctgaagaacatttctatctactttataatttagtacacagtcaatcctggaaagtatttattaatgatgctggttaccttttaaacacaaaatttaaaatgtgggcctaatttaaacataaaaataaaaaatgttcaaacgacaaaggaaaatctgaggggttatatctttttagtctagtttaaatgcctgtacttcccaggaatttaataatttggtaagttaaaaaaaactttttattcatcatgcatatggtaaatgttatttgcttttcctttttagaactacatttaaagagaaataaattaattctggagtgccactttgtcacagaaagaaggcaaagggatatctccaaatttctagtttatgtaccttctcattcttttccatgttaccagaaaacagtattactacttggtgaaagttttgttttattgtaaaatggtaaaatgcagtttaaatttatttcaaaagatgaatccaggagccagctgaatatgctcatgggtctgctcaagccaaggttttattgctgctaattgacaagcccaattgtacaacaccaaatttggaactgaaaattccctgtctttgaatagctgtaatttaatcaagcttgctttagctcctttattatatcataatgaaatataaaataccttacacacaaatgcttctctttcagaaattaaatagaaagcaaagatttaacaggccaagagtaacaatcagtgcaaacacaattaccttctcacatacaggataaagcaactctccccctttttgtcatccaatatcatagtagcacgatcttttctccctacctgtcyaattttttttttatttttctttttttttttttcttgagatggagtctcactctgtcgcccaggctggagtgcagtggcctgatttcggctcactgcaacctccaccttctgggttcaagcgattctcctgcctcagcttccgagtagctgggattacaggtgcacgccaccatacccggctaatttttgcatttttagtggatggagtagggtggggtttcaccgtattggccaggctggtctggaactcctgacttcaggtgatccgcctgcctcagcctcccaaaatgctgggattataggcatgagccactgcacctggtcccaaattttcattatcctcatgtttgtcctaaagcaaaagaaaaagatgagcaactgtggaaaatgaaaataccaaagcttggtgtgttttctgagaaaacttaagcttcargatacttataactgtagttattaaacccaaagagagaagtaagtcttcttcatatatctagaagcaatgtgaacatttgccactagtaggatctagagtgaagatttcttaactcttcatcctttcyrtgctaattgaatgatgaagaccctaggagtttttcaaaaaatctcatacagagtgctaacacatcacttgatgacatccagccatgacggattcaggcttgcataaataatctgcaggagttctttgaatatatcacagccacactagataaaagatgatctgggactacgatatagttaatatttcagaaaaaaaagtgcatttgatatggttctgcatcagagataaaggtaaaagaaccaccgaacatgggataaagagtaccgaagcgaaaattagttttagaaacactacaaagcaaagactttaaaagcaacttttatgttggaaagaaaaaaaaaaattgaaactgggcagcccatgtgcaattaattgaagtccagtccttccttaaaaacgctttctaacacaccaaatatctcacaaagctgatggtgactaaaagtctttccaacagtttagtgcaatagacttatcactaagcttggaatgtaaaaatctaagttctagctgattaaatgatcttgagtaattagcactcagggtctcagattccaacctacagaataggaaattgggtctagaaagattgccaaagtccctcctatctccacaactatttgattctaacagctccacgtagctctggggaatttaatcatcaagcaagtttctccattaaggtggataattaaaatgagggagtactctgtaatgcatcaaaacagattcagattgctggctttttcaaatttacagtttcgctttcagtaaaaattacatggtataatcagtcgagctgtggaaatgggctctgaaggctattgattcctgagttcttgatactttcattgaccctatcaaaacacttaaatgttccaaagcctggagtggccctggagaagcccaagttgtaacaattttgtactgcctgaggtttatattactccagagagtatgtattttgtaatagggttgaaaagacagtaaaatttttaaaaagtggccactcctatagtagtgtagatacatgaacatttaaccaaatgtattgcctttattctgagtctgtacatgcgcagaaatcccagcaaaatgttctctaactagtcttatgtgaccctggcttaaaatgtgggctgttagacttttaactacttgaggccaggcacagtggttcacatttgcaatcccagcactttgggaggcagaggtgggcagatcacctgaggtcaggagttcgagaccagcttggccaatatggtgaaaccttgtctctaactaaaaatacaaaaattagccaggtgtggtgccatgtgcctgtaatcccagctactcaggaggctgaggcaggagaactgcttgaactcgggaagtggaggttgcagtgagccgtgagccaagattctgccactgtaccgcagcctgggcaacacagtgagactccaaaaaaaaaaaaatttttttttgaactacttgaaaataatagactgcttttattatgtacagagtcagtattccatgcaattttgttgaattaaatttaattcttctatcaccagagagcattttttttaaatgaagaacatgattactaatttagatgacatgtaaccaagtttaaggcagacaaaaaaaaaagtctctattagaaactacaatggaacattatggggataaaatgaaaatattaacttaaaattcattcctccatcccttttagcccaaatgagtgaataattttaaaacctgaaacaaatgttttctcagtataacccttctagagaagtactgcaatttcactaaatcacagaactcccattgccttagatcaggagtgtgtatattatcagcatcaaacaaaactcaattatttgtaattgtcagcagagctgagaataaaccttattgaagcatgaacactgtgagaaaaaatatatctgtgcattccatcaaaagcaagcatttctttgcctgaatttttaaaaattgttttatttataattattgtagatatataatagttgtacatatttatgtatatgtgatgtttggatacagtatacagtgtgtaatgatcaaatcagggtaattgaggtatccatcaccttaagcttttatcatttctttgtgttaggaacatttcaattccactcttttagttattttgaaatatacaataagttattgttaactatagtcaccctattgtgccaccaaacactagattttactctatctaattgtattttcatactcattaaccctcccctctttaccccccttctccattacccttcccagcctgtggtaaccatcattctattctctataatttgtaataattatacttctagagcaaaagataaactctgcctacctgggtcttgattctcttaggasggataagtcatgtccaagaatagaatacaaaaagagaaaatggtgtcagtagtatggtgttatactggtgtgctatactaaatggtgtcygtttcaggtaaaatgacattagaattcagaatgaaggagtgattccagctggagcaattaggaatcagggaagtcattgtaaacaaagtggcatttttgatagacctggactttaaaatatggaaattagtgcagagcgtgatgaatccagcattctgaggaaaaaggaaaaggagaaggaggtgtgaggcaccaactgaaaagaggacttgatcttcctgagcctctagtgtgtgaaagagaacaatgggctgtgaggggctagatggtgcaaagctttggaggcctgatgtgcactttaatcatcaggcttggaccaggtacagagggttttaagaaggagaatgacagaaccagagctgtgcttttggagatttattctggcagcagtgtgtaggatggattgaaggaggtgatgccagctcaggctcaacaatttcttaaagtggagaaaaggcacagttgcagtagagactaatccacgtgccactaaaaattgccctgtgttccatctgcagcaccaatgtgaagactgttcacctctttccagaataccgtggatctgtgaacagttaaaacctattacatgagctgtgtggagctgacctgataggaataattataatgaaaggtttatatcattccctaggactgggggtaagggcaatataacactctaacactcctactttgttcctgttttagcttttgaagttttataatagcaagttacttgatttgtcttgagatttgagctgtatcactgatataagctttctaattatctttatcaacgtggctacggcaaggaaaagtgtgattccacaatttagatttgcagataccaaatagaatgctaattgatactttggaaatatgattttcaaacttagcagagtgggtaacaccaagaaaaatgttttaacctgaagtcattttgaaggctaaaatacactttaaatttaaactgaaagggaaagtgaggagaaccctgcttgaggctttaattctttgattaaacttgatagtgggttatctttagggtaacttctacttcaatatgagcctcattccatgggccaggccattataattatgtataatagaattttttttccaaaatacattacaatatctgaagaagataatcacattgtaacagagagaaatgaaaatctgtcaaagagaatgaagaaattatacttgcctttcttgtccttggtgcctaaagtgaaatgaaattgttttcctgttatcaggccaagtgcagacatactttaagggaccagccttctttaaagattktatcaggtagagacatcagttctgccttcctccttgcttcagggcactgcaaatggcttcagagtacatctatatgctagttcactggaaggaatcgttgttccaaagttttgcagaacaaaactcccctaaattctcaagagaccagttccacaaagctgtgagctgagttttgttatattcagattcactatccatatctctcatgagctctgagtttcagctacgatattttgaacctaaggaatactttaccctttctttttctccaggaagcaacgatccagtataaaaggagttatataatcaagacataactgtgagctttgaaactattttaatcatcagagcctgcttcttaccataaaacgatttctcaagctccataatttgggatagaaaacaatggcaatcttgaagaaataccagcaaggacattagagagatgaagtagagaagcattcaaaatgggatcagaggatgcatctattcacaggyccacctgatgccagggcttgtagaaaaaaatttagagatatatttagagccattgaaactgttcccatttttacatagggagagatcagcattatattttgagaaaccayagggaaggagcctgtctttyaaagtctggtgctacccaggattctgtctttgatcataggcttatctaatgggtcatatcttactctgtcatagtttttacctattacacgctgtatatgctggtaacatccaagtctaaaaatccagcccagacataatccctgrggttcagatttgaagatctgtgtaatgacctagatttatatgtggatatcgctcccacrggcatctggcacccaccctgtcttctagagtacccctcatagcactccttgtattgagttctaagtgcttatgtcactgcctatctcttccactggaccaaaagtactgggaaggtcagggtgaggtctgttttgttcataattaaaagccttgctcctggtacacggcaactgctcaataaatattttttgaataaatgaatcattggagtggggcttgaaaaatctggataattataattttataaaatgtccttttaacacaatctgctctccagcccctaccatttaagataaagggactgcattaggacttacttaagtgcctgtctacttagggtcacagcacactgattctctatgtagtcattttggactatgatttgttgtaagactttgcctacgaatattctgccaagtacaaataatttaatacgattgaccattcagttgataaagttgtaaatagataattattgcttttcagaagaaagttgctaaaaatgcatatatattcaaagcaatacctgagaagcataacataaaaagcgtttgcattcccacgaacacggttcagttaaagctgagctttgcctcacagaggataggcaaactgcatctgggaaccttcyrggaaaactacagaaatccaattaggaacagtcctaaatggactcagaatgtttaggtatgatagagaaaccagtaattcttctcatcagtaaaagtaatgaagtgcctttaaaaacatccttccatttctcctgcttaataagtagatataaaattggggtacttacaaaaaktatttaaytgtcataggtagttggcaagayaaatttttaagaatccaaatttggtaaagaaatacatataaacaacttttgaagagcatcagaaattgaacagcctatcagaccatctgggactgtattcccttcatctcatctggatgtgctctgtgcccctccctgagccagctgcttcatttttccctatcctcttgtccttaaaatcacaaaaggacattacacattaactgatgccttgcactaatttatatttgggggatattggaaaaactaacacttcttctaagtgtgcaggattctcttgagtagacaatgtgagaaaaagttacaaatacttttcaggtctcttcccaagtatgaaattgagaaatattctgaaaaatcagagtcagactgattttggttagraaatacaaatcctatgatttctgctacaatggtatctgaatcaagataatgaccattragtctcagacctttacaaaggtcttcagtcaggcgagacaaaaacattaatttgttaaatgagactatgggaaatactaccaacctcctgagatctctcatttatcactttgtcatgaatctcacctctccagtttccttacagttttcaattatggatgctagaatcactgctgtcatttaaaaaaattagaatgtctttatttctttataccatttgcattttaatttcctgcccctttcagagacatttcttttgctaagtaatggccagcagccaatctcaatctggagaggaaatgattaaaatcttaattctcctggagggggagctactatatttatcttttgtttctggatttgatcatcagactgtatgtttctgccacattaacctcattttagcagtagttttcaatatgagtgagaggaaaaagtagaagagatgttttcaatccaatggttaatctgtttgacacaacatttgcttcctcataatgggtgatgrtagtttatattactctttaaatcagagctcaacacatgtttatagtatcaaattaataatattcactgtgctccttaaagttggatattagcaaaagtgatagaaatacatgagcacagagtagcaaaatcattttcacaaatggtgatctgttaatgttgagtttttagttcttcttattccctttrgtcatttatatagtcaaattatctggtctaattttatttttaaaaatyatgatttttcttakattccaacagtaatataaaagcaaacaaacagtacttagttactttttacttgttagttgaaaattataaggcataaaagtaaacatgtttttacttttttgtaaagtaagattgtgtgagacagaatgtacatcttaaactctctcaaggaaagtaaatgtattaatttaagagttcagaggttagtggactctgggtatrgtctgatcaagtcactcagttttttacaattctactggctcttttatattccatgaaaagcttcattctgtgacttaactttttttgtgcctgcaaacagtgattgcatttgtaagtatcacatcttcctataatattgtccaattataaaaagaatgtcttagattaagtaaaaagataactacctttttaccaatagtcaaaaatttttggcttcatcttgtttgaaccaaagtatttcatgtgaacacttctgaaccaatcaatgtaactgacaactcctgtatatgcagattggaagataggcataggcagtggattaggtttcatggactggggtcagtccttcaaagtgcttgctgctgtgcaataggagaggggcacagcacatgctgaggaggcaatgacagtccctgcagttacccaaactttcttaacatttcaggtggctctcaaatcacaaaagcattctctctagctcacagaaaaatgacccccaatcagcagagcaaagattctctcaattctacagcagtcaaggtttacttccctataatgcctgcctttttttgaatgctcttagcaagctttatagcaattttaaaatctgattctttgaaatccagaaagttactaattgggagttagaaggggtaaaaaaaacgctcagtgtcaaaagatttattgtaaaaggtctttcttgtctttttgggaggggagagagtgttatggtctgaaatgtgttctcaaattcatgtcgaagtcccaatctccagtatgtttttggagataaggtctttaaagaagtgattaggttaaaataaggcctttagtgtttggccctaatctaaaatgactgatgtccctataagaaaagcaagagctggagatcgagactatcctggctaacatggtgaaaccccgtctctactaaaaatacaaaaaattagctgggcgtggtggcaggtgcctgtagtcctagctgcttgggaggctgaggaaggagaatggtgtgaacctgggaggcggagcttgcagtgagccgagatcgtgccactgcactccagcctgggygacagagtgagactccgtttaaaaaaaaaaraaagaaagaaagaaaaagaaaagaaagaaaagaaaagcaagagctaccagaggtgagagcacacaaaggaatgaccaagtgaagaggcagcaatagggcagccatctgcaagccaagaaagagtytcagaaggacctaaccctcctgaccccttgatcttggacttccagcctctagaactgtgaggaaataaatttctgctgcttaatctacccagtttgtggtattttgttatggcatccctagcaaactaatacagaatggtggtttgtttgctttttgttaacttttcttttggaggttataaaaccaactgcttcttccaacattttaatttagggttttgttgcagtaggagactttatttcatagaagtaatagttattttgctgatgttcaaaggatgcttctggtactcggtgaggttgatgcatttctcttcaccagtgaagtctaatgctataggaaagttttcaaatttcacactggtccctgtaattttccttccaactggcaaatactttgaggatgacagctgtgagccagtgcaactatcaccatggtctgtttctaatttttttgttggtgtttatgaacacaacttttccccttggagcctttggttcattgctggtgatgaaggattttatctccttagctcatctaggtctgggttcttgtcttgtctcatgaccaggaaaaatcaggcacgtggacactcraagagtgagtggagtagaatgtattaagtgaaaaggaaagctctcagcaaaaaggggcatcctgaaagcaggttgccagttttccttcgcagtacaagggcttatatatatataagctgatggagctgggttccctatttgtataaggcataaattccaggtggctctgccccattccccctagcgtgcatgtggacccttaatcttctccgggcatgtttaggcaagcctrctgtacaagttcccttatctgcacaaaatatctggtgtaggcacttgtgggttaggtcggatgttttccagggacccttcccttactgtctgcctaaagcaagctggctaactcctttcactggttttgaaggtttttgttgttatttttctaagcactcttttcattttatttcaccataaatccagttcttacaaggtataaatgaaatatctcctttttaatgtgtgctgaggtttggaactcaaatgtacaaattatgactgcctatacataaaaaacagaagcatgttaccatgaaatgaaataatgggcagacaatgttagtttgaaatgttctttttcccctccattcctattaaatttgtgttggttctttgttagatgaaagagaaagaaataaagtgcaatgcttttgcctaaaagcctatccccaaaggaattgagttaactgtacctagccccagagaaagacatgaaactatgactggctaaaaaggctaactaagatgtgtgtttttctaggatttcttcttatattctttgagtctatgtaatatgatcagtaccttcactttcgttttctcttgtaattatgaaacgagtgtgacaattctgcccatgacacctcagagtctgttaccaaagtcactgaaaacatcacaaaggaggaccttgagctcctcagaatatgttaaataagtattaaatgyggtaaactgtaaagattctctgtcttttcataatctttttattattttggtgagtttagttttgtgtttttcctttggaagagaatgcctaataaaatgagttgaggaatgtacactgagttagagtgaacaatactcctggatttgggagtgtttattttagttataaagaaagttccagtttagaatttattctagacaaataatgacatttgaaggcaaccatggttttaatggttctctgaatcaagcaaaarcaatgtaggaaaatttaaacatctaaccctcagaaatgccaatgaagactataaaactaattcagttaatgatttcaaaatcttatttgacatgttttataaaacaggaataaaaccattcctcagtaggaactactcagtcctgcaattrtaatttgaatcaatatcatattaatatagagcaacactgccttgcatttttttctctgttgattcaaaaatcacttgtcttcaaatctactcctgtctgttctttagagacaggctcatttttgcttaaagatatgatgcaaatgaaaggaatacatttgtaaaaatgtgatttctctagctccttattttttctctaactctataattttacttgtaaatatcaattatattatccagtcttaaagaatcactaatagaacaagcattattagaaaagataattagataaggcctcaacaatgatgacttttaattagcacttttgcaatatgatgttctgaagaaaatatgattagtggttactataatgtttacaatgtcatttacctgaactttacatttgtgtcatttttgtagataaataaagggacacactctcaaagactccatttctgatttttatatttttaaaacaaggtgatggtttaatggtctttaattcatttcatatcataatggacagatggtggacaaggattttccccactgtgcaggtgtatgatgttaaaccaataaacactatacaaagtaagttaaattttctataatatatatgatatgtgtgtatgtatgtgtgtgtatttcctgagacttactaagatattttattaagacaagttattcttcaggagcattttagaaatgtgaaatattaatccatttgaatttatgatttgacaaggggagttattaacttctttcagatggaaaccgttttgcaacagggcaaaacagattggtccctaatttcttaatcactyctttggtgattcgaaggacagacactcattaatcagctctcagataagaaacttgctctgttgttttaatgatcaagtattctggagagacttaaagaatctccaaccatctcttcygcttccataatattagatttgttgcttcatcmcccaaattgcccatgactttcttctataccataaatgactaaaattgaaactcttgcttctttttcctgaatcaacctcttaggcttgaatcctcagaactttaacatcatttgttaaattatttttaagcacttgcttgcagattttctgctgcgtccgtgttgttgatgggattgatgttgatcaatgtaaaggtaaaggtcaatgttcaggtaaatgacattgtaaacattatagtaaccactaatcatattttcttcagaacatcatattgcaaaagtgctgtttaaaagtcatcactgttgaggccttatctaattatcttttctaataatgcttcttctattagtgattcttaaagactggataatataattgatatttacaagtaaaattttagagttagagaaaataaagagctacagaaatcgtatttttacaaatgtattcctttcatttgcatcatatctttaagcaaaaatgagcctgtctctaaagaaaagacaggagtagatgtgaagacaagtgatttttgaatcaacagagaaaaaaatgttgatcccatcaacaacagggatgcaggaattgatgttgatccctctgaatgatgatatactattaagttgagccaaagaacaaaaaaattaagagcatcctttctctataacttccttccaaaaatcaaagaatgaaataagacatgagaaattagaacataaattattaagatgggttctacaagaccaaatgtattggtagacctagatgtctgtaaaatgatttaaaaatgtgtaatttgtagaaatatctccccaaataagctttcagaaccaggctaattacactgactaaatctttttgacttgttttctttcactcacataaggtctgcctatggtgtttcaaagcccccttcatgctttcaactgtttctgctggagccaggatccaagttccattcatttagctcccattttagtccttagaatggtatttaataactgttaaaaatgattgaatgaatcaagcactataattttatatatgtctcatatcaacaggattctaaacacrttgattattttagcagtagatgtaataaactgtcttgataaactgcatcactgatccatgctttattagtgacaaagttaaccatgtcaacttttagttatggccacagctactttctgctattctactttatattcattgattataccttgaatataatttttcattagcttaaatttatattatcaamgaaacaagaaattaattaggctgacagataaaatcagaggatagaagaattatcaggacacttgttagttacattaagataaaacgttttagacttttgcccatacagacattttgrttgagcttttaaaaatactgccattccctgtgtttccaacttaaagatggctcaaaccttaaaccactaatttaatttttggcacactgaataaaaactgggaattccgaaatctgtgccaatgatggtattgtggctctgatgaagagtcaggggaaagagtggggaggaaactgtgagtaaagttctcaaatgcccaatcatttcagcacctcataatttgtgctgatgaaaaataccacagttatgctgcccgagtttgcagaataaatagctttgatttccattactatccatgtttctatttgaataacaaagacttgctttacctgatttgaagaatagtcactctggtcaatctggtgaaacaattggtaagtgtagttgacataatatgcatgaacgctttttaaaaagtaagtgctataaagactcaaggaattatttattaaattgttatatataatgataaaaacttatccaacttgaagattcattaaattgttccaaataagtcaaaaaatgtggaaaagagaagctaataatagatattgatgactttcacaaattcgctatcatagataactagctcttatctatggaaataggctttggtgataacatggaaaaatgaaaatgcagatctatgtatgaattaattttgataaaaatataatctttttacaaagcaaaattatcacatttggatttttctctactatttcttattatgtacttaaagtagtagaaataacaataatgagaaggtgctaatgattaagagagagagtatgggtgayggacagaaataatgaaagacaatattctgtttttaaactatgattttgaaaacgtgaattgtaattactggataacatcmatctacttctatagggtaaattaagatgggttatattccttagtagaggaaaatctagattcattttgtaacacaagagtagaaacagtaattggcacaagaccaagctcaaggaaaagactttatagctagaaatttgctatcatctgaatgtttatatctgccccaaatttatatgtcaaaacttaatccyaaatgtgatgatattaagaggtggggtcattggtgggtgattagatcatgagtacagagctctcctggatgggataagtgccyttataaaataggctcaaggaacatcattggccccttccaccatgagccgatacagttagaagatgtcctctttgaggaacaggcgctcctcagacaccaaatctgccagcaccttaatcttggactttccagccttcagagctgtgagaaataaatatttgttgtttatgagccacacagtttattatatgttgttgtaacagcctgactgaactaagacrgaaacatagatacagataaatatagatataggtaragacagatagatagatagataaccaagttgattttgacatcttttgaagaatttaaatagtttcagtgttagaggtgactgcctgaatgtggatgtgaatatctacagaccacacaaatacttacgggatctaaaatacagtttcacacttttaactatcctctgaatttacattttctgttcaataaaagctgtattatacattatgcagatatttaaatcagtacctataacttctgcattattaatatgtgaatgccaratatccaaaaaaatacatccacttcactttgccttttaccatgggatgtgaaaaagtgataatcaccattccaagaatttctactagtggattttgacttctttcctctttgtatttcagtttgggaaatttctaatgacatatcttcaaactcattgattctttctttatctgtgtccagtctactgatgaactcatcaaaggcatttttgcatttctgttacagtggttttgatctttaccatttcctctttattccttcttagcactttcatttttctgcttaaatttttcatctgttcttgcgtgttttccatagagcccttaacatattcatcattgttattttaaattctgtctgttaattccaaaayctgtgtcatatctgagtctagttctgatgcgtgctttttctcttcaaaacatgttattttgttgttgctttttagcattcctcttattttattgatatttttacttgagatgtaatcattgtacatatttatgaaatacagcataatatttcagtaggtatgtcatgtgtcaaatcagggtaattagcatatctatcacttcaaatacacactcataatttccttgtgttggaaacattcaaaatcctctcttctaggtattggaaaatatactaaattattgttacctatagttaacctacagactatgaatgccagcacttatacttccccatctaactgtaaccttaccctttccagtctctagtaactactattctactcctttgtaattttttgttgaaagccagaaggagtgtatcagttgaaatgaactgaagtaaataggccctaaaaataatctaactcctagccagactaacataaaaccacacattaatgtttaatgattgttatagtagtatatgtcagagaccaacgttaactagtgtccttgttttgtctccactgttgtttttgtgcttccttaacaattcttccttaaatagagcctacatctggcattctttgcgttgtaattcactgctgtcatactggagcccttttggcctgccattaatgtgtacgtggtagagaggtattctttaatcttacgattaggtcattcaggaaggctagaagatgttagggaatgcctttcctgtaggccagataaggctgaggtaaagtcttttcccttgcagtggaggcctttgtcatggagattgctccaggtgtatttcacaaaggttattttcctctccctctctcagagcctggagaggattttggctcttcattgtgagattcatttggaaatcccaagaaaatgtgagaggtcctccaagactgcatcctttacaagtttctcactctcatcctagttcacaatcagcttcaacaattcatgaaagttactaatttaaatgttcctaccagtttctggctcaaagaaaagtgattaattacaagttgttcttctgtttccttgtttcaaagacagcagtaactacttccaagctctttttttttttttttttgaaaacgagagtcttgctatgtttaccagtgttaaagcaaactamatatggcctgagaaggactccatacttctatatttgagttattgcggatgaactgtaacctagcttaataggcagacaagattgaaaatctaacttaagagtatgtgcctgtaacagtagctgagctgagccttggccaatcccagtggccatacttcaaccactcatagactgctaagtgttcaaactgtgttcaaataaggcaaacaccaacctgtaaccaatccagctgtttctgtacctcaccgccgatttccttttttttgtctataaattagttctgaccatgaagcatccctggagtctcactcaatctgctgtgattctgggggttgcctgatttgtgaatcattcattgctcaattaaactcctttaaatttaatttggctgaagtttctcttttaacaccagacctcaagtattcctcccttttcagcctcttaagtagctaggattacaggcacaagccactgtgcccagctaagcactttacattttgtagctaaaaccagaatttccatatgtggctatttaaatttaaattgtaaaccaaaaagtacctgagacaaatctcgatcaatttaggagtttattttgccaaggttaataacatgcctgtgacacaacctcaggagatcctgacaacatatgcccaaggtggtcaggctacagtttggctttatacattttagggagacatatgacatcaatcaatacatgtaaaatgtgctttggttcaggatgcagaaccgcagtgcaactctatgttggggatgggggttggccctccaggtcttaggtgtattcaaagattttctgaatagcaattggatgaaagagtttctctaaagacctggaatcaatagaagggagtttctgggttaagataaacagttttggagatcaaggttctttttttttttttttttttttgagacggagtcttgctctctttcgcccaggccggagtgcagtggcgcgatctcagctcactgcaacctccgcctcctgggttcacgccattctcctgcctcagcctcctgagtagctgggactacaggcgcctgccaccgctcccggctaattttttatatttgtagcagagatggggtttcaccgtgttagccaggatggtctcaacctcctgacctcgtgatccacccaccttggcctcccaaagtgctaggattacaggcgtgagccacattattccaggtagcaggcttcagaaagaatagactgtaaaagcttcttatcagacctgaagagtctgctctgtcagtcttaagatcgcagttttaatgttaatgttggtcagctatgcccaaattccaaagaaaggaaggtaaaatgaggcatgtctgaccactcattcccatcatggcctgaactcgtgtttctggtttattttagaatgtccttgtccaagaggagggatccattcagttggttggggacgcttagaattttatttttggtttccaaaactatgtaaagttaagtaaaatttaaaagtttgtttcttggtcacactagccatatttcagatgttcaatagccatgtatggctagtggtttctgtatgagacagtggtttctgtatgaacatttccatcattacaggaatttctattagtcagagatgggctagaggaattctctaaagaaatctcatggggcaactagaatcacaagacaaaatgggtcagtatraagtaagatcttttagagtgatgtaagtctttgtctcagattcactaaatgatgagagaaaattcacaatagaggataactagagttgactcacaggcygggagtggtggttcacacctgtaatcccagcactttgggaggctgaggccagcggatcacctgaggtcaggagttcgagaccagcctgacaaacatggagaaaccccgtctctactaaaaatacaaaattagccggtcgtgatggtgggcacctgtaatcccagctattcgggaggctgaggcaggggaattgcttgaaccagggaggtggaagttgcagtgagccaagatcacaccactgcactccagcctgggtgacagagcgagactccatctcaaaaagaaaaaaaaagagtcgattcacaatagtcttcagttataaagataaaaagtgatctctcctttattatagcaattagccctaggttaaaaaaaaaaaaaagacccaacccaatgcaaagacctttatattttcataatatagctaaagccaaacttggattttctgcaagtgactgtcacttgtgcatttaaaacttgagtctcgctctgtcatctgtcacccaggctggaatgcagtggcgtgatctcggctcactgcaacctccacctcccaggctcaagccattcttgtgcctcagcctccgaaatagctgggattacaggtgtgcaccaccatgcctggttaatttttgtatttttagtcgagacggagttttgccatgttgcccaggctggtcttggactcttgacctcaagtgatccaccagcctcaacctcccagagtgctgggattacaggtgtgaggcaccacacttggccttgtttttatattattctgtatatttttcctgtcagacaaaggtctgagaattagctactaaaattctagcttcggcttgtggttttgagtgtgtaaaaaaatcccccaaggacatatggtgattcagccccaggaattatttaatttcaaaagcatataatctaaaataaaagtaaaaatttttaaaacaaaagagagagagagagcacacacacaattcacttgcttcagaaacaataaaaaaaaaagaaaatgagatcttctgtacttttaatattaaagaacgtcatataagtgtcaggcttaatggctgaaatctttcaggtaattatactgccaggacagttaaatatgataatgtaatgttagacctgagaagcatagtaatgttggcatagtctatacattgtcagttgttcaaacattatcttactagtgtaatacagcagttaaaaatatctttttatttttttcttaataatgttatatataactgtatttaaaaatgccaatatgctgctctgagttcctcacrggagccacaagtttttactttgaacaatstgttttttaaattgaaggttaaaattagaggtttatcattttgcctttgatcttttacttttatcagaaagtaagcgccattaattctggaatgccattggttgaagaaaataaaatatttcctatactttttttaaaatgtgacatttggacaaaatgtgatacttattagtaagaggcaataaatgtatgtygcactacatagttgcccctcagtatcccttggggcttggtttaaggatctcccactgatataaaaatctatgcatgctcaagagtctgatgtaaaatggtatagtttttgtcattgtatacattgtactatttgtatataacccctgcacatcctcccatactctttaaatcatctttagattacttatcatacccaacaccatgtaaatgctatgtgaatagttgtcatactgcatcatttagggaataatgataaggaaaaaaagtttgtagatgttcattcagtacagatgcattttttaaaaaatattctcaatccaccgtcagttgaatccatggatgcaaaaccatggatacaggggtttgactgtacattaactttgtaactttttactctctgattaaatgctttcattactgagacttcctaaaataaattcctgaaaatgtaaaatggttattttaagtttgagagaagcaatgtaattaagaataatttaaagtctatttctgggactggaagttattggatgtgatccttaatccctaataagcaactatgtatcttcaaatattgaaaattgaaaataataataaagatcttgaaaatgtctaaatcaaatgccttggccaacctgatggcaaatatgtgtagaaatcaataaagccaataatgagcaaagatgcaaagaaggaaacaacagtaatatcataagatctccctccacttgcagcatcacaaggtggaggggtaatatggaaattgcaaatatagctaatgtttattaatcatttacacgtaccaggcaccaaactaattattcattcattcactcaacaaacatttatgaagcacttactgtgtgccagaaaatgtctagacatgtgggacacttcagatgagcaaagcagacaaggatttctgtcctcttgtagtttctattttagtagaagccacataaataagtaaataatgatgtcaaaagtactaaggataataaaaagagtagagtaaggaattcagagggtgccaagtagaggagactagttgcaacttgaaatctatgggcctcattgagaaggtaacttttgaacaaaagtgtgggagagaagagtgctccaggtagagacaatagcttgtacgtgacctagggtggagagtgctactgtgctcaagatgctacatggaagccactgtggccataaacgagtggccagggaactgggggaaaagagaatgaagaagaggtcagagaagtcactgaaggcgagactataaatataagttgaagatagagccaactgtatttcctgctaattggatacacacgcaagagaaggagtggagtccaccatatatcccaagattatagcttgagcaactgaaaggatgaaattgccatcaggtaagatagagaaagaaacaagtggagaagactgggtagaacattgaatttcaatttttcttttatctgaaaataaatttgagatttgatgagctttatttgatgatttttcatgaatttgagatgtctgtgggaagtccaratggaaggatcaagcaggcatcttgatatatgagtctagagttcaggagtgatctgctctggagatacataattggtaactttgcacatatatgtggaacaaaattgggtgtgtgaaccaggtactaaggtctgggacacctgaaccttgactgataaagaagaatgggagttaccaagaacggagcagagaaagagtgatcagaaagggagaaaactaagagaaggtggcatcttgacctaagagcagaaagtatatgaaggacaagggaagaaagcaatcacatcaaacaccattcgtaagtaaaggaagagtgaataagatgaagactgagaattgaccattaaacttgggaaatagaagagtttcatgaagtagcaagggaaaatggctgattagaaggtatgtaataggaatagaagtagaaaaagtgaagaaagtgaacatgtagacaattagttcagagwgttttgctgcaaagtgaaatacaagagtaaatcagtagatggcagggaagtggagtcaagagaagtttgatgacttattttaagatgagagatatctttgtattgtgatgggaataatcccacagaaagtgaaaaaaataaatgataacagaagggggctcaatattttttaatagtcaagaggtgatgggacttactgtacaaatcaaggaattggctctcataggaataaagcttatcctacctatcgcaacaggcaggaaagcatggcatatgggtacagatgctgctaggtctgaacagaagggagtagaagcatatatgtggaataaaagtgggttgacgttctgttctttacatatatcattagcagtcaacatgcccagcaactggggaaaccaatgagtaccaaggcgctgaaggagggagctgggtgatgccctacactgtccactacagtgacttaccaagtagtgagtaactaatctgctgatgggcaatttaatattgcctacagaaattctgatgaatatgaagcaaatacgctgatattaattctaacttcaaagtaagctgggctgatgatttcagttgtattttacattcatttcccaattaaatacagtaaaataatgtcattatcatggaggataaggttatttgagagttcagtgaaatcttgcaaataaagaactcagcatagttatggcacatagtaagtactcaatgaatctcaggtataagttaaatgaaacaatcataattctcagaaagtaacaatttatttttcattattgctaggtgtggagggagtggttttgttgctaatagtgttttgtttttatattgggggaggtctcgactgaagatcagaattagacttatctctcaggaaaaagttttatttattggtgatgtgtataatcattttaaatgtaagtctttcgctctttaggttttttaaaatcaaagaactattctaaagtacttcggcagtataattaagcctttgtttctctcttattcaaatctcttttaaatgctctgtgtttaccaaatttctctcttttgctccttaaaattgtttattattttgactcatttggcgaaatttaaagaaataatttttctccttttgaaaagaaaggtaaattaatttcttatggcaaagatgagtgagaggttaattttgccaaccaaagaaatttggagaaaacttgagtgagtgatttctttcattagcctgtgaacaggttatttatttcacatgtaattataaaacaagtaattctgaataaaaccaaccctgaaaacaaataggactcatttgcagttctaactgaattagatactgaaaaatgcttgcattctgatatgttttgaaaagtctaatgaaattataaatataatatttcagagaaggaaatgtgcagagacagcataacaagaagctcaatttcactttgccattcgaaacttttcttacctataagttggtgatgtgaaataattcaggaaaattgagtttcaacccaaatatcatgaggttgctaagtatatgtagtttataatgtgcacagtaggtcaaatcgatattgtgatccttagagttaaatgttttattggataaatgcagaaacccaagtttgactctaacagaagtttaaaataagttataaataagatttaatgttaacagcagggattttttctaaccataaactgaaaaatatacccatattaataagttaggattatgtacaacaatatatcaaaatcaaactgtccttttttttcttccaaaagaatagccaatgaactagttagagctagttaaaccagaataaaatccctttcacacacacacacacacacacacacaattgaatagtaataaaataagaaaataatgttactgtcacttagaatcattgccttctaggttgaaaacaatggttttcctatgatatcttcataagttaatacaaatcaataaagtatataataatgacaaaagaaccactgtcctggtattagaaagaaatatctttttctaactctccattcatacaacatattttaaaccctggagaatgggacatttggggrttgtgctctgagtcaagtagaaattcaaagaaaattccagtgataaaacaaactgtcccactttctctaagttactcataacagtgatttagtacataaatgaagtaactgtctacacttttgaggacaacatgtagttcactcattctgcttttttccccctttctttccctacattctcactgtttcagctgtagtacttttgaaagcagggtctgagacaaagacttgattgccaatcatttggaggagcatacaatcctaagaaacagaagtgcagaacagggcaagtgaaaatgaaaaggggcaataactgattccagaatgcattttcaagttggcaaccaaacaggtgactgagactcaagcccatggcacattctgaggaggcttcagagctgttttcctggaggatgaaagatgaaagcatttatctgtcagttccaacccgcatttggatgagagtgactcctcagacattaactgccctgctcttctgggttgctcatgcatgagtacgttgcaggagctcaataatgttcttcactcaaggcagtaagcagttggcttgtagcccaagaaaaggcactgttgggttccaactgccacagctagtggagggctgaatggaggccatcacaccacataaacaggggctggagttcccagtaaggcttagagaatggtgaaatgggacacaatagttgtctgagacgctcttcctcctcttgtaatctagactccttcaagctcctccacttatggctcacaaacattttgcttttgttgctccgtgcataccaaggtgattttatctcaatgcatgactcttatttttctggagcaggataaaaacaaaatagtgatatctttaacctaaagtatgtaaaaattctaaacagcagctttagaaagggcccatgcagcaaaactttraatccttctaccttattcaagactttccatcacctcatgggatttctactcttggttcccttcattcatcctaaccctaacccttaagttagtcaagtgtcctgaaacaccatcctacccgcatcttgaattacctagcagaataaagaatttgtctaatatgtaagaccttttatggttcactactgttttacaattcttatggtagaatgtatttcctccaaacatcagtgtcttagttcaggctgctgtaacaaattatcatagactgggagacttaaaccacagaaatttatttctaagagttccaggggctggaagttcaagatcagggtgtgagcttgttcaggttctggtgaaggatctcttctgtttgtatcctcacatggtggaaagagttcctgggatccttatcacaaggcactaattctatttatggragagggggcttcattctcaggacctaatgaattccccaaatcccaacctcctaataccaaaacactgggggtcaggatttcaacatataaatttgggagagcgggacacaaacattcagtccattgtaatctgcgtgagctaacttgaatgaaaaatttcttttaacatttttgttggaaacattgacatttacaaccatatacatttttcatatcattttatttttgccaaaatgcttagtaatgattctacatgggtctgaatacaatttcaggtgattgttgttacatctttttggaaatcattgctaccacacttgagagatgtttagtttattagatacttgacccctgtaaatttttgcccctttctaggaaattagggtcttagtagagtgtgggtttctacatcataccaccagtgtttagagattgctgccaaaagtcaagacaaggaggaaaggaagcccgttattgaaaaaaaaaactggacaaacactaaaagtttaaggctgacgagtagcagcaaacaaacaggttcttcatcaaaacaaaagattgtctgcacaatacattgacaaacatgcacaaaattctcatttgtccaaaaagattggcactttggaggacaaaataaagagatagggttctcaatcttgaagggagcactttatactctgaggacataagagagccatgtacaaacatttacataacttagaattaggtgtgaaggttccctgtaccattgaaaaaattttaaaaacagaaacatttttataaggctggagtcaaaatgaatggttttatggatttagaggaagacttgtagaaaatgggaggtttgaatttgggctggtggaaaaggccagaaaatgcatttcttgtgaggaatagtatatgagtaattacacagacacacattattctgtccagtcacaatggcatttttccatttccctgagttcctctctgctgatttttcttcagatatttgaggtgctggctcccacttgtcatttaagtcttsccttaagaatgcctgtgtcatcttacttatgtagacactagtctctctgtagaattatgccttattttattttcctcaaaggacttgccttaactgatattgtcttgtttactttcttgtgtttattttgtctgccattctccactaaaatgttagctacatgagagaagagaacttttccatctttacctgctgttcaacagcaatttgaacagtactcaacataaagttcacgactgatcatatttcttggataagttggagaatgtatcacacatcgtcatatgaccttgcctcttccatggcaagaattgggccttcagtatgttcttttctcactctctctattaactagaggtttccttgattcatattcttttttcatttaaactctattcaacaaaaaaaagaaaaaactggtgactattttatcagataaaatactcttacatctgtcttataaaggtaagaatttggcaagatgaaacatcttgtcttttatatttacaatatgctaaatatgataattcaaaatgtattatggacatttaaaataaaaatcacacaaatttttttttctctaatactgtctatctcctaagatctgctgctatcttcttacagctttgctaaaagagttttgaattttaaattaaatgtgacagccatattgttgtcattaaaattttctattaaaaaaccattttgcataacaaaatagttaataatttatttgtgttgattgttttttagtttttataaaaaggaatgtgaaattttattatatgaatcaagattaagaaaaatacaagaagtatttaggacttctaaaatgaggaatttgctccactggttgagacaggaaataagcaatcctgtggcccagtaattccttcatgggttttgcagtcacagaccacttcaagccctactttagaaattcacaagcaacactttaaagagatgtgattaaataaatacaracttttcaccactcctgtaaaatgactcaaaattaatgtcctaacaattccagctttgtatttaagggcagcacattattatagagatgttaaagaaacttagattattattaaagaaatgtgaactgaggattactaataactgttttcaagcatataaaaagtgctgtaaaaatggttgaccagatgttttccatctacatggggacagaatcaaattaaatgatggcaaattataataagaaagaagtaaattacacctaaaaataaaaaaacatccccactggataagattatagattggcacagtcatctttcaccagttaagtacagcaatacttgcaggcagagaatgaagagacaatacctaccaggatttttcttctggcagaaatagacacaggggtctctaaataagaggctcactattaccacgataacaaaatacacacattatggtcttgtttgcccccagttcatcattgtgcttttatttggaaccaggaaaagaaacaataaagtgaactgagaaagtgtgactaggttagaaaggttgaagaagatggaaataaatgaaggaagataagaatgcacagttaggaagtaaataatagtaaactcaaagactttttcaatacataacagttctgaagtcctaaactgatgacctagaaaacatcacaaaccaaagctccttgaaattcaatgcaatccatttcatatatgtgcatttagaaaaaatcatcagattctaaagcattcatctatcccaaaggggtggctgacttcaaaaagtttcaggatcttagactaaacattgctgtggactaaataatagtgttgctattccgatcacgattttaccttaataattaggcattagctagattgaagactttttttttttttcctggagctggactgagaaaatgtcctcagcaagatatcaagtgtctttcaagaactatttaaagctaaaggaatatcttgtggctcccagttaccagacattacagtttaggagagaaatgttggagctcattaaagagaaagaaacagtgcttctccaagtccatggccccgtcacctgcttctccttcccagtagaacatttagctctgtctttactgagtaaaggtaaggctttgtatttttgtttcctatctgtctcattccatcttttatctcaacaaaatacatccccaatactacattgtctgctaataaatgtgtaagctatatggtcactttgaaagaaacagagaaaaattaatggtctcgatgctaaatatataaatcaaataccaaatattatacctattcggtggctagctgtgatacttatgtaaatacaaatgccatggggcacctagtttaatgtagatttaataggcatgtacattgaaaatatagagtttcttgtttaaaactactctgcccttctacctgagcctcaaatattatgaaaaaataagtaaatgaatgcacattacactttaaaataaattttacctggtgctataaaccagcgattgcaaactttctatagggggccagagagcaaatattttaggctatgtgggccattcagtctgtaatggttaattttagatgtcaacttaatgagattaagggatacccagatagatggtaaagcattgtttctggggatgtctgttttgagggtgttttcagaagagactggcttttcatcaatggattcagtaaggaagatctgctctcaccaacgtgactgggcactaacaaatttgctgagggcccagacagaacaaaaagcagaggaaagaagaattcactctctctctctcccttctggagctgagacawtcagcttctcctgcttttggacatcagaactccaggatctccagccttcagactccagggcttgcgccccttccctctctaccttcagccttggaccgagagttacatggcccactccctggttctcaggctttgcacttggactgagccacactattggtttccctggttctccagcctgtggacctcatactgtgggatttcagccctccataatcacataagccaactcctctagttaatcccctcctatttatatctctctacatttataaaatatgtatttgaaatattttatatcatataatatacaatgatatataatatatgttatatttatatatatcctattggttctgtttctatgggaaaccctaatatgcagtctatgttgcaactactcaactctgtcattgtagcacaaaagcagtcatagacaatgtagaaaagggtaaatctggctgttttccagtaaaatattatttaaaaattaggcagcagctggatttggccaccaggcttatagtttgctgactgtggatttaaacagttcctttgggaaattttgctttttcattcgcccagatattctctcctttcacctatttttcttgcccagttgaaattcaagagaatgagtagaggcatcttctcatctgctaacctcagggccatgcttcctggctccttgcttctggcttgccctgctggctttggttctgcggccgggataatttgtaatctgggactctccaggaagggcactatgtggagctgcctggctgtcttggttctcctcagctcctttggcgctatgacttttcaggggtctggctgtgactgccgcttagtcttaggctctgcaggtcccacagctacttcatcacattatggcaatcccctctgacaagctttccagctgcatctacatcccacccatactatacataaaacaagggcaatttggagaactgtctcaagatctcaggtgtctgactatactgttggctgttcccatggtttgtgagaggccacttctatctcctttaaatattaccctaaattatgtgatactcctcacttagatcaaacccagagaacttccctcaatcctaaatcttgatatgtttaaaagcattaaaatttttttctctaaaaacaattgagtttgtatcttttactatatgtcagaaggtgaaaattacagtcttctttctcttcttagtccttctctaataaatctgaatttacttatcctacccacccccaaggtaaaatagatgacaagccagctaggataaaggtcatgcattgagaaagttcagaaaggaaaataatgtagttacatgttatgttaaatttcccctacaacagtcctcctagataggtattgttatactcatctagaaatgaaaaaattaaggttcacagaatttgctaaataaagcttgaccacctgctatataaaaaaacagaaaacctatctgtttctgactacactcctaattctcattcaaccacaattcctggaagacaggaagttaactccyggtaaagagcatggtttgtgttccagccccaaagcctccaaataaatgaacttctctccacctttgcatggaatcactgggattaaatgaggtaagtatagcaacagctatctttcatccagcccctgggtaagtcaggcagtttctaaacatttagatatattatctcatttaattctcaaaacaatcctataaggtattaaaattattatcatttttttacttaatgttactaaggtcctcaatatagagtctgccacatagtaaatgcttagtaagaactagttattcttaaaattattactcttccattagaattacaccaaccaataatatttatacagacatctttttccccagagcagaagcagtctttgataggcagcctttgtttgctcatactgtgaggaactcccattcttaaaaggactaaaagagcatcacacttaagaacaaattctggggtccacctacactgccattctcctcagctcccatgatgccagactttgctgggtgcagaggcccagaacataatggcagtgttggaagcaggaaaaagataggaaaggatgtgtaccaggatggccaagacaagccactgggtcaattcaatatccaggcacgatttttcccttttgaatttacatttgtttaagttttaatcctaacccacttgatgaattcaatttgaattcattttgaattcttaatatcacaacgtatttcctcattttatgaaaaggggagacactgtattatggaagaagtcttggcccagaagctaatatatgtggtttgtcatttctattgtgccactaaatatgtgatattagcactaatcgaaattttatgtatctatttgaaaatacaatcaaactatataataaggctataagactagatgttcataaagatacctcccagagaaaaattgtcttttgaatattttctattrtcctcggctcaaatgctaatgagtctcttcgtctttrgtcaacataagacttgaaattgtttccattggcaaccacctcacaattattagttaaagagaaaccagctctaggctttgaataatccatcatttttagaattatttatgggtttcaattcctcatttgattttctttttamctgaaatataaatggaaggaatatgaactgtagtatctaagggtcttctttacctatcattatgttaatcatttaatataataaacacagagatatccacttcccatctcccttttgcactgtgccaatatttgcttcacatcagcattcactatttgcaatccataaaatcacatggtgaaaaaaaatatgtcctttttctttaaggatctcattaatactttgatttcacagttatcaactacaaaaaaaaamaccttttgtagtttctgtcattttgggatttcgaaagaatctgggtcttattttataccacaagaagcagaaacctcattctctcaatgcaatgaaattgttatagctgtaaatatatagttattgggatcttaggtatagtcatcccgtattgtatatgaccatagaagattcgtccttcttcattccaaacaaaccaagaaaaaaactatcaggttagaatgtttgattgaactttcatgcattcattttttatatttatttgttcaatacatatttactcatttagtagatatttatgtctcctgtgtaccagaaattgtgctaagtacaaagaatagaaagtcaaaacaaatttggttcatgcctccatggagcttatggtttaataggggagaaacacaggcaaatcaattatagtgtcattataatgcaagtgctatgtcaaagagatgcacarcagctatgggagcacagaggaggaacatctttcttactaagacaaaatctttcaaaggtatttattattcaacaggatttatatgttactttaacaattttttttgcttatgcattatttaagagggatactattcaaaacactatgttacataaatacatgaacttaaaaatatttagtgaacatttgttatatgcaaagttttggttaagttaccttgctggctgaaagaaaagatggaattcttatacataagaacaataaaaattaagaaaatgataatgagtgaaaatcacttattcccaaagagaacacctgaaaaaaaaatatgttttcagaaattgaaggtcaaagaggggcaaagtacatcagagaaaatgagtttcttaatctcgtacagccagatttgcctactgaacacacagcttatgacaaaataattgtgcagtaattactctaaaagatgagacaaaatcaagttaaaatggagcaaattgccttttgcattgtggccaatgacaattagtgacacattcatgctgtaaaataccactttctttttgtgagaggtgacctattgctcgatggttaagtaactaggttacttcatggaaaatcttctgcaatcctgtctctcagaggaaatgcaaagtttattattgctactgctttggtggcaatttcatattcaataatgaaacaagtatacatcttaagtcatgcaagtgtaagtgcaacaatttttcccggtcatgtttactgagtgtttgctatgtccagggactatcccaggttacttacatgtatcaattcattttacatgcacaaatctagcatagtggcatttttctcagtttttagatgaataactgagacatggaaggttggggatgttgcccaaaagtttcacagagagccagatgtagatccatgatttgaaaccaggcatgctgtgtccagagtaagtgttgtcagacagaataatgtgccatgtgccccacatagtccagaaaccagtggatggtcttcctgtttacattttttaaatgtaagtgaagggttttttggttttattattatttttaattaacatataataatgtacatatttatggagtacagtgtgatattttaacacatgcatacttttgtatcaattcaccaacctttggctatccccctgccaccaacactctcctacctctagtaaccactattctgctctctgcttctgtaagaacaactttcttagcttctacatatgaatgagaacatacagtatttatcttttggtgcccaacttatgtcacttaatgtcttccaagctcagaatttgttcttttctatggctaaacagtattctattgtgtatattttctttatccattcatttgttgatggacgcttaggttaattctatatcttggttattgtaaataaaaatgaaatttttcttgatgacttaagcaaatgctcccaacttactgttaagtaaaagaaaaaaaaaaagaaaagcaggagaaaagagatctttacctactggttctcattactgtttttaaaaataacatacatagttagtcattgaaagtagataggtaaatatatagttaagataaggaaatagatctatacagtaaaggctagaaattgttattaattctgtgagttgaagtatagactgctttcatttacttatgtgtgtattttcaaaatcgtatacaataaacattaagttaatataaaaatcacattgtcatatcagactcacttcaatgaaagactgtgtccagtatcaagctttacctgtagtttaaggatccaatcaatgaagaggcaagaagagatctaaaacatcctactagcttccacagccctctttttcacattagaacacatagtctctggttgagaataatagaagtctacattgtcaccttacccaataggaagcatttatgttataaggcatctccattttattttttttcttcatagttctttttttaatttttttttcataggttattgggggaacaggtggtgtttggttacatgagtaagttatttagtgatgatttgtgagattttggtgcacaaatcaccaagcagtatacactgcaccctatttgtagtcttttatccctcatcccttccctccctttctccctgagtacccaaagtccattgtgtcattcatatgcctttgcatcctcatattttagctcccacttatgagtgagaacatacaatgtttggttttccactcctgagttacttcactaagaataatagtctcaaatctcatctaggtttctgcagatgtcattattttattcctttttagggctgagtagtattccaccgtatatataacccacagtttctttatccactccttgattgatgggcatttaggctggttccacatttttgcaattgtgaattgtgctactataaacattcatgtgcaagtatcttttttgtataacaactacttttttctggatagatacccagtagtgggattgctggatcaaatggtagtcctacttttagttctttaaggaatctccacactgtttgccatagtggttgtactagtttacattcccaccagcactgtagaagtgtttcctgttcaccacatccacaccaacatctattagtttttgattttttgattatggacattcttgcaggagtaagggtatcaccttgtggttttgatttgcatttccttgattattagtgatgttgagcattttttcatatgtttattggacatttgtatatttcttttgagaattgtctagtaatgtccttagcccactttttgatggaattgtttttttcttgctaatttgtttgagttcatcttagattctgtatatttgtcctttgtcagatgtatagattgtgaagatgtttgcttattctgtgggttgtctgtttactctgctgactattccttttcccatgcaaaaggtctttaatttaattaagtcccagctatttatctttggttttattgcatttgcttttgggttctcggtcatgaaatccttgcctaagccaatgtctagaggtcttttccaatgttatcttcttgaatttttatagtttcaggtcttaratttaagtccttgatccatcttgaactcaggtttaagcccttgatccatcttgtgtatagcaagagatgaggatccagtttcattctcctacatgtggctagccaattatcccagcaccatttgtggaatagggtgtcctttcctcactttatgtttttgtttgctttgtcgaagatcagttggcttgtaattatttgggtttatttctgggttctctattctgttcccttggtctatgtgcctatttttaaaccagtaccrggctgttttggtgactattgccttatagtatacattgaaatcaggtaatgtgatgcctccagatttgttctttttgcttagtcttgcttccgctatgcagactcttttttggattcatatgaattttaggattttttktctagttctgtgaagaataatggtggcattttaatgggaattgcattgaatttttaaattgtttttggcagtatggttattttcacaatattgattctacccatccatgagcacgggatgtgtttccatttgtttgtgttgtctatgatttctttcagcaatgttttgtagttttccttgtagaggtatttcacctccttggttaggtatattcctaagtatttcattttttttattttttggcagctattgtaaaagtgctgagttcatgatttgattcttagattggtcattgttggtgtataggagagctactgatttgtgtccattaattttgcatctggaaactttgctgaattcttttatcagttttagaagcattctggaggagtctttagggttttctaggtatgtaatcatataatcagcaaacagtgacagttggacttcctctttatctatttggacgccctttatttctttctcctgtctgattggtctgagacttccagtactatgttgaggagaagyggtgagagtgggcatccttgtcttgttccagttctcagagggaatgctttcaatttttccccattcagtattacattggctgtgggtttgtcatagatggcttttattacattgtggtatgtcccctctatgttgattttgttgagagttttaatcataaagggatgctagattttgtggaatgctttttctgtgtctattgagatgatcatgtgacttttgtttttaattctgtttatgtgttgtatcacatttattaacttgcatatgtyaaaccatccctgcatccctggtatgaaacctacttgattatggtggattatctttttgctgtgttattggattcagttagctaatattttgttaaggaattttgcatctatgttcttcagggatatcgggctgtagttttctttttttgttatatcctttcctggttttggtattagggtgatactggcttcatagaatgatttagggaggattccctctttctctatcttgtggaatagtctcaataggattggtgccaattcttcttttcatgtctggtagatttcagctgtgactccatctggtcctggactttgttttgttgttggtaattttttattattaccatttcaatctcactgcttgtttttggtctgttcagggtatctaattcttcctgatttaagctaggagggttgtatctttacaggaatttatccatctcctctagcttttctagtttatgcatgtaaagaagttcctagtagctttgaatgatcttttgtgtttctgtggtgtaagttgtaacatctctcattttgtttctgactgagctcatttggatttttctttcttcttggttaatcttgctaatggtctatcaattttatttatcttttcaaagaaccagttttttgttttatatatcttttgtttttttgtttgtttgtctctttcaatttcttttagttctgctctgatcttggttatttcctttcttcttctgggtttgggtttggtttgttattgtttctctagttccttgaggtgtgaccttagatttactgttggtgctctttagatttttcagtgtaagcgtttagagctatgaactttcctcttaatgctgcctttgctgtatcccagaggtttttgatacattgtgtcactattgtcgttcagttcaaacaacttttaaatttccatcttgatttcattgttgacctgatgattattcaagagcaggttatttaatttctatttatttgcatggttttgaaggttccttctggagttgatttccagttttattctgctgtggtctgagagagaagcatctctattttatacttaagattgttgtatagcttatgtgacattccctagtgagccatgtctcataaatccatcaaagtttargtttgtttacagtaagcaattctaaatcaagaacacctttctcaaagtagctcatagatagaaatgctttttttttaagcaaacgttcttagtctgttgccctgaggacccagttgttatgttaacaaggagattagaccaggccaccaaccttccttccccactccctaggggaatcccctgataatcaaaagaagtcacaggctagctgctttaactccttcctcctcaacaatatttttagaattttttttttttaacagaaggaatgaaaggtgggaataacactcaagccatcgtgtttgttttgaattggaggaaagcaagaccaacatcatttataatagtgaatgcttcattataataatacagaaaatgatataagcctaaacaatgaagtaacaatagcaaggagagagggaatgagatttaataaatatcacagcatttcaatggactcaatatagtaattgactagatgtaggatttaggcagttgaagaaataaataatgatttccagtcagagccttaggcaggtatatgaataatgtggctatttgtggccacagagaaaacagaggagcaatgtgtgggaagatggaggttctttaatagaagataagagaacttcgattttatttaaactctgatagaaaacaaccagtgaaaacatagaaatggatgatgtagcaaaaatatagaataatctgcagaatgaggtaactttacccatttagatttcagaatttaatgaggagggatcagccttagatgtgaggacagatgtcttttccactctggtgggagggaaaaaagcaasaatgttctctttgatgtattctcttctagtggcctccattttttctattgtgttcacaaaatatggaactttcttctgagtatttagcaacttggtaaactaaatattcacaagattgtttattaggaatgaaatcagagcaaaatataagatgacccttgaggatgttcctttcagactatggagaaagaaatggagccaaaaaatttcccgatataagaaaaatcctcccctccaaggttcaagaaatttgtctctctaagattagtgatttctctttcttggatatttacttctaaactctgcctttccaccttttttctaataacatcattttccaaaaagtatgttaattagttcattttcagattactcagatgcaagctgattaaacttgcctttttttctaaaaatctctttacttttctcataatctatacttttatcatattatttcttaggctgttgacatctttgtggcttattttttctatttcagttcttactagtttgttctcttattgtaaattgaacttgaagtttcagagctcctaattaaccacagtgatacatttttatttaatcccagcaaagctggtgctaattagtttcccatgagctcaaaagatgatcagcctgcaaaatttggtctgatgcagaaactgttgtcatagcaaagccccatctaaggtaatactctctctttgactcctgcagccttcttcttagtatgttaacgtccctgatatgcacgatggtgtttgttttgtaactgtgtattagggttctcagagaaacagaaccaacaggaaagagatttataataaatatagaatacatataaaagaaatttatctgtatagaaagagatttattgtaaggtattggctcacacgattatgacagctaaaaagtttcacaatctgctgtctgcaacctggagccccacaaaagctgggagtggtttgaaggcctgaaacccagacaaccaatggtgtcaattccatttcagatctaagggctgagaaccaggaaacctgaggacagaagatccatgctccagttcaaccagtcaggcagacagcaagttcagcctttctctacctttttactttattaaggccttaaaatgggttgaatgatgtctacccacattagggagggctatctgctttactcagtccaccaatttaagtgctaatcttttccagaaacactctcacagacacacccagaaagaatgtttaaccatttatccaggcatcccatggcccaagcaagttaacacataaaattaaccatcacaaactggaagagcaagaattttatgtaaacataatagcaaaagattagaccaggttaccagcctgscctaatgttagaaaaaagggtgtaggaaagagtcaaggaggataaagcagttggtttcccatggattctctatcctgccctgtaaactggactaaagcctctatcattagcagatagaggaccagaaattaagggaaatgttctggaagagatgctgtgagtgtttcactgaattcaaagccactgaaaccagcaagaaagtttgattcagatagtcagttttccaactgcaacataaagccagactggcaactgcagagttagaggtcaaggaaccactgaatttgggattctgggcccacacatccaatagggaggagcagaaatgagcttgcatcagacagattctcagactagtggcagccaaatgataaagggcaagtagggtgggtgsagactgtaattcctagaaaagtttggaatccatataaaactcctgtggtcttttacagaaacaactggggaaagaaaagaaatttycagtggtaagatcaaygaaggatcaaactatcacaatatagtcagttaatatctgaccttatatagtagcttgatgagatccagggaatttggattataaaaatttrcagggagggaattctttattttgttttaagtgattaaaataaatattttaaaattatcaactgatggtgttgtgtggaaaactctgggacataagtgaaatgtttacttacattctttcttatctctccccttattgtttttaggcaacttggttttttgaggttagttaattttgaaagctgactcaacaaagcagcacataaggaatttatctgaaagagaatgtgsctaggaggggatacaactatcacagaggccttggatcagcaattaatgcatcattaatccttgatgttccttgaatttcttcataaacaccccaataataaaacaaatctagattccttcactgttctgattcacctttctacactctcctgatggcacgtgaccactgttcctggccgttggcttccagaaagagaacagacagggaagtgttggtgaatctagtttgttctaattaacaatgactccagggaaatatatatcataaaataaattttcattcatataattcatagaagtctttgcaactgttaaccggaatcttcattttctctctcttttgtgtgtgtgtgtatgtatatatataatttttagagatgggacctgacttgttgcccaggctagagtgcagtggcacgatcgtagctcactgcagcctcgaactcctggattcaagcaatttttctgtctcagcctcctgagtcrcaagcaatcctgccttggccttccaaagtgctgggattacaggcatgagccactgcactcagttgtcaacatttattcttaaagcaatacgtgtgacctgaggcagaaagatgtacaccagtttcctcatctggaaaaactgatgtaattctaacccatatttcatctggttgtgagatttaaaggaattattacctgcaaaatgcttggaaccatgcttggcatatagaaagaaatatatatatatatgtgtgtgtgtgtgtgtktttaaacacatgcacatatatttttcatttaacaaatatatattatttgatatatatatatatatatttgttaaatgaacagtaagaaatacatttttcctgaaaattaaatggtaaaatttatataaaaatcttagtctggtggtttaaacattggaaatgctgaatggttgttagctccttggtcagtcataaaacatacgttgagagcaagaatatgacaagtatgatttaggcactagggactggaatctgagtaaaaacgcccaatctttgccttatgagcctggttacaattgaacagagatgacaacattaatcgtatactcacacaaatctaggtaaacttgatactgtggcaaatgctgtgcaaaaatgacacgtggtactataaaatgtgtacttggggttttgatttagtgtgttgggggaaggttgggagactgttcggggaaggttgggagactgtcaggaacttttcacaagctactgccagtagaactgagagctaaaaagtgaaaaggaatatatcagtaaagagaggagggaatctgctccagggagaggtgagggctggtggagcagctctgtgagagggacaagcatggtgatagagggaatgcaacattggcatgtgctgagactggtgacaaaagctgtgtccccatcatccagggctccttaagctacatgaagacttttaacattttttttttatcttataagcaattggaattcatcaacagccctaaaacagaatggtaatatgtgatctgtggtttgaaacatcacgctattggaggaatccccaaattttagtgtacatctaatgttgacagtggggtgttaaagtctcccattattattgtgtgggagtctaagtctctttgtaggtctctaaggacttgctttatgaatctgggtgctcctgtattgggtgcatatgtatttaggatagttatctcttcttgttgaattgatccctttaccattatataatggccttctttgtcccttttgatctttgttggtttaaagtctgttttatcagagactaggattgcaacccctgcctttttttgttttccatttgcttggtagatcttccttcatccctttattttgagcctatgtgtgtctctgcaagtgagatggggctccrgaatacagcacactcatgggtcttgactctttatccaatttaccagtctgtgtcttttaattggagcatttagcccatttacatttaaagttaatattgttatgtgtaaatttgatcctgtcattatgatgttagctggttattttgctcattagttgatgcagtttcttcctagcatcaatggtctttacaatatggcatgtttttgcagtggttggtaccggttgttcctttccatatttattgcttctttcaggagctcttgtagggcaggcctggtggtgacaaaatctctcagcatttgcttgtctataaaggattttatttctccttcacttatgaagcttagtttggctggacatgaaattctgggttgaaaattcttttctttaagaatgttgaatattggcccccactctcttctggcttgtagagtttctgccaagagatcagctgttagtcagatcrgcttccttttgtgggtaacccgacctttctctctggctgcccttaacattttttccttcatttcaactttggtgaatctgayaattatgtgtcttggagttgctcttcttgaggagtatctttgtggcattctctgtatttcctgaatttgaatgttggcctgccttgctaggttggggaagttctcctggataataccctgcagattgttttccaacttggttccattctccccatcactttcacgtataccaatcagatgtagatttggtctttccacatagtcccatatttcttggaggctttgttcatttctttttattcttttttctctaaacttctcttctcacttcatttcattcatttgatcttcaatcactggtaccctttcttccagttgatcaaatcagctactgaagcttgtgcatgcatcacataattcttgtgccatggttttccgctccatcaggtcctttaaggacttctctacactggttattctagttagccattcatttaatcttttttcaaggcttttagcttctttgcgatgggttcaaactttctcctttagctcagagaagtttgatcatctgaagccttcttctctcaacttgtcaaagtcattctttgtccagctttgttctctcgctgatgaggagctgcgttcctttggagggggagaggcactgtgatttttagaattttcagcttttctgctctgttttttccccatctttgtggttttctctacctttggtctttgatgatggtgacatacagatggggttttggtgtggatgtcctttctgttctccttctaacagtcaagaccctcagctgcatgtctgttggagtttgctggaggtccactctagaccctttttgcctgggtatcagcagtggaagctctcagaaggcaagatataactaagatcagagcagaactgaaggaaatagagacacaaaaaacccttcaaaaaatcaatgaatccaggagctagtttttttgaaaagatcaacaaaattgatagaccactagcaagactaataaagaagaaaagagagaagaatcaaatagacgcaataaaaaatgttaaaggggataccaccactgatcccacagaaatacaaactacaatcagagaatgctataaacacctctatgcaaataaactagaaaatctagaagaaatggataaattcctggacacatacaccctcccaagactaaaccaggaagaagtggaatacctgaatacaccaatagcaggctctgaaattgaggcaataattaatagcttaccaactaaaaaaagtccaggaccagaaggcttcacagccgaattctatcagaggtacaaggaggagctggtaccattccttctgcaactattccaatcaatagaaaaagagggaatcctccctaactcattttattttggtgttatcctgataccaaagcctggcagagacacaacaaaaaaagaacatcgatggaaaaatcctcaataaaatactggcaaaccgaatccagcagcacatcaaaaagcttatctaacatgaccaagtcggcttcatccctgggatgcaaggctggttcaacatacacaaatcaataaacataatccagcatataaacagaaccaaagacaaaaaccacatgattatctcaatagatgcagaaaaggcctttgacaaaattcaacagcccttcatgcaaaaaactctcaataaattaggtattcagtggacgtatctcaaaataataagagctatttatgacaaacccacagccaacatcatactgaatgggcaaaaactggaagcattccctttgaaaactggcacaagacagagatgccctctctcaccactcctattcaacatagtgttagaagttctggtcagggcaatcaggcaggagaaagaaataaagggtattcaattaggaaaagaggaagtcaaattgtcactgtttgcagatgacatgattgtatatttagaaaaccccatcatctcaacctaaaatctccttaagctgatagcaacttcagcaaagtctcaggatacaaaatcaatgtgcaaaaatcacaagcattcctatacaccaataactgacaagcagagagcgaaatcatgagtgaactcccattcacaattgcttcaaacagaataaaatacctaggaatccaacttacaagggatgtgaaggacctcttcaaggacaactacaaaccactgctcgacgaaataaaagaggacacaaacaaatggaagaacattcgatgctcatggacaggaagaatcaatatcgtgaaaatggccatactgtccaaggtaatttatagattcaatgccatccctgtcaagctaccaatgactttcttcacagaattggaaaaaactactttaaagttcatatggaaccaaaaaagagcccgcatcaccaagtcaatcctaagccaaaagaacaaagctggaggcatcacactacctgacttcaaactataatacaaggctacagtaaacaaaacagcatggtactggtaccaaaacagagatatagaccaatggaatagaacagagccctccgaaataatgcttcatatctacaactatctaatctttgacaaacctgacaaaaacaagcaatggggaaaggattccctatttaataaatggtgctgggaaaactggctagccatatgaagaaacctgaaacgggatcccttccttacactttatacaaaaattaattcaagatggattaaagacttaaatgttagacctaaaaccataaaaaccctagaagaaaacctagacaatatcattcaggacataggcatgggcaaggacttcatgtctaaaacaccaaaagcaatggcaacaaaagccaaaatagacaaatgggatctaattaaactaaagagcttctgcacagcaaaagaaactaccatcagagtgaacaggcaacctacagaatgggagaaaatgtttgcaacctactcatctgacaaagggctaatatccagaatctctaaagaactcaaagaaatttacaagaaaaaaacaaacaaccccatcagaaagtgggtgaaggatgtgaacagacacttctcaaaagaagacatttatgcagccaaaaaacagatgaaaaaatgctcatcatcactggccattagagaaatgaaatcaaaaccacaatgagataccatctcacaccagttagaatggcaatcattaaaaagtcaggaaacaacaggtgctggagaggatgtggagaaataggaacacttttacactgctggtgggactgtaaactagttcaaccattgtggaagtcagtgtggcgattcctcatggatctagaactagaaataccatttgacccagccatcccattactggatatatacccaaaggattataaatcatgctgctataaagacacatgcacacatatgtttattgcggcactattcacaatagcaaagacttggaaccaacctaaatgtccaacaaccacagactggattaagaaaatgtggcacatatacaccatggaatagtatgcagccataaaaaaggatgagttcatgtcttttatagggacatggatgaaactggaaaccatcattctcagcaaactatcgcaaggacaaaaaaccaaacaccacatgttctcactcataggtgggaattgaacaatgagaacacatggacacaggaaggggaacatcacacaccggggactattgtggggtgaggggaggggggagggatagcattaggagacatacctaatgctaagtgacgagttaatgggtgccacacaccaacatggcacatgtatacatatgtaacaaacctgcacattctgcacatgtatcctaaaacttaaagtataataataataaaatttaaaaaaaagagagaaaaaaaagagcttctgcacagccaaagaaactaccatcagagtgaacaggcaacctaaagaatgggaaaattttttgcaatctactcatctgacaaagggctaatatccagaatctacaaagaactcaatcaaatttacaagaaaaaaacaaacaaccccatcaaaaagtgggtgaaagatatgaacagacacttctcaaaagaagacatttatacagccaacagacagctgaaaaaatgctcatcatcactggccatcagagaaatgcaaaccaaaacaacaatgagataccatctcacaccagttagaatggcaatcatgaaaaaatcaggaaacaaccagtgctggcgaggatgtggagaaataggaacacttttacactgttggtgggactgtaaactagttcaaccgttgtggaagacagtgtggcgattcctcaaggatctagaactggaaataccatttgacctggcaatcctgttactgggtttataccgaaaggattataaatcatgctgctataaagacacatgcacatgtatgtttattgtggcactattcacaatagcaaagacttggaaccaacccaaatgttgatcaatgatagactggattaagagaatgtggcacatatacaccatggaatactatgcagccataaaaaaggatgagttcatgtcctttgtagggacatggatgaagttggaaaccatcattctcagcgaactatcgcaagggtgaaaaaccaaacactgcatgttctcactcataggtgggaattgaacaatgagaacacttggatacaggaaggggaacatcacacaccagggcctgtagtagtgtcaggggagargggagggatagcattaggagatatacctaatgtaaatgacaagttaatgggtgcagcacaccaacatggcacatgtgtacataggtaacaaacctgcatgttgtgcacatgtaccctagaacttaaagtawaataataaaaaataaaatttagtgtacgtcagaactacttggagggctcgccaaagcatgttgctaggcctctttccaaagtttctgatttcatatgtctgggttctggtagaagaatttgcctttctaacaggatcccagatgttgctgatgctgctgatctagtgccatcctttgaggactactgatctactctactgtgaacaaattgaaaggatcaaaagggagcactaggtggaccacttagaaagaaatgtccgtcttccatacaagaattgatagacatttgacctagggaaatggagagaagtctactaatataaggaatatttaggaggtaaaattggcaggagtcgatgctaggttaggtgtggatatgaaggaaaagacgatgtcaagatgtcactgggttagttgccctaccttatcatctagaatgaagacattctcatttataaagtccaaaaggctagtaatctatcagcccaaaatgagagttttggatttttttttttaatctgttggctgcaagggactaaacctgacaataatcacagaagtgctggtgctgacagctaagttataaaagactgctggcctcaaagggtgctggaaagcttgttctgaaaaaatgccagcaaggcacctcctggccctgtctgtggtatttcccaaaggcacgtggagcatgagccaggttacatttgggctcagtgtcagatctcatggctctagccacagctgaagccagtaaatagagcttctaaagttaataaagacagtgatgaaggactagtgattgagtagagaggagagagagcagatgaaagatcaaactaaaagaggctaatccctgaatttgtaaagaaaatttcgaagagagagacagtagaaggtgcccaaaataaagaaatttgcagtacgggaaaagcggtagttggcagctctcttgccagtagaaacaaacgtctgaggcaaaaatgaaggaagaagaaagaattttaaaaagacatgcattggactgtctaaagacaaacccactgcagaaatgaatcagggatttattattaccagagagagttctgaggaatatttaggaaaagtgttggtgatcaaaattggtgtcatttggtggcaacttcctcagggcttgaggaaataaaacaaaggcttacccttggaaataccagggattatatataaggatctttgagaaaggttcacaaacacaaattttatagcattccggagatcaaccagtgtcttcgtgccaaaaagtaaagggcatttttcccaaaggcaagaggcatttggctcagaatttaatggagaaaattgtgggaacttagaggaggaatgcccattagagaggttcaatagaatttgaagtttcaagggaatttttgaaagcgcagtgatgaatatataaagttttataggactttgagacagaatataatttggtgtataatagctaaagcgtaaagcttttgtttttaatcttgcacgtgttcttagcataaaaattgtagccaggagtaaaagcaaaataaaacaataaccaaaaaaaactaaaaagataagccacccaatttaaattataagcattcatgtagtattcagatttttgcagaatcctgtactaatactatgatagtgaagatcacaatgattatatggggagcaaattactctttgaacctgcataaacagattactaatagttgagaatcagataacaccaatggcttatataaaataaagagatttctttgtatttttaagaatttacatatagtgttgttgtggggtgttttggcttatttgaaaatacagataattatggatatattttgaaggattcaagatacatactttggaccctggaatattaggggaagaagacggggaagcgattgccagtgtgggaatagagaggtggtgatctctttcctccccatcataagggtcatggccagcaaccctctaacaaagacagattaatagaagaatagtctaatataatagatggattaatttaaaaattaataacagcataagaaacttatttgatcatagctttatgctacatgggagccttcagaattaagactcgaagacttaaggtgaactattcatttttatgcttgggattaatgaagaatggacagtcatatggaaatgtgattgggcaaaaatgatctgayctaataataataaacaaaggagggacgggcgcagtggctcacgcctgtaaccctggcactttgggaggttgaggcgggcagatcatgaggtcaggagatcgcgatcatcccagccaacatggtgaaaccccatctctactaaaaatacaaaaattagctggtcgtggtggtgtgtacctgtaatcccagctacttgggaggctgaggcaggagaatcgtttgaacccggaaggcagaggttacagtgagctgacatcacaccactgcactcccgcctggtgacagagtgagactccatctcaaaaaaataaaataaaataaaataacaaaggggagaaatccagcaagaccagtctgttaagattcttcttggcttctctttagcattccttccttctggtaagaggcaggatcttctctggaatgcaggtcttatgacctacaatcaaataaggtaggtcagaaaatttcatggccagttcttacacggaaagatgggtgaaagttgtagtaatatttttaggttttattagtggccttggaggaaaagggttcttgtttctatgactgccttgggaaagagggattctagtttctactgcttgctttaggagataatgagtggtgaaagacaggagagcagtagaaagtcagacagaaactttgtttctgaggctgcttctgaggcctttgctaacttgtagctctcttgccagtagaaacaaatgtctgaggcaaaaatgaaagaagaaaaaagaattttaaaaagacatgcgttggactgtctaaagagaaacccactgcagaaatgaatcagggacttattattaccagagagagttctgaggaatatttaggaaaagtgctggtgatcaaaattggtgtcatttggtggcaacttcctcagggcttgaggaaataaaacaaaggcttacccttggaaataccagggattatatctaaggatctttgagaaaggttcacaaacacaaattttatagcattccagagatcaaccagtgtcttcatgccaaaagtaaatggcatttctcccaaattcacccttcaatttgtcagtgattcatttcttgtctttggagttggtatgaatttatcttgaagatcctcaggttgatctaaagttctgttcaaatggtctatgtatttcacatatttttaccagctatcaaaaaatctcattaggaatggtttaatagtacacatacacaaaaaaatagtaaatgtactatacagtgactgtcaaatgtcctgatccaacaagtcctaatggcataagggaaaatctcttccaaccccaacatcctgctaatgatgttgggataggggaggtgggttgaagaggtaggtagtggctgcaatctgggaataatgccccaagtcacaaattacaagctcagctatcctgttccatctccacattttaagcaagtattgaactttgttctatagcatgctcctgcttctttccatttaaaataaggattcaatacctacctccaccaaaaatcaaaacttacagtaggactgcctctccatgagggagcctcctgttctccttagttacacatttttctccctaataccttgatatgtatctgtggttggagaattacaactctaatctttttctatttcaagttatcttccatttttaacattcagtagagtgttctttttttttccttttttttaattattattgtactttaagttttagggtacatgtgcacaatgtgcaggttagttacatatgtatacatgtgccatgctgctgcgctgcacccactaactcgtcatctagcattaggtatatctcccaatgctatccctcccacctccccccaccccacaacagtccccagagtgtgatgttccccttcctttctccatgtgttctcattgttcaattcccatctatgagtgagaatatgcagtgtttggttttttgttcttgcaatagtttactgagaatgatgatttccaatttcattcatgtccctacaaaggacatgaactcatccttttttatggctgcatagtattccatggtgtatatgtgccacattttcttaatccagtctatcattgttggacatttgggttggttccaagtctttgctattgcgaataatgccgcaataaacatacgtgtgcatgtgtctttatagcagcatgatttacagtcctttgggtatatacccagtaatgcgatggctgggtcaaatggtatttctagttccagatccctgaggaatcgccacactgacttccacaatggttgaactagtttacagtcccaccagcagtgtaaaagtgttcctatttctccacatcctctccagcacctgttgtttcctgactttttaatgattgccattctaactggtgtgagatggtatctcattgyggttttgatttgcatttctctgatggtcagtgatggtgagcattttttcatgtgttttttggctgcataaatgtcttcttttgagaagtgtctgttcatgtccagtagagtgttcttaaagaacgactggaggtaatctcttaacagaaaattgaatcatgcataccaagtcttgttaagcagcacttttaacccagattctgttattttttatggtaaagtctttaagttacattctctcatagtacttgaaactactaaaaataattgaaaaggtttaattatcctatttactgttaccatttgctttgtgctatatgtttattgctatctctggtgagctatagtaacactgctgcaggtgtttttaaaataggtagtattgattatcagtataagacatgttaagtatccaactgaattttagtcatgaggaataggtgaaaaggattctgtcaaggagatgtcaatttggccccaagaggcaaactttttttgacagttccgtacaaagtagaggttactgagtaactgcccctattatttagtaactgaccctgacagcactgaaaaattgaggggagggggtgagcagagagttaagaaggataacctcaagttatataaaatatccaggaagcatgaaaactggaaaccacacagtagaagaaacgtcgtttctgtctagtgatcaattcctcgtttggctaatgagagagagagagagactgagacatggaactaaaatgttctgaatagatgctaactttgagacaaaacagagaggcaaaactgggagattttgctcttctagtggtaggaatagccatatgccaattttaatgggagtaattccatagagagctccatgctaaatgcacagaggaagaaacaaagtacgtattcattcattcacatttggctaatttttgtatatctggttacctaccaagcacagtacttgtacatagttgagatgcagcaattcacccatttattcatatgagacatacagcatttattaagcatctactacattctggtgataaggatacagcmgtgaagaaaacaaagcccctcacaaagcttacattctggtatcactaaaatgattgcatattctggctgcaacctggggaatcagtgatctaaaatgttaattatcaagtgcccagattctaaagccaggtggcctgggcttgaaaagtattttgtgccattaactctctgtgtggttttggacaagtcacttaatcattttgggcctcagtttctttatcaataaaatggggatataatgagttaataggtgtgtgtgtgtataagttaatataagtgctcagatcagtgtttgacactaataagtgccatatatatgtgtcagatacccttgttaaaagaaattaatctaaattcaactcatcgttaaatagttcttaattacagaataaaaggtagagaccagggaaatcaagacaacaaaacttgagataccaatagcaaatggattattcacgtttgtattatttgttcaaagtagattacagaaggaaagagagagcacaatccagtggttaagctggttacttgtatctgtggcctgcaatttcctcatctgtgaaggaatgagaaaaggtgtcctttttaggggttctagaaggattaaaggaaatgatgtgtgtaaaatgcttggcacaaggccttgctaagggtgagcatttattaaatggtggctatttcatttataacctgattatattgaactgacatcatttatttaatggtttttgccattgcatttcagttcaaaaaggatttaaggaaacttttaatcagagtatttctaaaaacattaaacattggtctcacaggaagaaaacactgcaacagtcagtcaaatcattcatattaaaasttaatgtttttccaatgaaaagagaccctttcagtaaggtttttcagtctgtaagttctggagtctagatggaattgagagattgtccaattaaatttatacttaggatcaaatgcaactaaacttccataaacgtactcttgaatcacatcacgatctatttctaatatttattattgctgaatttttgtatttttgcatctgtgttcataagcacaaatgactttttttttttaaacaaagtcatatcttgcttgggtaacaagattataattgacctcatgagctaagcttctttcttaatttttgtattttccaaaataatttttaaaaaaggtggatggtattcctaatttattgaattgttgatatcataggaaaaccatttagacctagtatttgcctttagttgttgttgtttatgaattccatttctttaactgttaactgctgaatcagaatttttctttcacaaatattggtatttctgtatttgtacaaaaatacaactatttagtcatatttcaaatttttcaacataaaattactcaaaatagttacttcaatttttatctatgctaaatcaacaattatttgctatttttggtattacatttgaatttcttttttcttcattattcttgcctaaagtttgagtattttcaaatattgtgacattattactcatttcaaatttctggcccttaccttaacatttttccttcttatttttttagcattttaccatttttctttgtatagcttcttgagttgaccgatttgttaattttctgaaatgtgtgcaaagctataatttccttctgtttaaatatacaacaaaatttggcttgtagaaccttcagtgtcatttaatgtcatttaattctgaataactgaaatttccttcataattctttcctgattttctctgtattccaaggattgattaataatttagcacctagacatatttgatatgtatcttttgttttcattttcttattgactatagaactgaaaccaactttgacaggaagctgcaatctctgattccaataccttagttctgggagtgatctagaatgcagtgtccaaaatctttggactcacagtcaagctttgctactcagagagtctcatatgctttaagaaaaactacatagcaaaagaaggtgctttttttaatgttcacatatatttaggtaattaaatgaaggataatttctcccgttttttggaaggaaacatctaatgtttctatgctagtttctgtcaaaatttcaaaatactytaatgagtctgaaatttataggccatattattttcgtaagagaagcaacatgaatttcaaatgacccgtgagaattttatcaataaacagtttttgcaaatatatttttgtgttcatagccataaagaggcatgaatgccgaagagaaaaaaacttgaaaacacttttttctttaaaaaaaaagccttcactcatctttttagccacaatctgctaaaattcatgacatcaaagttgttcttcatgaaatatagcccttttttgagaatttgtttatttttataataccgatatcatcttaatacaaagaaaaacttttttaaagcccttaggctatgtaagtgagaacgtttttccaatgcaaatagaacatttgattattacatcttggtagatattggatgtactaacaaattattaaaagtaaacaaagaaaactgtaagaaaaatatataaataaaaacaaaacactgtgagttttgaatttataaaatttgcctgagtgtacttgttttttaaaaatgtatcaaatcaagagttgccatttttttaccagatgattatactaatgcatttgcaaactgtgaaggtaaatttataacgagaaaaacaaaaacataacgtttttaaaaacagtttagttttctaacgaattccatctgaaccacaaagttatggtacagtctcaatatgcgagtaaataagtgattatatcaactgggagatgttcacaaatctgatgtggttacaaaatactaaaaattttagtcatggctttagcgatgacagtctaggttgtgccacttttctacaagcaaataaaagtagaacwgttaaggatagcattgaaaaaaacgttacttggtttgaagatatgctggtacttttagaagagtttttgggaaacttccttttgaaagctgtttcttggctttgaggaaagttctgtttctctcaatggtttgataacactgaaaaggaaaatgcwgttgattactacttgtttatctcatatttatgattttaaatatatctccaatatatttatgattttctcttcattcccaccgctacctccccttctgtctttctctatttcgtaggaaaaattatgacatcaacatccaaaggaattcttcgcccatttttaattgtctgcattatcctgggctgtttcatggcatgtcttctcatttacatcaaacctaccaacagctggatcttcagtccaatggaatcagccagctctgtgctgaaaatgaaaaacttcttttccaccaaaactgattattttaatgaaactactattctggtgtgggtgtggccatttgggcagacctttgaccttacatcctgccaagcaatgttcaacatccaaggatgccatctcacaacggaccgttcactgtacaacaaatcccatgcagttctgatccatcaccgagacatcagttgggatctgacaaatttacctcagcaagctaggccacccttccagaaatggatttggatgaatttggaatcaccaactcacactccccaaaagagtggcattgagcacttgtttaacctgactctgacttaccgccgtgattcagatatccaagtgccttatggcttcttgacggtaagcacaaatcccttcgtgtttgaagtgccaagcaaagagaaattggtgtgctgggttgtgagtaactggaaccctgagcatgccagagtcaagtattacaatgagctaagcaaaagcattgaaatccatacctacgggcaagcatttggagaatatgtcaatgataaaaatttgattcctaccatatctrcttgtaaattttatctttcctttgaaaattcaatccacaaggattacatcacggaaaagctatacaatgcttttctggctggctctgtacctgttgttctgggaccatctagggaaaactatgagaattatattccagcagattcattcattcatgtggaagattataactctcccagtgagctagcaaagtatctgaaggaagtcgacaaaaacaataagttataccttagttactttaactggaggaaggatttcactgtaaatcttccacgattttgggaatcacatgcatgtttggcttgcgatcatgtgaaaaggcatcaagaatataagtctgttggtaatttagagaaatggttttggaattaaaatttttcatcacttgcacacttgataaatattttgatgagatatcatccaagtattgaggataagaagagatgcaacatactacttttgtgtcacaatttatttttatcaccctctctagggtaacgtgtatattttggtggagatttttaaaagctcagcatgagcaatcattccattcggttttaaattatcctgtatatacctaattatgtgcactggagagtaatttattcttcattatcatttgtaaacattgytttttcacatttttgtagttgtccataatgtaagcttgtggtttgattattgtttccacactgatcagctgtttaatctatttgggaaatgaagatgcacatcttaaagtatgaaaaattttcactaagtattacaatgtctagttccaactttgcatactataacagaggaagaacatgttgcgattgaattctaacctctttgactcctaagatgaatgaagtgtataactgtctctatttgatctattttttttacctgtttatcacatttgtgaaggtgaaattattcatggagtgaataagaaagatatgaagcagaactgttctattcaggaagctattagacttctcatttattttcattaagctgatttgcagctacttattctcatggtcttaaattaaattattcaagtatttttaaatatccaatttgttgtgattttcagcacctgggaagtaatcccaataatactttagaaaatctaagacagttctttctgctactgatgacactcattgtcataataaaacaaataatttcctcaaataacaaagaaaaatgatacctataaatatatttataaatggtgtcatttatgaacaatgtttaattatgtatcaatttaagatttttttctgaagccctaatatttaaaatggccttattttaccatatggatataagatttggctcataatgatgagccctatcatttgatttgagttctatcatttaagagagcctaaataaaattatcatcaaggtattaaatataagacgttaaatataataaagtggggatatatagaaaacacacagtgttagcacasagtaagatctcaatgcacatttgttggatgaataaataaatgcaattgaattcccagaaaaatgattgtttcaaggaagtgacagttctactttagaagtactaattggagatgacttttatatcccattttggtaattattcatacatagcacatatgaccatgatgttcagggctttatagaaccaaataaacctaccattacatgaaaattttgaagagtatattcctgaacttgcagctgcctatagcattctcctccataaggcgagaggagagctggatataagcagagatcgtaggtgaaaaaagatgggccattaaggattcttcaaggaaaacattcctcaaaatgatctttagtgcctttattcctttcaggccaataatccacccaaaaattagaatgttctgagacatccatttgggtctatttgtgacttattcgtattacaaattgacatcagcaaaattcaaaaagaattcagtaaaaagggcatagatccagctatccagactatcttgtgagagaataagctcaccccagcaccagaaagatttgagcagaggaatattcctgtaatgaatagaggattgtttgattctcaggtatatttcttaagccaagattgaatgcagtgtcaggcactgccttaacacccacagagataagatgaacaaggtactatcactgcctaaaatgagcttacaattaagtggatagacgtataaaagcttcctttcaattcagcctgagactgtttatatgcatgtgctactccgaatgacgtttgtatgggtcaatgctgatttaatggggaaaaaaagtagaaaatttccccaattgcttagctgtttgacatgtttctgagctgcaaactttgtcaactcttttgacccaacatattattctctccgtattatctcttctaaccacaatgcattaagaaataatatttttatgtggatgtcctcctcaataagtaaagatctccatccatatttaattaattggtaagacagtcaaattcatacatttacatttactttgtcaaattttttggtctataaaaagcatagagatctaaagaggatacactgctaacaagtttagaaagcacctgcttttttttattattattatttttgtgatagagtcttgctctgtcgcccaggccggagtgcagtggtgcagtctcggctcactgcaacctcggcctcccaggttcaagtgattctcctgtatcagcctcccgagtagctaggattacaggcgtgtaccactatgcctggctagtttttgtatttttagtagagatgggtttcactgtgttggccaggctggtcttgaactcctgacctcaaatgatccacttgcctcagcctcccaaagtgctgggattacaggtatgagccactgtgtctggcccacctgttttttttgaaggcagaaaaacattcaatattaaaagcattcaatattatttcaacctgccttggctctagtgaatgttcatgatttgaaagaactgaaagacctaaaggcagtgtctctattgttgactacaaatgtaggctctttgttggactatgactctaatcacacactgataatatgacgcaagtagaggcagtactactaagtatctagcaggtgctttgaaaccccattactaagtcccagaagactgtttcctaaatttgaagtggaagaattaaatgactcaatggaaccctttagctgtgggtccattgatgtgtgagttttagagctagaaggaattataattttgttgtttataattgctataatatagaaattataattgcttttctttctacttatgagttaactagatccagagatatttattcaagacacacattcacacacacgtacacacacacacacacacaccccacagctagtgacaatagttaagatttggatttaaggatcctatctttctttatcccactttcttttcaatcgcattcataacttattatagaattatgtctcaatttttacaaatgtgaatgtcttattggtatttttagggcctatagaatggtacacctcatgtagaagaacttcgacttttgaaggtatacaataaataaaacatcaaacttgttagcattcgttctggtttaaatattttaggagttgagttcagcagaaggaaatgggctatcactacatttaagtgaaatacaaccctcaagaaagtgtatggttcacagccactcctttaataaatcctgtgggttgcaattctttgtaagaaactcatgaaaaagatatattgattcaacaaaattggtttgctgttgattatacaaaccaataattatgcctagaattaaattgtggacacaaaaaagggaacagaccatttaaaatgttttatttcaaaatatcgaaaagctattaccttcaatactctaaatatttaaatattaattattgtagacatcagtaagaataaataaatgttaatcattatagaccttactaataagaatatatactgaattgtccacatccagagtattacaccctgaacaagaaagacatgagagcctgacagtcatatatattatgacagctgtatatctgacaatatgaagtagaaactgaaaaaaaaaatcatcttagtgggaaacaaatacatgcttaaaattgttatatttactgtaaaactcctgataatcttagattgtgcagaaatgtttcttattttgaggggcttagaaagctcagcgcatttgatgtataaagcaacagaatatttaggaattatttgcggaggctttaaattcttacctccaattggaggttaaatattaaaagaataggaaactatgcctctgatatttttttgtcagcctatttttaaactagattccatgagtgttaaggtaatatcctagaatttttttttttgcgtgaattaaagttaccacaaatttcaggtccttaccttatgactgtgtttgatcatatctttgagttcccttgaactctgatctcattttgagaaacattttgagaaacttcttaacaattacaatcgagctgttaaatataacaaacatcagaatctaaaggataagcacagtgcctaatgtacaggagggtcatatcaaatacttgttgaataaatacatgaatgtgataagtggtcctgtaaaatattttttaagagtagtgacaatgtttattggtaccaattggagatgatattttatatttattttgttagtttgtcacctggatgcaaaaggaaggcattttaattcctttctatcttacaacattgtaaagcatcaaaagaagtaacatctcaagaaagattagaaaggatttggatcacgttaacattctatgcaaatattagtaacatatcaactgtttctaaaaggaaagaaaattagtatttaaggagagtataaagtgcgagcactgtgaagggcagatatctattaccaaaccacatggagagaaatatagtctctctcctaacttcattccattgtattgcaatcagtcaagtaaggtgatttttttttttctggatgtctcaatctagagattttatagcattttgcaaatgggtatgcttcactactatccacagtgttctcccctttagtaattcatattgaatatatccatattcatatgcattttataaaacagttaacagaatctaaataagatatagccggctaaatctggaatgtgagtgctaccctaggttattagttcaacaaactaattttgagagagccacttaacctctctggaccttgtttgtaagctttcttctagcactattactcttatctaagatcgaaattgatatatgcatgaaattcctaatggaatttcaatgtccatctcaaagtaattttttaggatattccatacagatttccttctcatttctctgtgtagatatttaaagtatgaaattgattatttaaactaatatgtggaaagaacctaatccagagcttggaatatagaaagtgctcaattaactgacattcctcctgtatttcctccctccccttagttgtctatgacttttgaactcactgctcactgacaccttaattgcctatagaaaaatcaatcatattttaggcattattttgaaatattttagagttttctgtactattcaaactcttattacaaaaatctaaagatatttattgatgcaaaaaatttagggagtcattggaaatacctgaggcaatcccaggctaacaataaaatagcataattttaagtaagctagattgagttcatttgaacatttagttattttttagctcatagttaacatatgtccatgcatttgatttactttaaaaatattttatttaaaaataacctctcaaacaccagttgctttctgtcagttttactcaaagcatgcttcctaggtcacctgacctagaatcaccagaagtgttaacaataccgatttctgggctttgagccatgaaattagaatttcttcaaataatccatgcccccccgtcacccaaaaaaagagcatgcttttaatacatttccaaaattatcctgtttctgctatgactggtgaaccatcctgtcctaaactagcagttctcaaacatgcatatgcctttgaaacttcctagatcatctacataaaaatcatttgaaatattgttaataatacacagcttctgaatctctgggtgtgagatgggaccaggaatcttattttaaaaatctccccagatggttctggtgtcctgctagttttgaggttttcatcccacctgtttagatgggtagtattctattaaatatgaggtattacctttctttagttcacctggaatcttcttaaatatatcggtaaagtattctacttcaaaatccaagacattttgtatgcctaattatttcacacaagagcgtggaactcaccagtcttgtgacttggggcaggttatttatagtctccagacactttttccagttgcgagttgcttatagtagttggagaacctgaatgcacattagaaccatctggagaggctttaaaattgcagatgtccaaaccccacctccagagagctgatctatttagtttgaggaagagcccagaagtctaacaggtgtaaatgttccacaggtaatactaatgcaggcatacctcaggaaatcaccagttcttgtcttggaggaactattaggaaaataaaagattatatatcttgaaaaaaatctctaatttgctttctaggttctaactgcatgtttatattttgcaacaggaaagactggtctagacaattactaggatatatgcttctgtgatctgcttttctattgtatgtgtttaagagaccacattcttgggttccaaagtctccttgcctgataggtaatttgcaattgagatatggcaaagaattgtagcatccaaatttttgacaactacagatttagaattgaatccaaggtctgccattcactagctatgtgcaagttactcaacttctcttatcctcagattttgcagctgtaaagcagaggtagcatatttctgagaaattatattcaggtgactagatatgtgttcaagtgttatcttttattcttataaaagataattgtgaggaatccagtgctattttcacaattttaattctaaaactctgaagacattaaacaggcagtttgtaggaatcattgaaattttatacaagccgaaggaacaacattcagcaaaacggaaacaaataaatacagcatggaagcatatattcatgtttcccataattactaagttacggaaggggtgtgaggagctggcagtggtggtgaataggcattgtttgcattactaaatatatataccatttcttaagataattggaactcaagcagtcctaattttctctccctgttatgagcaatcagtaaattagtagtcaatttaacttattatcagttggtatagcgcatgtcacagaataggatagcaagaagattctcagagatcattttctggtaaagaaaaaggcctagcaatatttaacagtttgacttaatccatcacttcagctggtccactagttttgacacaggactagttaatgatttgttaggaagtctccatctactcttaaactaatttaaaaaaaagctaaaagt

SEQ ID NO: 93607 - DNA, 213409 bp, Homo sapiens
aatcaatttttctcctcacaagtatagcagccatccaaatgtcaggcatgaattacatgaatatgcttaccatgccctaaattcagggcactattaaaaacccagaagataccatggttggttgggttgagggcacagcactctcccagaagcaattactcatatgcagatgcaggaagcatttaagggtgtaccattcagacagacagctctcggaaaaatgctctggctcttaagcacaatgcttatgccagctcacagtcagcacttcatacctgcccagccagtgtaaccggtgccatcccgagggtctgctgatttcaggcctctctccatttgctgaagaagctcccgaatcttattggtcaagcgttgtgagaactcaggagtcagctagatattaaaggaaaacaagtatcaaaataatgtgggtcacccagcttgctggactataagctatcaaagacagaaaggtatttcttttccacttaggacatatttttccacctggaagactaaacaatttattttctattcttaaacaacaacatcacattaacaaaatttataaaataccgttgtaacttatacatgttttaaataaaatttttagttaaatactaaaacagactgccaatgataaactggctcacagtaattttccacctaatagtaatcgtctattatttaaaccaatattataataaagtctttttattaaattaagcacaaatcagatgtttggtgctttcaaactactggatttttagtattcaagctgcagcaaggtaaattccctaaagaaacatctaattgctcttatttaaaaaaaaggatttaaaaaaaatgaagtagccaaagaaaagcaaaacaaattcatgtatatcaagagccttaagcagaatagaaagaatatcaaacttagcatcataaacccacgtccagcacagtgtctggcagagaatacgggcttcacaaatgtttctcaatgaatgagcctgtctacatccttacccgctattagctgatcttgctcaactcataacttctttatgtttcaaatacctccataaagtcaggataataataactgccacgccaatttcaaaaggtactttggggattaaatgagatagtgtatcacaagtctttctcattcagggatgtaaatgttgacatttttactaattctttagcagatcaagggtctaaggcaagtaatagtttagatatggattgaaaatacactaaggctggggctgtggggttagtaccacccatatgaaggtccacagatgctgtgcaaacagtgaggctcacacaatcattacgttattcttcttaaaggcaaatgaaaaataattttaaacttctgcacacactgaatcagtgtcttaaaaagtcactgaaggccgggcacagtggctaatgcctgtaatcctagcattttgggaggccgaggtgggcggataacctgaggttaggagttcgagaccagtctgaccaacatggagaaaccccatctctactaaaaatacaaaattagtcgggcatggtggtgaacgcctgtaatcccagctattcggaagcctgaggcaggagaattccttgaacctgggagatggaggttgtggtgagccgagatcgtgccactgcactccagcctgggcaacaagagcgaaactccatctcaaacaacaacaacaacaacaacaaaaacccaaaaaactcactttattgtctccctcaataattttaagaacttgctgtgattctaagacttgaatttcacatagtaattaaaatttcagaacaatgtgggggaaagttacaagggtataaacattttattttaccatgtaaggattgtagaaataaacctaaccactcacatcagaatctcatttttaaaaatgagataaaatcttaacactgaaaacagcaagaaggcagtatcagaattaacaacaacaacaatagtttaaggatacgttaagattcacttcggaggagcatccttgataaggcaaatcagactttcaaccacatctggattatttaatctaaagcaccactatgatcccttatttcactctttagaagaaacgacgttgtttgacagacacactcccattatttaacaatttctgcaaagaggttaagatttcaactagacttgaaaatacatttagtaggataaaatatacttcaatgttaatacaaaagscctataaatctcagctagatagaagagtgcatctatattgagaacacgtcatctactgtatatagatcatatataatttatcatcttgcctggccttcaagagatcaagaataatgagaatctctcagccttatgaagggaagttactttctgtttggcacattctgcatttaataaaggtgacctctgtgagaatattgattgcttgtggtacaccaccaaatcattcaaactctagctataatctgaagtctctaaaagtccttttttcttttctatttttttctgacagatgccagaaaacagaccagttccttactgaaatcttgtgttaagaaattaaggaggacagatctccagggtttgatcctccgtgttcaacattacacaattttagaactggtatgctacttcctttctaggacctgtccaaaaactacgttaggcaataaactacattattactcttgggtcagggtttaaatttgtgaatttttccccttagaaacaaagggttaaatttggcccgacatggtggctcacacctgtaatcccggcactttgggaggctgagatgggtggatcacttgaggtcaggagttcgacaccagcctggccaacatggtgaaaccctgcctctactaaaaatacaaaaaaaaaaaaaaattagccaggtgcggtggtgtgcacctgtaatcccagctactcaggaggctggggcatgagagtcacttgggcctgggaggcagaagttgcagtgagccaagactgtgcctctgcactccagcctgggctcagggtgagactccgtctaaaaaaataaaaataaaaataaataaataaataaataaagggttaaattcataaaaagcatttactttataggcagtctaaataggtacattttattgaaggtttctgtcactaggacaatcctcaactgttctctttgccaagtcagtatgaagcagcaagtcctcctcccgcaagacaagacacatacttcagcttgagaatctgcacagctaagcagaatgcaggcccaaatggccaaagggaatccatctgacctgaagataattataaaaagctttgtttgggcagcttaatactagtcttaaaataatcagattgactcaaactccatatacattttggtagccttctaccctacacctcttcttcatctctttgattcctcctacctgcattactgacccaagttaatctataatgtgacaagtgttttaaggaaaaaaacaaccatcagacccacagattaatttgacagggatgaaatctgtaaggcctttatatcacataaaatgtcttttgtatggctgacaagtttcaaagaaataaactggtaaaatttttaaagcgtgtgccttgtttccaacttaactcattttcaaaactaaattttatttttttattttttagagacagggtctctgtcacccaggctagagtgcagtggtgcaatcatagctcactacagcctcgaatctcctaggctccagcaattctcccgcctcagcctcccaagtagctgggactacaagctttccaccacacctggctaatttttaaaaaaattttagtagagataaggtcctgctgtgttgcacaggctggtctcaaactcgtggccttaagcaatcctcctgccttgatttcccaaagtgtcgggattaatggtgtgagccactgcacccagccaaaagtaggtattcttaaaaatatctgtattccctcttaacaattatgttcacccaatgaggcatgagaaaacacaggcccctagtattttacatccaggttctcttttgcacagtgatttgtgacatgctaaccagtttaatttacaagtttctttttttttgttttccagctgtggatatgccctgtggagtgacaccggtacaaagaacttcaggtttcctaggtccccaaattctctaagcactaacagtttaaagacgtccttaccatacaccaccgtttgctctcatcattaccctgaacgcacttgtgtataatcacaaaggagtaacacggcacatgtgaataccgttaggattcttcacctctttttaagaagcaaaccaaaatacattaaaaaatgccaattacatagtaaactacatatttgccaatttttaaaatttatactatcaataattgagtttatttcaattaataatgttaacaatgacacatttaacattatgttagagctcaatttgtatatattaacatgtatttttaaataatttacgtatttatcgtcgaatcatgtatttttttaaagggggatgctcaactctctcaggcaaaaatgagcacctttccgaacaccgtggggagaggcagggatgcaggcagacatatcctaaactcaccctcccggcagcatcaaagtagccttcggccagggatttgttataatcagcataaggattcgggaaggccctttgagccatgacgccggaagcaagcctgcagaacaggggaaaaasagaaactaggytgagataggggcctcggccgagttgcgagggcggcggccggcgcccaggtatcccccttcctccagctccagggccatcgagccgtctcggcggtccgagtggacctcgggcccactgcggcccaactgctaggacatggcgccttcgcgaaaaagctgccagggcccttaacccacccggacaaagaggccccgttttgcaaccccgttcccacgcccgcgacttgaagcaagtgcgcctcccgcgtcctgaagcccttctcggccctggcctctcaccccgyagccccggacagtaacagaagggctattttaccgcccagttcctgccaggagggccaatcagagccttcgccgttcccgagacccgcccccttctctcttacagtttgttaaagacacaggcgtgtaatttctaaaggataacgcagggtattttaattactgggtagcagaagtgaggacctagaatcacgcggagatgtgaccaatatttcctacccttctttaatttttcttatttttaaaaagtcaaatttaagtccagagtcataagaagtatatatttttttaacctggagaagaaacagactgcttttagatctgaacatgctggtatttctgctgttcgcaatagataaaatttggcggggggtggggggataatgtctctccagggacttgccaatcttttcttttcatttcttaaaacaaacaaacaaaaaagcaccaccatcattaacaacaacaacaacaaaaatatgcccaaaggacaggatatcaaatagcagttgataatactttggggaaagcacatgaaaacacaaattacagctcttaggaaatttattctgttccttagcctaaattggactataatactggataacaaagctctaaaaaatactgaaaaccaacacagcaggagatccacaacattcaatttcaatgttttaacagtccctgctatckgaaacatttttctttcatttaaaattaaatcccacctggtacatattaggcccattctattgctcagagaattttggagttcagttaaaaagtcagcctcactctctccttttccttctctccggtttcaatgaagagtcctagctccagacctccaactggagaagctcagtctccaccccaactccctccctccttggcctaagtttgtccttctgaggctgccatcccaaactctactcctaatccctccccacacccaggtttgctcttttaaaatagttgctttcttaggaaatgtagttgctttcttaacctcatcaaattcatgaagatttagccgaggcccatggtgagtcttaagctggatatctctcatgttttaaaagatgggtgtttgaaggagcaactcacaagagagaaaaggaaaacgagagacattttatcaattattttttctttaatgattaaaggctatccatttatcccactcacagtctttaagcaattaaatattactgttgttaagcaaggcaggatggtaattgtatattttcatagtatgcctctatcttattttactaatcctttcccctaatgatggacattgtttctaacttccatactacaaataatattcttggaacatgtgcttttatgaatctgtgtgagtatccctgagacatacacccagcagtcaattgctggatcatatgagattctgtacttaatttccccaatgttgttagattgctttccaaaactgctggactagtttatattccctctaacagtatctattgttcactccaagagtattcactccaacatatcaattgtttctgtcatttccatctcctctccaacacttggtattatctagtgttctaatgtttgccattctaatgaataatgtagaatctcactgatgtttaatcttttagtttttctgtggctaatggtgttgaactttccttcatatacctgttagacaattgggctttacctgttcctttatttatttttctattagtgattgcattgttttcctgttgatttgaaagagttttgtttctttttttcccgtgtttgtggggtatattctgtatattaatctcctttcactttagttattgtagatactttctttagtttgttcacattttctaggatatcctttattgaatcacaatctttcatttcgatgaagttaaacccatctaattgtgacactgtgatttgaggatttagcttcatattcaaaatgtctttgtctactcatagactgcaatgacttcccacattttattttattagctttttacctcttatatttaagtctttatctggagtttacttctgaagatgatgtgaagcatgcgtctaaacggaagggaagtagaattatttagaatttaaatataatcaaagcatgtgacttgtaaacacccaaagattttaattgctggaaataatatttccctccctccctccctcctcccccctccccccttcccccctcccttccctccctccctccctgctttccttctctttcttccttcctttttgtcagagaaccaacccagagaatccctccttggttctgatacaaaagaaaagtatttaacatttattgtttgtatttatctactcaggctgccacacaaagaaccatagcaagtggcctgaaacaacagaaatgtatttttccacagttgtgaaggatagaagtctgggattaagatgttagcaggactgattccatctgaggcctgtcttgttggcttgtagatgccgtcttctcctatcttcacatggttgtccctcagtctgtgttgtctgtgtcctaatttcctcttcttacgacaccatcatagtggattatgacttcattgaaccttatcattctttcttttttttttttttttttgagacggagtctcgctctgttgccaggctggagtgcagtggcacgatctcggctcactgcaacctctgactccctggttcaagcgattctcctgcctcagcctccagagtagctgggattacaggcacacaccaccacgcccagctaatttttgtattttcagtagagacggggtttcaccatgttggccaggctggtcttgaactcctgacctcaagtgatatgcctgacttggctaaccttacttttctttaaagacccttctccagcagccacatgctgagatagtgagagttaggacttcaacgtatgaatttggggggcaacaattttagccccaaatagtacctatgctttcacctgtggctatggtggctgaacacatttgtggctaacacaaatttgacagttataattttttatggatcattctacttttgataaatttaggatgattttttaaaaaaatgtaatgttccttcttttaatcactgtagctgtcttgtgtgaactttcaggaaataatcattgtattattgcctctaaaactgaatacttctggaaatctgggatgattgataacagagaaaacaactatattctgagggcattttagttccattctcagactttaatttcaaaatgttataatgtatattagggtgaaaactatgttagttacaaagaggcctcaaaacataatctccaaaatacatagaaatgtatttttcttagttcagattagatttgctccatgtggccattcaggatcacagattccttccatctctgttcccacctccctcagagtgtgatgctctcatcaagtccatgctggtcataggtgtgtcggtattgcagcttgtgagaaggtcaggcacacccagagaagtgcacagaccaggaagtgggatttgtcacttccctcgtgttctactggtgaggatttagtcacttggccacctctagctgcccaggaggctgtgaaatgaagttctctgctgaacagctatgtgttcagctacaatgaaagaaggggaagactgactttggtggacagttaatgtcctccaatacatgatggcagttttagtaactgatagcccctgtctgccagcaaaggcgcagcatgctatagtgtctgtggtgttccttttgcctctaacctcctagcaaccatgccttctctgtttcttcctacctattcccttgatccttgttagctggtgggtctttggggtaaaagagagatcttgagactccatatcctatattttttctagaaactccccacctgctttcaaacacacatatacgcacacagacagacacacacatacaaaatcaagcaaatggtttttacttttttcacttttctcctaagtaccacttgtctctttttttgttgttgacattaccttattttctttttagctcaaagaagtgtaaagcaagagcatctaagcttgagtctaatatcaccacactgctggtttaacacccagctgggactgtgtactactgaagcaattttctgtttcgttcatagtacagaattcatggattgacaggagcaattgccagtggaggaaacaagaacataaacagatgtacaccaagcgcactayggaacacttttaatttcctggagacagtatttcttatggcactggcagcctttcctccctgccttgtcaggatcttattaatgtgctgacagattcctttctctcaatgtacctgctgggtgagagctgctattatatggaacacaggtgtgctggggtttccttgggagattaaaaaagattgtgagtccagaaagttggtaaaagatgtacaaacatttaagctttttcctttctccacctaacacttgtgatgggctctttatcaagcagtgttagtatgtgtctttaacgagmaaaaagaaaaggagacttccccctttgctgttgaaaatatgtgtctatattgcaytgttaaatttatgcaggtccccatttctctatatgattgaatttcataatgatgggaaggatggaaagtatccccttctggaggggtcttctcaggacgctgaattgttaatcaagtggattgtttttgcttccatcccatccamccacacaaaactcagccatggaaagatgatatattaccaaagccctgcattgtcccattctgatgtgttcttttggcatatctgatagttgtacaccctggcaggggagagtagccaacagagagatactcaggcctttgcagtccttcttttaagatttggaattgccacacagcaggtgctcttcagtcatttgaaagagaaaacttaacattttcctacttgcctagtagccacgttatttgtgcttcatttttcctttctatttgccttgagggcaggtgtataggtgagtaactgtaagtagaatgtagttcataagaagtggagaagctgctacttcagggcaataggaatttagcagtggaatttatagacctagaaggacacttcaagaatccagctggttcatcctgtgattgccttgtgggatcatcttgaactgaccatgctactggtcagccagtggctatggcaacagccagggctgcagctgcagagaggagctggcttctttaactggcttcttatacatcatcacaacacctgggctgagcctcaaagcctgggcccaggactgtttttggaactagctgagaaagggaggatgaaattctcaggactaatttcctgcctcctgagggacaggacttggcattcaaggagttatataaaacttttttccctgggtaactccragttcggaagcagcaattctcatacattgtatcaggagcttgtttaaaacacagattcccagacctcaggaggtttgggttgaatctgcattttaaaaatcttcatatgaaactcttgtagactacgttgaatccctttttttttttttcttttgagatggagtctcgctctgtctcccaggctggagtgcaatggtgcgatctcggctcactcagctcactctcgggttccagcaattctcccaccgcagccccctgagtagctgggattacagacccgtgccaccacgcctggctaattttttgtatttttagtagacacagggtttcaccatgtaccccaggctgatccgcctggccaagtgatccgcccgcctcagcttcccaaagtactggaattacagatgtgagccactgctcccacctgaatcttaatcttaatgtgattcttttgcagactatagactagagtttgacatatgctggtgagagagagagagagrgaaagagagagagagagagagagcacaattctgaatataaaagccatggttctaaaggttaacagactgaaattccttgagttatcgtgcccatcaatttacatttgttatatcatagtccctaaagtatttcctaatatttaaaaagaaaaaagaaatatcttttcactgcagcctaacccaatgtgtacttataggtggttatttcacttagatactttcagagaaagagcattcataacttcttttggcagtcaattagggttcttaatgccctcatgttttttccttagatctagactaaatattgatcaaccagaaacttaaacatattttgcgcagaataaagaacaactagtcaagataagtcttttwaagttataaaagtttaatttgatcttcttcaggyggaataattcaattttataccctttcatcttggggcctaagtactttaataaagatctatacstttaagccaggggtaagcaaagtaacgctgagggtaccaggaggcatgctgtcgctctgtgtgtaaagactcataaaccttccagagcaattagtggtgttggtaggaacacataaaggccaagaaggggaggttaatccacatccccttcctaataacagcatctactgttttcaagactttactgtaggataggtactttactcgaactatttcctttcatctttggaaagtagtctcatgagtaatactactactcatccctcttacatgtgaggaaacagagacttacatagttatctcactgttccaaggtcaccatcacgtgagtggtgaccccagaccttctgacttgagagccaatatgcttaaccatctactgtcctcctccttctgcccaggtagctccagccaccagcatttcctcccccttttctccctgctggacatcagggctcttwtatgctgccttgactatatgggtcctctcgtaactcccactctccattataaattcctaatttactctctctgcaccaagtctgtatttccctcactctgaatatttaggaacacagttcaaataaactggcatagctatatatgttgccagacaaaccttttacatctgtctgcaaaaatcacattatacctgtttccatgtatcttgtttattcacaaggttggccttacctggatatgtcaggattgggcctctaaaatgtccctgaattatattttctgatttatttgttggttcttttgctcattcattgatccatttacttattcttcagatgggtgttgcaaagtgtctatggagtgcatattgtattctaggtttgaggagtggcttctgaactgaaatatctcacaaataagaaactgaataagcaaacaaatgactacaatgtgcataaatgttatgtcttaagatactaaggaaaccatgagaactcatggtgggagagtcaccttacctgacctgaggcagtcagggaggtttcatagaaggtgacatctgagttgagtttggaaggaagcatagcgatgagccaagtgaaggtgatccaggggaacatcccagatggaagggtcaacctgtgcaaagatgagtcaggcaaagtcacagcactttcacataaatgccaggagcccagctggagcacagagaggggtcaaggcccagaaagaaaagaggttgcagagagacagtggtcttagaacttcttataagacatgacaaggagcttacactttatcctaaagacaatagagagccatggaatgattttgaaactggccaattgtcccatagaactgatgtttatgatttcttttgaataaacatagaaattgaccctcctggttttaaaacttgagacatttacrtttgtcttatctgagttcctttctcaggaaaccaaccatcaggcctcccagatagtatcaagggactgtaacttaccagatcaccacatctggacgatgagatgccagaaccacctatcatgactacctaactgactacctgctttctgttgactaactgctcttccttacccctccctaaattctgtattctcatatatgattgcatttctttcctgctataaacccccctaattttagtaggtgtaggagatagacttcagactgatttcccatctctttggcacctgattgaagccttcttccctggaaaaactgattgtctcagtgattggttttctgtgtggcatgcagcagaatctagactgcatccctagtgtttcagtaacagtttttaaaaatagatcttggccrggcatggtggctcacgcctgtaatcccagcactttgggaggctgaggtgggcagatcatgaggtcaggagatcragaccatcctggctaacatggtgaaaccccgtctctactaaaaatacaaaaaaaaattagccgggcatggtggcaggcacctgtagtcccaactactcgggaggctgaggcaggagaatggtgtgaacccgggaggcgtgagcttgcagtgagccaagatggtgccacggcactccagcctgggtgacagagcaagactacatctcaaaaaaaaaaaaaataaaataaaaataaaaatagatcttatgagacataatggacataagtaaacggtatctaaagtataccatttcataagttttgacttaggtatatacccataaatcatcaccaaaattgagataatgatcattatttctcacccccagattccctcataccatttataattcctccttcctgttttccactgacaatctctgtttcctagccatggacaatcactgatctgctgtctgaaaatatataatttctgcattttctagaattttgaataagtagaattttatagtatgtaattctgatttttttcactcagtataattatttttagatttatctatattgcaggtattaatagtcaatttctttctatttgtcagttttattccattgtatgaatttgcttctcaagatgtatttctccattcatctgttgatgaatggttgaattctatccagccattggctattacaaataaagctacaagtaacatgttcatactttgtatggatacagtctttcatttctcttgtgtagatatctaggagtataatggctgggtagtatgttaaatgtactttaagaaactaataaattgtttcccaaaatgattgtaccatttcacattcccaccagcagtttatgagatttctagttcctccacgtacttacttgtcaatacttggtatattctgcccttctaattttagcattctggtggatttgtagtagtatcgcattgtgattttaactttcatgtccctaattactaatgctgttacattttttaatgcttatttgccagccaaatatatatatatgtatatatatgtgtatatatatacatatatatatacacacacacatacacacacacacacacacacacacacacacacacacacacacaccctgtatatatatatatggtaatgtgtttgttcaaatctttagtcccttcccccattcccagcttttaaattgggatgtttatttacttaatattattcataatagctttgagagatctttatatataagtcatttatgagatatatgtaaaaacatttgttgatgttttctctttggcttcagcttgtcttttcrttctcttaaatgtctttgaagagcatctaatgactggtcactcacagaagtacacstgcccaacacccttgcttcaatctaggaccatcttatgtccttatatcatcttatcatcttacgttttatatccagagctgcccataggatgggctgaagcctcttttctttttttgagatggagtttcactcctgttgcccaggctggagtgcaatggtgcgatcgcggcttaccgcaacctccrcctcctgggttcaagcgattctcctgcctcagcctcctaagtaactgggattacaggcatgcaccaccacatgcagctaattttgtatttccattagagacagggtttctccatgttggtcaggctggtctcgaactcttgacctcaggtgatccgcycrccttggcttcccaaagtgccaggattataagtgtgagccactgcgcccagctagctcttttcaaatgcattgtaggtcaacttctcctttgctcaatctgccttcctcacactctggcttttcacagctcttattccagagggcactccaccataacctcttacatgccaatttctaccttgagtttgtttccaggaaccaagcctaaaaacaggacccatgccttttatttatttatttatttwttttttgcttgctttgaattcttactctgtaaatgaattgtgctgtctacacacacaaaaatatacattgaagcatgtctttgtttattcctagttacattttttggaaatgaagtataactcaagaatattcttaacctacattctcatttccttaaataagctattcttaactttctcagaaggacctactgaacaacatgtcactcttttgtcttttcgtgtggcttcagccggagtgctcaccccaccctgcttcttccctgttggcttactgtcacttctctctgccctctgacctcagccatttagatattcagttggaggacttgctctctgttgtcttacatctagctagtacaaatgatagatggaccttgatatacaacagattcaatatgagccacctgaggtttgtggcagctccataatttgtaaaagaagtggcttaggcggctgtcttgtgggttggaacacacagtgggcttgtctaagcctgcatttgcaaaacactttacataaaatagaaaagcatcagttgtacatattaaggaatgaggggtgaggactttggtggaaattacacagatcttcctccaagccatgacttgacattggtattcttccgatgacttgatgtccttatgtttaagattattttaggagttgtttagaacattgtgatgcttttttttttaaagcgaaatctgattcttattttttagaattcttttccccacagtttggcttttctcattcaagtgttcggatagtaaatttacctttgcacatgtttgtgctcccagctgtacatatcaattcgtaaaaagccaaatggagaacagtttagcatcagtgaaatgtcaggaaaatgcccagaaggcaccaacacaatactagagtttcaaattttgagaatggaattaggccacaaaatcagttttcttgcctgtgtcatggaccatggggatgtgtcctagttcttttaaaaaaagggcatctaaacctctctcagtacaacttacaggtctgtgctggggacctgtgagaaacctctggatttgagactaattgaatctgcgttgaaatggccttttcctttctttattaaaaaactgatttgctctaccacctttttctttggcttgcttgcattatccttttttttttaaactgcagaaatcatatattcttcaaggttagaagaaaaaaaaagaagagaaaaaatcagaaccgaatcatactttttgttagatcatgtgtataatattcccttttgtggtggtggaaagaactcacctmctctggtttagagggaagaagagtcagttgtcaatgcaaagttctattacaacatctccaaagccatagtttttatttgaaaagcgaggaagtgtgacaacatatgactgggcctgtgattatcattcagacccatacagtgaaaactctgcctgaatttgttcatgaccacatttcttttccaggtttgacagattgtagttttccaactgtctccttattaacatgctgcctgtttcctctatctacttttgctgcacctgctgtgatagtgattgttttgtgtatataggtaccattgccttcagagattaagggcgcacattgtgagcagaaataaaccaatggatttatcagtgactgtacaaattccacctatcttttggacaataactgaaagatctctcttgggaaagtaatgtttttctttgggaattgtgggttaaaaaactatgtttacagctatgcctatctcctcttcctcattccttcattccttctactttttgatttataattgtattccatagccagaaaaatgctaaagaggttaattttttatattataaagtaaaaaaaaaatcctaagtaagtttactgagatttttctagcaaaactagaagtcttagtgggcttcagattcatactcatgaatattcttttaattcttacttttatacaaatcttggaaattagaggtacaatagattattaagaattatgaaaatttattcattggagagcttagcaagaaaattgcttatgttaacatttgaaaaactatttggtctacctgcactgcaaacttatagatgatgggaaagcttatctttaaggcctggatcagtgcaaacagccctgaaaaaggaaatctcgagtttaatttacctttcagaactaaagaatatatattgcagaatttaaagagaaaaggatcttctctcctatctcctaatggatactctttgtacctagggtcagtctgacttggtgggtgcggtatttaactgctgctgaccttgctttgaatttctggctacagagcatttcagaggacagagcaaatcttctgttgggtgtcacataggtagatgcatgctggtgctggttcattcactggcacatcccaggaatgaatattttcttccttgcacattgaccttactctgatagactgacccagaaacagagctggtctagttttatatgtaagtaggaaggaaagttttcttccctggcacatacacctgctagcactctgacacttctaatttggaggtcacaggagcaagtaaataaatactatttaaggagcattaaaagaagaaaatttggtttaaaccaaaaaaatcataaagtggggaggcagagctacaaacaagctgtgggacttcaatcatacttgctttcttccatactattataagaataaaataaaaaaggaaggaagggagaggccgaggcaggcagatcacgaggtcaggagatcgagaccatcctggctaacatggtgaaaccccgtctctactgaaaatacaaaaaattagccgggcgtggtggcggacgcctgtagtcccagctacttgggaggctgaggcaggagaatggcgtgaacccgggaggcggagcttgcagtgagccgagatcctgccactgcactccagcctgggtgacagagcgagactctgtctcaaaaaaaaaaaaaaaaaggaaggaaggaaagcaggcaggcaggaagaaaggaagaaaggatggaaggaagaaggaaggaaggatgaagaaagaaataaacatatttcactttatacacagccttgcttcagttggagagtgattcarctactctcagctttctctgtaaccactcaggaataccatttagaaaaacgttcttgtagagctagagcctattgctaatagtaatattctggaaaattatggggagatatatatgcttataggcttacctctgacctacaaattgtctctaatagagactgtaattgtgcacaatcccttttttcctcttctgcatagccatgggaagattttctatgtaggcttatgtgaccttcctaggttgtctgaaataatcttgcatctagtacatgaatattacttaataaatccataagtatgtaccaagtgatttggctgcagaatcaaaatttttaaaatgatccatattaactacatctgaatttatccttgagctcctcttctcgttgtaaagtgcattgcacctataaagagaggagtgcagaatacttgtagaagtttgtggggggacagtgaaggacatttattggtctagttaatggtaataggatatatccaaagtrgaaataaaagagaggctgtcttaattcaatggtgagccagggctataagtaacaaaaggtggatttcttgggaaatgaatcaattcattttttgtaccatcaaactgggatctaaaatatgaaccccatgatacacatgtacacaatgaaactgttggtctgttattgtaattcttgaaaatctcagtttatagtttttgtgtgtaagataatattatccacagaatcctaggttgggagtctagttctgtttctgcttcagaagactcttgtctcagagaagacccttgaaactctgtggtccctaggatccctcatctgtaagatatagaatgttctaggggcaaagttggaaaatccccttgaggactatgatgttccagactaggacactttataatgcttccaggatgctaatttytggaggcaattagtaggtttgtaaacaaattcttttgaagtgaaggtttgaattgtgtattggcaggaattatttggataattgacttgaatgagtttaattggctataagagtttcatttttgttttgtttcttaggatgatgtaattactgcctgtgttgagttcctgcaggaatgatttaactgttggatattttgaaatgttctggttgtaaaagcatgtatttggtatctgtggttttttttttttttttttttttttttttttgagacggagtcttgttctgttgccaggctggaatggtgcgatcttggctcactgcaacctccacctcccggttcaagtgattctcctgtctcagcctcccaagtagctgggactacaggcacgtgccaccatgcccagctaattttttgtatttttagtagagatggggtttcactatgttagccaggatggtctctatctcctgacctcgcgatccgcctgccttggactcccaaagtgctgggattagaggcatgagccaccgcacctggacatgtttgtttttttcctggtgttctgagtgtcctgtggcaatgggaagttaccatctcacctccactgttaaggcaccaagtttctacctcttggcccctaagaaatgtgggatcaccttgaacagatctgtcagccctggtgagtttcagatacctgtctcctaagaggaatcttctgctaggttaggggagggggtcctataacagctggaacataggccttcccttcattctgttaacctgaggaatagtcatatcattctgctctctcagttcttgtttcttaacttagcagggaattcagtggagatttaagggtggtagcaataaagcttgtgagagtgcttatgagccactgacagcaaccaacactattgtaagggagttgctagataaccaggaacctggtggctgggcagaagccgacaaagttgactgctatgaatttagattgtggcctaccaatatatgaatagacaagagttagacttcactatccctccagaattctttttctgtgcaataccatgttatcattatataacattcatcatttggaaatctcaaaataagttataagatatagcagcatttgmtggctggaaaacctttagacatagttacatagcttaatgacccaaaactttctgctttatgtacatatgaaagtagaggttccaaaatgttaagttaattgctatcgtcctctagcaagtctctacagaagtcagaaataggacagctactgtgaataggtactggataatttttcttttttaagaaatgcaagtaaaagcatttactacgtttactatcactgaagtttgatcatctgcagaaaataacttttaatgtgttctttagaatgaagtatacatagrtagtatctgccttctttatttcaccatgaagcctagagggcaactggtagcacagaatttagaagatacttttttttttttgcctatcttgcttttattaattttagaatctgtaagttctttgagaaaggttacatactcaggatatgtagtaagagtgcacaaaaattgaattattaataactaaaatgagaaaagaagtttatattgcaggggttcttaaaacttttttggtgtcttgactgctttggctatctagtgaagcctattaacccctcttggagtactgttttaacaaacaatataaaatacaaaggattcaaagaaaacatatcacattgaaatacagttatacaataacttaaaacattgtgatagagtaatgtgtatgcttcttatttacacattataaacagaatatagyggctgggctaataataataaattcaaagtactgacacatagattttcaagacgtctgcaacaactgcaataataaataaaagtatctataagttctatctgtgataaagtcacaggttctgctaataataccgtgttttggtgcctgcatttatatttgaacagaaaactaaatttcagttatatattagtgaaaataaatgatggaattttgcttttcaattcaagtttatggatcctttgaattttctccctggactcctctctgtgggttcaaagtgaagaagtcttctgttgggttctcagctcatcttttcatcacttgcttctcttagataatgttcaaatactggttacaaataggagaataaatgatgagttcattggacgagaattgaggggagttagcagaagatttctgtaagaacacagtctgggtgtcccaaagcaagttataaagtaatacaatttttcttcgatcccacttaccatcctttctgcatcatcttcctccaagtcaggtgctcagtgtttctgagtgagatgaacaattcaatcagatgtaattgttagtcacaatgttttagtcttcccatggatgtattaagtatatatatttacatatattctacaggaagtggcactatttaatcaaggaaatccaatgccaataatggattttggggatctacccaggatagataggtaaagggatatttttggccgttactgacgcctttcagtcacctaatgattggctatttgtcttgcctatttataagtcagttgtaagtttcattgggcaaacaaaggaagttgttgtttttcagtctgctgttggttttacctttcctggcagtaacgtttccctaggggcaagcaaatactccaagttgaacatctcatttacagcactgtcatttggggtgatagttatttgtagtttgtagaggaattatttcattcatatgagtgaacagatgggttaataaagctgtctgaagttgcaaactggtacacagactatttcagggacatccatcatggtgtcatgttgctgaatgctgaactaccaatagactattagattacaagcaccttgaaaaccagaattaaacctaatctaaacccaagccatagcaacagagtatcgaggtaggctttacttctagtcttcaagaagtgaaggtagcttggcatctgctgctatcatgcaggcattagaacatttaaagaaaacatgtaagctgtgacaatgttaatttcataagaaaaaaatgggtttgtataattttattctgaaatgtgtttcctttattttctaactataaaatggttttgacatcttcaaaaacatcatcgcataratgcaaacatattttttaaagaactaacactttatagactttaggtgaagggattctgcaaggactgtgacatccaatgggagggtgcttatgtgtggtgtgtatagagacctaataagaactacttcaaagttttacagaacttgtcagaagtcttataactcgtaccaaggggaagataacagcaatcaaagttgtaaataaactagatgttgctggctagcaagatttctctacatagaccctaaacggccctattgtcaagatttgtgtgggagatgcaaaggcaaacacctatcctgtgtgagcactttcagcttcaaatatcatttcaataaatgaatgcaaaaaatagtaaaaaaaatacagcaggatcatggctgggctaggtctaaaataacaaaattatttgttattttaattgtgtgcacaagctgtctcctttttgtagtgagctctgttttgtcttacacttcactgaagtatgcactgcatactgagatttgattgaagccacataagaaggaaagatttggaaggcagtgagggagtctgccatggttgctggttctctatgaggctcaattgttggggtgcacatggcatgcaacactgatgcttgacaatataaggcaatggctttcagctatggctgcacattataataacctagcaagcttctaaaacataccaattaaattagagccttttggggtggggttctgtctttggtatacactaaaaacactccaggtgattctaatatgcagccagggttgaaaatcattggtaaaatggatgcaaatatcagtccataaactcaaatgtgcaagaagcagaacytaattttttattcccagcctcaattttgctactaacttcattcttttttatggtttacttaaccctgtagttcagagttcttatgcagcgcaaaattttggggagcagaggaacctcttatttgtaggtcatctgtccactaaagttaccattggatgtcccatcaccccatcaacatgacacttttggtccagtggtgcggcatgcttcgagaactggcatctttctgtgatgtgcctccactcaagaactaggtctgagcctaagggatgccacaaaactcagtagtcacacaagtcatattttaatgtataattactgatgtctaaattaatgcaaaaaatccacaatgaacaaaatatcggaagtttaaataaaaacagtgtcagtacccactctgtccccagcttttcttcttgtggtaggaaatactgcctctctagcaatgtgcagactgcagttttttcctgcttgttcattccagttgaggaaaatgtcatttaatcccggaaaaatatttttccttttgtgtttctgtcttgcatatttaatctactctggagaatattcttttgtacacctgtttccaaattaggtgtaaagttttggaaaagagtatatgaagaaaagtaytcagtaggcaacttgcaatgtttgctttgccatttctctcttatttgtcaccgagcatagaattcactacctgcttgaggtatatgtgactgtgtatgtgtgtgtgggtgagtgtgtgtgtgtgcatgaagggatagagtgccataagggtctccttacctccctcttttctttttttcctccctctctcactccctccttccttaccttcctcccctctttccctccctgtgttcttccttccttgctgcaaaataaaggcaaattggtaggcaacttaagatattttttattatttatcaaatattcagatactatttttgccaacatgccctgtagtccatacagggaatttcttggacttgcacctcaccaaaaacttccacctagcaggggcactagaagcttctgtggcatctgtccctgggttctgtgatttgcacaagagaatgctcaacttttccactccacattttactatgtaaggaatkaaaccaaaactgtgtatgtctctctgtctccagagcctttggtggaaacaagtccttctgcctttgttctcctatctctcagatggtggttgataacccccatcttgttatcagcatttcctgcctctattccttgggtgtctttgaataaataatttccttttcttctagacacaaataagagctaacataggaattaacttaagcaaattgagtcttcttgaggagctcctgtgcaaagatgtctggatgtcagcagatcatgtttcttggcaagagagaaggacaatgaattcatggaggctagatcatctagggccctatttgcaaggaatttggctgtttctcagcatgagatgagaaggcatcagaggatactgaatagagaagtgacataacctacatagaacttaaccttagktgcactactctcttgctagcttcctgctcttcctccaacatgcaggcacacttcctcctcagggctttggtacttgctcttctatttgcttgagacgtttgycccacagatagctgcacggctcagtgcctcaccttctcagcarcatccttcctggycaccctatttaatacttaaacttcttatactttttcttcgctactttattttccttcattgcatttatctaatactatgtgttaactgtctatgtcatttattttctgtcaaagaaaaataattatattctggacagctggtctgttttttatcaaatagggaatggaaatcttttaactgattatatctttccttcttttatttttggaattagctctaataagctcagcaaactttgtgtaagatctaattaaggggtatcttcttgtatgctaactcttccagatttcatcttactatttggtcatcattacatttgacccagatttaaatttttaaaaaatgtattactgttttatatctacttttgtttcaaataatctttaagcaaggcatgtcataaagaagaatttatccttatatctcctatacccagtgaagtttgtgcatatagaacatgttaataagctgaatatgatatgtaaaatgtaataaaatgttaaaaatattcatatcctatttacctcgggaggtttatactttatttttatttaatttttttataatttcaaattttatgttagatttgggggtaatgagcaggtttgttacataggtatattgtgtgatgccgaggtttgggatacaaatgatcccatctcccagatactaagcatagtacccaacagtttttcaacccttgtccccatacctctctccccactccaacagtcttcagtttctattgttgccatttttgtgtccatgagtactcagtgtttaggtcccacttataggcaagaacatgcagtatttggtgttttgttcctgcattaattcgcttaggataatagccccagctgcatccacgttgctggaaagaacataatttcattcttttttgtggctgtttagtatcccatggtgtatatgtagcacattttctgtatccaatctaccattaaaggcacctaggttgattccacgtctttgctattctgaagagtgctgcaataaayatgtgcatgcatgtgtctttttggtagaacaatatatacatayatmtatatatatatatatatatatatctccagtaatgcagtcatggggttgctgggctgaatggtagttctgctttgagttctttgagaaatctctaaactgctttccacagtggctgagctaattaacattcccatcaacagtgtataagcattcccttttcttcacagcctcgccagcatcggttgttttttgactttttaataacggccattcttactggtatgagattgtatcytattttggttttgacttgtgtttctctgatgattagttatgtggagcattttttcatgtttgctgacgtatgaagatgacatatgttgtatgtcttcttgttagaagtgtctgtccatgtcttttgcccattttttaatggggtttgagcatagaatatttttccactggtttgtgtcatctattatttctttgagcagtgttttgtagtagttctccttgtagaaatctttcacctccttggttaaatatatttctaggtattttattttatttttttctgtggctattgtaaatgggattgcattcttgatttggttctcagcttgagtgttattggtgtatggaaatgctagtgagttttgacactgattttgtattgtgaatctttacaaagttatttatcagttccaggagccttttggtgggtctttagggttttctaggcgtagaatcatatcagtgaagagagacagtttgacatcttctttacttatttggatgccttttatttccctctcttgccttcaaaccagagatctatctaggcatggagctgggaaacctttctggccccaagttctctgcatggggatggaaggcagcctaaattcttattccagtagagtgggtgctctagatgcttggagatctgcctgggtgtggagtgtagagggccttgctggaccacaatctctgcacagatagggcgggagagctcaggctggcaagccaggataacaggtactcttactgcttggagatatgcctgtgcatggagtaaagagggctgtgcttcaccatggtgtctgaacaggatgggtgggctggctcaggctgttgattcaggtgagtggatgctccaaatgcctggatatctgccagagggtggagcagagagggcctgggcttcaccacagtctccacacaggaatggttgggtggcttggtatgctgatctgggtgaatggtagctgcaactgctaggagatctgcctgggcatgaagcagagagggccctgctgtaccatgatctctgcacaggcagggtggggtatcttaggttgctagtcaatgtcaccaggtgtttcaaatacctggatttctgcctgggagtggagtggagagggacccactgcaccrtgatcccagagaaggaggttgggccacccagaaatgatacacataaacctgttctatgtctccaagctggtcctggctgcaagtctcctcatccaggagaaactggatgagcagctttcctccagctccaggcctgtgacaggggagagcacaattccagtgcctactgatgaggcactttctrtaattctggctgtagagacctctacaccactccagagcaagcgctccaatctctggcccaagacaaaaatgcctgtgcagccacggtgccagattgccaaagaatggctgactttgtatgcactcgggttaaaaacggcatcctgctttcagtcctgggtctgagaaaatgcctgcagcttttccctgtgtcttttcctctcagcacttccaagcctctctccaagttagctccaggacttgggagaaaaaagtgctctccctcagcctaggttgctgggatccccagtggaaaggtgagtagtagagggaggctctcctcccctctcacgtactggggcttcacacattgtcagccagatgccatcatgagggctgtttgcccacgttcttctccttgggagctggagtatctttcacaatatcaggggattcgtgttgtattagtttgttctcacactgtatgaagaaattcccaagactggataatttataaggaaaaaaggtttaattgactcacagttatccacggtttttaggggaggcctcaggaagcttacaattatggtggaaggcacatcttcacagggtggcaggagagagaatgagtgccaagcaaagggggaagccccttataaaaccatcagatctcatgagaactcatccactatcatgaaaacagcatgggggaaccgcccccatgattcaattatctccacctgatcccrcccttgacacctggggattatcatttcaagattacaattcaagatgagatttgggtggggacacagccatgtgatatcatcccaccactggctcctcccaaatctcatgtcctcaaatttcaaaacacaatcatgccctcccaacagtcccccaaagtcttaattcattccagcattaacccaaaagtcaaagtccaaagtttcatctgagataaggcaagtctcttctgcctatagggctataaaatccaaagcaagttagttccttcctagatacagtggaggtacaggccttgggtaaatacacctattccaaatgggagaaattggccaaaacaaagggtctacagtccccatgcaagtccgacattcaatagggcagtcattaaaacttaaagctccaaaatgatctcctttgactcttatgtctcatatccaggtcacactgatgcaagaggaaggctcccacatccttggcagctctgcccctgtggctttgcagggtgcaggctcctcccagctgttttcacgactggcactgagtgtttgcagttttccaggcgtactgtgaaagctggtgatggatctaccattctggggtctggaggatggtggccctcttctcacagctccactaggcagtgccccagtggggactttgtgtgggggctccaaccccatctttcccttccacactgccctagcagagggttctccatgagggctctaaccctacagcaaatttctgcttggacatctaggtgtttccatatatcctctgaaatctaggtggaggtccccaaacttcaattcttgacttctctgcacccacaggctcaacaccatgtggaaactgccaggcttggggcttgtgccctctgaagccatggccagagctgtaccttgggcatttttagccatggctagagtggctgggaaacagagcaccaagtctctaggctgcacacatcggggggccctggacctggtcccaggaaaccatattttcctcccaggcctctgggcctataatgggaggggctgccatgaaggtcactgacataccctggggacattttcccattgtcttggtgattaacattctgctccttgttacttagcaaattgctgtgataggcttgaatttctcctcaggaaatgggtttttcttttctattgcatcatcaggctgcaaattttccaaacttttatgctctgcttcccttttaaacataagttgcaatcccaaaccatatctttgtgaatacgtaaaactgaatgcttttaacagcacccaagtcacttcttgaatgctttgctgcttagaaatttcttccaccagataccctaaatcatctctctcaagttcaaagttctacagatctctagggcaggggcaaaataccaccagtccctttgctaaagcatagcaatactcacctttattctaattcccaacaagttcctcatctctatctgagaccatctcagcctggacttcattgtccatatctctgtcagcattttagtcaaaaccattagacaaktctctaggaagttccaaactttctcacatcttcctgtcttcttctgagccctccaaactgttccaacctctgcctgttacccacttctaaagtcatctccacattttcagctatctttacagcagcctcccattacccagtaccaagttactgtattagtctgttttcaggctgtgatgaaaaaattcctgaaactgtgtaatttataagggaaaaaggtttaattgactcacagttccacatggctggagagccctcaagaaacttgcaattatggcaggaggcacctcctcacagggtggcaggagagaaaatgagtgccgagaagtggggaaagccctttatatagccatcagatcttgtgagaacccactcaccatcatgagaacagcatgggggaaactgcccccatgattcaattatttccacctggtcccacccttgacacgtggagattatcacaactcaaggtgagatttgagtggggacacaaagccaaaccatattaccaattttccttctcgaattaatgctcacagagttgatctttgtgcaatatcttgctatttccaagtggtcgaggcacactgaaagcttctaatccaccatcttgggaaaaaataatctctctctctctatatatatatatttttttatatatatgtatattttatatatatataatatatatataaaagagagatatagagatatctatgagatacatatagatatatatatttatatataaaagagatataaatatagagatatattttttatatatatatacacacatatatacatataatgttaaaaagcatcttttcaaataaatgctgcttgcatatgttaatttagtttgaacaattttggagtggatttcaggacaggagagagaaaaaagcaaagagcaaaacaactccactctaaagggaagtcatagttcctgggtctgagtggtgcttcttgcctccatcctgccctgacccttcatagtctcgtgactttcacattgctctaataagatatcaaaatttgagtgaggggttcagttcctatctctgttctcccagtaatgcaacaaaaagggtaacttgtccctcctctttacattttaaaataaggaagggttgaattagctcagtgtttctcaaggcttgattcaccttaattgactgaagagctttttaaaaatcccaatttctttggcccttgtcatagacattctgattccttttatttggcagaagacccaggcactgacctaatttttaaaagttctgtatatggttctcttgtgcaggcagaattgagatcattggctttgctaaggtatctccagcactgacatcctgtgactaggtggataatttaactcttcctaactctacagaaaaagtgagaagctctagagattccactggtaacctcttcaaggttatgtcacatgctgccactagatggcgcaggcaattcttgggacggaggagattctggttatttgggattttcattttccctgtgcaatatacttgagacactcagcttaagaagcttcgtgggggaatgacattttagctcctytcccaaagctcgaggcccagaaggtagagctgttttgcttgacaagttgatagagagagactcattaaataaacgttctatcgtctgaagggagaaagtaaaacccccggcataaatattagttcacatttttcttattatttccagcaggtgtgtgttctccccttctctgtgtctttctctctcttactctttgttggtggcctctttttacctttatcttttcccttttcttggtttctgtctgtaaccactgtttgtaaactggttatgatgaatttacaggtggattaaatcttagtttgccacctttgtsgtagataaaaattttaggaatccaaaaacgatacctacacaatattcttagaagggtgaacacattcaggttacaatggaaaaattcttattcaggagacttcctctgcaatgttgtttgttcatagcagctgtggtagcacccgccaaatccaggaagaaagaattttatgccgtatcagggaaaaacagtcaaaatcctttcctctttacagcacaattcgggtgacggccaaagctcttagtgtacatacaagtaggggtttttgcacaataatagggtgtgcttctctgatgcttttcactggaagaccacatagcacattgctgctttattccataaagctgcctctttcccctgggctgtcagaataggaagatgtgttgtgattttttttttcaaagagattgcattccttccctggctttgtcccagcccagctgcttgttgttcagggagatgctgcgcttttggtgccaggatataccactgtgctttctttttccctgagtgacatatactgatgggtcactgcctgaaacagtggaacaaggcatggtgtgtgtccacccgtgaagatccattgtttattcttccctagtttccatctagcagcatcaggttcccatcttcattaagaaacaaaacaaccgaccaaacaaataaaaccccacaaacaatgcaaaataaaccaccacaaatgcaagaaaaaagtcttttttaaattttacattaatagctaacgttgagtgcaaactatattctggatattgttttaatcacttgtcatatgttgtgtcattaatcctcacatcagtgtcatgagctaggtcctattattatccccattttacagatgaagaaattgagtaaaagtagggttaagtaagttgctcaatgtcatgcagctgataagttgctgagccaagctctgattccaggcaatctgacacagtacaccttaactctgtatctagattccaaagggttgtgtattggagtaacaagcaagtaaaggatagattctccaattggatagttgttagaaaagggtgtatttcctgttaatgtagctatatttcttttggtataagattcaacagatgctccaaacccagttctaccccatgctggaggacctaagtacattgtggcatacccacttcttactggcagaaaaattaaaaggcrggaaacttccttctcagttgtgactgggatcatttagtgtgtctgcacaatcctaaataaatttggaaagtgaacaattgggaggacgacctactttttttttctgactcacttctacactacttaaaagtaaataggaataggggctgatatataaggcatttgggagctttttctcgttggtcatacattaacctctttaggtcaacagaagtctggaagaaggaggccaccacacactctgcctaagagtgtgtttttagtgtaattcatgctgtattgggcatgaagaaagcagacagctttctgaaatgagctatttccaagggagtacaatcatattgcaaagaaagcacctagaaggaagaaattcatcctataattagggctctgaaatattttcaatcaacatataggttggtgcaaaagtaattgcagtttttgccattgaaagtagtggccaaaactgcaattactttagcaccaacctaatatcatgaagaaagaaaagaagcacagtccttgctagaaaacagtgataatctcaatagaagaatctaagagctagaagactcagttgraaacagcagaatcsggccaaataggaacagctccagtctactgctcccggcgtgagcgacacagaagacgaatgatttctgcatttccaactgaggtactgggttcatctcactggggagtatcagacagtgggtgcaggacagtgggtgcagtgcactgagcatgagccgaagcagggcgaggcatcgcctcacccgggaagcacaaggggtcagggaattccctttcttagccagggaaaggggtgacagagggcacctggaaaattgggtcactcccaccctaacactttgcttttccaaccgtcttagcaaacggcacaccaggagattgtatcccacacctggcacgaagggtcctatgccyacggagacttgctcattgctaatacagcagtctgagatcaaactgcaaggtggcagcgaggctgggggaggggcacctgccattgctgaggcttgagtatgtaaaaaaagcacagggaagctcgaactgggtggagcccaccgcagctcaaggaggcatggctgcctctgtagactccacctctgggggcagggcatagccaaacaaaaggcagcagaaacctctgcagacttaaatgtccctgtctgacagttttgaagagagtagtggttctcccagcatgcagctggagatctggaatggacagactgcctcctcaagtgggtgctgacccccgaatagcctaactgggaggcactccacagtaggggcagactgacacctcacatggccgggtactcctctgagacaaaacttccagaggaacgatcgggcagcaacatttgctgttcgccaatatccgctgttctgcagcctccgcttctgatacccaggcaaacagggtcaggagtggacctccagcaaactccaacagacctgcagctgagggtcctgactgttagaaggaaaactaacaagcagaaaagacatccacaccaaaaccccatctgtatgtcaccatcatcaaagaccaaaggtagataaaaccacaaagatggggaaaaaacagagcagaaaaactgaaaattctaaaatcagagcgcctcttctactctactccaaaggaacgcagctcctcaccagcaatgaaacatggagaatgactttgacragctgagagaaggcttcagacaatcaaactactccaagctaaaggaggaagttcgaacccatggcaaagaagttaaaaaccttgaaaaaagattagacaaatggctaactagaataaccaatgcaaagaagtccttaaaggacctgatggagctgaaaaccaaggcacgagaactacgtgacgaatgcacaagcctcagtagccaattcgatcaactggaagaaagggtatcagtgatggaagatcaaacgaatgaaatgaagtgagaagagaagtttagagaaaaaagaataaaaagaaatgaacaaagcctccaagaaatatgggactttgtgaaaagaccaaatctatgtctgattggtgtacctgaaagtgacagggagaatgggaccaagttggaaaacactctgcaggatattatccaggagaacttccctaatctagcaaggcaggccaacattcagattcaggaaatacagagaacgccacaaagatactcctcaagaagagcaactccaagacacagaattgtcagattcaccaaagttgaaatgcaggaaaaaatgttaagggcagccagagagaaaggtcgggttacccataaagggaagcctatcagactaacaatggatctctcggcagaaactctagaaggcagaagagagtgggggccaatattcaacattcttaaagaaaagaattttcaacccagaatttcttatccagysaaactaagcttcataagtgaaggagaaataaaatactttatagataagcaaatgctgagagattttctcaccaccaggcctgccctaaargagctcctgaaggaagcactaaacatggaaaggaacaactggtaccacccactgcaaaaacatgccaaattgtaaagaccagygaggctaggaagaaagtgcatcaactaacgagcaaaataaccagctaacatcataatgacaggatcaaattcacacataacaatattaaccttaaatgtaaatgggctaaatgctccaattaaaagacacagactggcaaattggataaagagtcaagacccatcagtgtgctgtattcaggaaacccatctcacgtgcagagacacacataggctcaaaataaagggatggaggaagatctaccaagcaaatggaaaacaaaaaaaggcaggggttgcaatcctagtctctgataaaacagactttaaaccaacaaagatcaaaagtgacaaagaaggccattacatgatggtaaagggatsaatgcaacaagaagagctaactatcctaaatatatatgcacccaatacaggagcacccagattcataaagcaagtccttagagacctacaaagagacttagactcccacacaataataatgggagactttaacaccccactgtcaacattagacagatcaacgagacagaaagttaacaaggatatccagaaattgaattcagttctgcaccaagcagacctaatagacatctacagaactctccaccccaaatcaacagaatagacattcttttcagcaccacaccacacctattccaaaattgaccacatagttggaagtaaagcactcctcagcaaatgtaaaagaacagaaattataacaaactgtctctcagaccacagtgcaatcaaactagaactcaggattaagaaactcactcaaaaccactcaactacacggaaactgaacaacctgctcctgagtgactactgggtacataatgaaatgaaggcagaaataaagatgttctttgaaaccaatgagaacaaagacacaacataccagaatctctgggacacattcaaagcagtgtgtagagggaaatttatagcactaaatgcccacaagagaaagcaggaaagatctaaaattgacaccctaacatcacaattaaaagaactagagaagcaagagcaaacacatttaaaagctagcagaaggcaagaaataactaagatcagagcagaactgaaggaaatagagacacaaaaaacccttcaaaaaatcaatgaatccaggagctggttttgtgaaaagatcaacaaaattgatagaccactagcaagactaataaagaagaaaacagagaagaatcaaatagatgcaattaaaaaatgataaaggggatatcaccactgatcctacagaaatacaaactaccatcagagaatagtataaacacctctacgcaaataaactagaaaatctagaagaaatggataaattccttgacacatacaccctcccaagactaaaccaggaagaagttgaatctctgaatagaccgataacaggctctgaaattgaggcaataattaatagcttaccaaccaaaaaaagtccgggaccagamagattcacagctgaattctaccagaggtacaaggaggagctggtaccattccttctgaaactattccaatcaatagaaaaagagggaatcctccctaactcattttatgaggccagcatcatcctgataccaaagcctggcagagacacaacaaaaaaagagaattttagaccaagatccctgatgaacatcaatgcaaaaatcctcaatataatactggcaaaccgaatccagcagcacatcaaaaagcttatccaccatgatcaagtgggcttcatccctgggatgcaaggctggttcaacatatgcaaatcattaaacataatccagtatataaacagaaccaatgacaaaaaccacatgattatctcaatagatgcagaaaaggcctttgacaaaattcaacagcacttcatgctaaaaactctcaataaattaggtattgatgggacatatctcaaaataataagagctatctatgacaaacccacagccaatatyatactgaatgggcaaaaactggaagcattccctttgaaaactggcacatgatagggatgccctctctcaccactcctattcaacatagtgttggaagttctggccagggcaatcaggcaggagaaggaaataaagggtattcagttaggaaaagaggaaatcaaattgttcctgtttgcagatgatgtgatagtatatctagaaaacccatcgtctcagcccaaaatctccttaagctgataggcaacttcagcaaagtctcaggatacaaaatcaatgtgcaaaaatcacaagcattcttataccattagcagacaaacagagagccaaatcatgagtgaactcccattcacaattgcttcagagaataaaatacctaggatccaacttacaagggatgtgaaggacctctttaaggagaactacaaaccactgctcaatgaaaataaaagaggatacaaacaaatggaagaacattccatgctcatgggtaggaacaatcaatatcgtgaaaatggccatactgcccaaggtaatttatagattcaatgccatccccatcaagctaccaatgactttcttcacagaattggagaaaactactttaaagttcatatggaaccaaaaaagagcccgcatcgccaagtcaatcctaagccaaaagaacaaagctggaggcatcacactacctgacttcaaactatactacaaggcaacagtaacccaaacagcatggtactggtaccaaaacagagatctagaccaatggaacagaacagagccctcagaaataatgccacgttayctacaactatctgatctttgacaaacctgacaaaaacaagcaatggggaaaggattccctatttaataaatggtsctgggaaaactggctagccatatgtagaaagctgaaactggatcccttccttacaccttatacaaaaattaattcaagatggattaaagatttaaatgttagacctaaaaccataaaaamcctagaagaaaacctaggcaataccattcaggacataggcatgggcaagggcaaggacttcatgtctaaaacacccaaagcaatggcaacaaaagccaaaactgacaaatgggaactaattaaactaaagagcttctgcacagcaaaagaaactatcatcagagtgaataggcaacctacagaatgggacaaaatttttgcaatctgctcatctgacaaagggctaatatccagaatctacaaagaactcaaacaaatttacaagaaaaaaacaaccccatcaacaagtgggcgaaggatatgaacagacgcttctcaaaagaagacatttatgcagccaaaagacacatgaaaaaatgctcatcatcactggccatcagagaaatgcaaatcaaaaccacaatgagataccatctcacaccagttagaatggcgatcattaagaagtcaggaaacaacaggtgctgaagaggatgtggagaaataggaacaattttacactgttggtgggactgtaaactagttcaacaattgtggaagtcagtgtggcgattcctcagggatctagaactagaaatatcgtttgacccagccatcccattactggatgtatatccaaaggactataaatcatgctgctataaagacacatgcacacgtatgtttattgtggcactattcacaatagcaaagacttggaaccaacccaaatgtccaacaatgatagactggattaagaaaatgtggcacatatacaccatggaatactatgcagccttaaaaaatgatgagttcatgtcctttgtagggacatggatgaagctggaaaccatcattctcagcaaaccatcgcaaggagaaaaaaccaaacaccgcatgttcttactcataggtgggaaatgaacaatgagaacacatggacacaggaaggggaacatcacacacttggggcctgttgtggggtgggggtagcgggtagggagagcattaggagatatacctaatgctaaatgacgagttaatgggtgcagcacaccaacatggcacatgtatacatatgtaacaaacctgcacattgtgcacatgtaccctcaaacttaaattataataataaacaaaaagaaaacagcagaatcacagggcaaatgtccatgggagctgatgaagagagactcagtattcaaagacttttacaacttcataagcaaagcttaagactcagygataggctcacgtgatactcccggtcaaacctaatgagacaaggayggtaatggggtttgcctagaacaacatagaaaggagctattaccagatccacctggttgagggtaaatacaattcctkaatgagggaggactatagactaaactcaaaactgactgaaatattttacaattgcaggcatatataccttgtgtatttttcttatttacacattgtggtttcaatartcttcaataaatttattcacatcaacatcattctctagttaaagaatttctcttaagtcttattctacatgagtcattgaaccccaaattgagccaaatttcagattcaccaattaattgcctcctgatatttccttaccacccacaggcagctcaagttggacatcattaaaagtgaacttaccatttttccctagccctcttcattttcctagagaccacatttcagagaatgacaaaaccagctgcattgtttctaaagcccgaaacatggatggtgacttttatgtgtgcaaatatttacttatgtttttcttttattattattttttcaacttttattttggattcagacgttacatgtgcaggkttgttacatgggtatattgtgtgatgccaaggtttgggatacaaatgataccatcacccagatagtgggcatagtacccaacaattttccaatccttgtccccatgcctccttccccactccagtattccccagtttctcttgttgccatctttatgttcatgagtacccaatgtttagctcccacttaaaagtaagaacatgcagtatttggttttttgttcctgcattaattcatttaggataatggcctccagctacatccacattgcagcaaaggacatgattttattctttttttatggctgtgtaatattctatggtatatatgcagcatgttttctttgttcaatctaccattaatgggcacctaggttgattccatatctttgctattctgaagagtgctgcaatgaacatgtgtatgcatgtgtctttttggtagaacaatttattttcttttggatacatacatatcctccagtagttttatatatatatatatatatctatatatggagagagatatatatatatatggagagagagagatatatatatggagatatatatatatggagatatatatatatatagatatatatagagagagatatatatatatggagatatatatatatggagagatatatatatggagatatatatagagatatatatatatttatatatatatggagatatatatatggagatacatatatgtggagatatatatatggagatacatatatatggagatatatatatggggagatatatatatatgtatggagatatatatatatatctctctctccataatgggattgctgggtcaaatggtagttctgctttgagttctttgagaaatctctaaactgctttctacagtagctgagctaatttacattcccttcaacagtgtataagcattcccttttctccacagcctcaccagcatctgtgttttttgactttttaataacagccattcctactggtgtgagatggaatctcactgtggttttgacttgcatttctctgacagttatgtggagcattatttcatatgtttgctgacatatgagaagacatacgttgtatgtcttcttgtgagaaatgtctgtccatgtctgttgcctgttttttaatggggttaagttggtttttgcctgttgaattgttgaagttgcttatagattccagatagtagacctttgttggatgcatagtttgcaaatattttctcccattctgtaggttgtctgtgtactctgttgatagtttcttctgctgtgcagctctttagtttaattaggtcccacttgtgaatttttgtttctgttgcaagtgcttttgaggacttagtcataaattctttcccaaggccaatgtccagaatggtgtttcttaggctttcttctaggattcttatagtttgaggtcttacattaaatctttaatccatcttcagtggctttttgtgtatggtgaaaggtaggagtccagtgtcatttttctgcatatggctagtcagatatcccaggacaatttattgaataggaagttctttccccattgcttgtttttgttgagtttgtcaaagatcagatggctgtacgtggcactgtttctgggctctctattctgtttcattggtctatatgcctgtttttgtagcagtagcatgctgtttttgttactgtagctttatagtatagttttaagttgggtgatgttatgtttccagctttgttctttttgcttagtattcctttggcttctcaagctcttttttggttccwtatgaattgtagaatagtttcttctagttctgtaaaaaatgacattggttgtttgataggaatagtgttgaatctgtagcttgctttgggaagtgtggccattttaataatattgattcttcctatccatgaacataaaatgtttttccatttgtttgtgtcatctatgattcctttgaggagtgttttgtatttctccttgtagagatctctcacctccttaggtagatgtattcctaggtatttttttttgtagctattgtaaatgagactgcattcttgattaggctctcagcttgaacattattggtatatggaaatgctctggatttttgtacattgattttrtattgtgaaactttactgaaagtgtttatctgttccagaagctttggcagggtctttagggttttctaggcatagaatcatataatcagtgaagagagatagttagacttcttctttacctatttggatgccttttatttccttatcttgcttgattggtctgcttggtacttctagtactatgttgaattggttgaattggagtggtaagaataggcatccttgtcttgttccagttctcaatgggaatgcttctttttttttttttggtctgtttagtgtgatgctggttgtgcatttgtcatagatgactcttcttattttcaggtacattgcttcagtgcctagtttgttgagtttttttttttaatcattaagcgatgttggattttatctaaagctttttctacctcttttacaatgatcatatgttttgttgttaattctctttatgtggtaaatcgaatttattgatatgtgtatgttgcatgaactttacaccctaggaatgaaggctacatcatcatggtgaattaacttttcaatatgctgttgaatttgatttgctagtatcttgttgaagatttttgtgtctatgttgatcaggaatattggcctgcattttgtttttttttctttgtgtcttttccaggttttggtatcaggtgaatgctggcttcatagaatgagttaggaaggagtccttcctctttctgtttttggagtaatttctgtagaattgaaacaagctcttctttgtatgtctggtagaattttgctgtgaatctatttgctgtagagctttttttggttggtaggtttttttttattactgattcaattttggaacttgatattggtctgttaaaggtttcaatatttctttctgattaaatgttagtagattgtgtgtttctaggaatttatgtgtttcctctagattttgtattttgtgtgtgtagatgtgttcatagtcgtctctgagaatcttttgtatttctgtgggattggtgctaatgtcacttttgttgtttctgattgtgcttattttgatctctctctttttgttgttaatctaggtagtggtctcttgatcttgtttattctttcaaagaacccacttttagttttgttgatgttttttgtatagatttttgtgtctcatttcattcagttccactctgttagttatttctttccttttgctagctgcggggttagtttatttacctttttctagttcctgtaggtgtgatgttagatcgttaatttgagatctttctagctttttgaggtgggtatttagtgctataatcttttgtcataacattgcttttgctgcatcacagagattttgctatgttgtatctctgttttcatttatttcaaggaaattaaaaaattttcttccttaatttcattgtttacccaaaagtcatttaggaggagcagggtgttattaatttcatgtaattctgtggttttgagagatcttcttgatattgctttctgtttcattccactgcggtgtgagagtatttctatgtttttgaatttattgaaattcaataaatttgaatggctgagcatgtggttgacctttgagtatgttctgtgtgtagatgtgaaagatgtacattctatggttgctgggtggagtatttttaggtgtctattaggtaccatttgtcaagtgtcatatttaagtccagaattttttgttagttttctgcctcaatgatctgtctaatgctgtcagtggggtttaagttcggttgatgacttcttatacttctctctttcttattctttctctctcaccacctcatccaattgattcacaatgcctacaccttctattttctaacaaactcttgaatttaattgcgccttttcctctttcccagtgtctttaagttcacaatcctttcacttctaacctatgttattgtctttctgtctcctctgaccacattcctatgtgctcttctctttgctttggtgatttttctaacacgcatatctgatcatattacttctctgtttaaactccttcagtagttctgtagagcctttaggaygaaactaaactctgccttactgaattaagcacatgatgatttgaactctggttatctctacctcatacccccacctcatcttttgcatgcagtgctccacatgggctactggatcaggtcttgctatctttatatatgctgttctctctaycatcccttacttgtccttcacaactcagctcatgctatcttctgcagaaagcttttaaatgatagaccccagctatatagttaagacttcactttttctttgattcttcaatatttttccaattcatctctttaccacatctatgatatcaggcttttcttattccatatcagttatttattaaaatattagcttgctttttctaatgtccttttcctgtctctattctttgtctttatgcatatattaatatatgtctattggtgctgagttttggcttagtcttttctatatccctattttatttctctacatattttccatatgatgttttataaacgaggaaatatttcataaaggaccttataattccactttattaataacactaacctaaggaaagtccaagacaaacacattgaactttttcactaaattcttttaagttagtcttgctgtaatcatactgttctcagcagttaaacgtttagttgtatcaaagactaatatactttattggtgcataatcttcaaagagtcttaaggtctccaaaccagagagctagcacaggcataggtcagaagtccacggcgtgctcatgacttattgtaaagtaaaggtttctatttgtcgatgataagacaagtagactaagatcagcccaattcataaatttggtctgggtcagatgcaattcacagatatcaaccaatagatgtgtgaattgcaattgttagtggccttgaactgccccaccttgaatcgagggaaatcaatgtggctttgttcagcagtgactgcctgaaaggaccataaatcaggagcctccacagaacccttttattgtcaaggtaatggcaaagaaaaatgatagcagttattccatttacagagtttagccttttttcttcttcctgattgttgtttcttccagttttctttttgtatctgaataatcacagcatgtagctttwgaatttttttcctagaggaatgtgtgatataaaacaccataaagttcgcagttagaaggatgtcttaaataattttgtcaaaactcttatggctatgctgtagtttgaactggccaaccaaayggtcatccaaaattagagttttatacctttggtaactgttagccaccgtttctaatttcatatcgtaattatatgtcagacccaggccattatacatgctatctatgtgactgaaatttgttcattttcccctataaaaactgattagtagcagtagattgctgttggtaatgctatgatagtttaagtgccatatagtttaagaaccatatatggttctctatagtcatgatgccctgacatttttgtatgttgtggtctgttgtgtctttccagagatttgtcactaatatttctcaaggtaccaactattgtgagtttctaattttataaattagactagatttgcagtgatctctatgatgatgctgttactgccacttaatttctttagtgggagagatagtattgctggggccatttgtcccaggtatattagccaaatgctaattattgctcaatatctgttctcttccttttccttagtaaaagaagaccagatttttcaagtaggtagatgcgtggttagaataaagactatatttcccaaccattcttgtagatagatgtggccatttactgtgttctggccaatggaatgaaggtggaagtaatgtccagcttactgaaagtgtctccaaagggaatggcttgctactttttcttctttcttttttctrtatgactggaatacagatatgatggctgaggcaccagcagccatgttggaccttgggaaaggaagtcacgtaagaaaaggaacagggtctcattctgtgtagcctcatagctgcccaactgctgtatttaacagatgtgggagagaactaagtttctaacttattaagcttcggctatttttttttctgaactaaattctctttattacaaaatacaaacaaaataaagattgagaactgacactgacaattacgtgtttcctaaattcccgaccaacatttctgaatgctgaacctttccaggtgggtgacctgcaggccctttaaatctaaatttaccaaattcagctcattatcttaacctcaaaattttctcctcttgtgttttttaaggtttttattaattccaaatgaaagccttaaaaacatctttagttcctacccttctctcaccaattatgtgagtgaaaccagcagagttaagattttcttctgaaatggtcttacaaaatcagaatacaatcttaagtttcttgatgagtttctgtagaaaattagatgtgtttattaacttgtgccaagttgttccttgctctttgtataactgtcccatctttacacattaattattaattttgccttatcagagttgctatttaatactttaattcaacttctggagaactgattgcattttgcccaaggtgtaatcccactttctgaaactacagataagttatatgaaaattctttaaaaatgaatagactatgtgcatctaaagtattcctaatatatttcatattcttttgatgccattctgaaagtgaaactataattcatcactttagtatcagtaataarcattaaaaaggtgttgcatctgaagtttgaaatactgtagtgtacaaaattttctttcctagaaagtgatgcttaaagaaatgttagtagtttggyataggtctaattctgaataattattgtcattgacaactatcattatttgcagctacccattatcttctaaatggccttcagaaatgatggagaaactgacacgttatgagtatttcctgccctacatggattttgaacttgaattcccagcctcgcttgcatctagacacaggcacgtgacccaagccccaccagtcagacaaacccaattgaaactttagttcaaaagcatccagtatgagggagcagtgaagtttgcattttcctgatgaaaatgttggaagaggtatttggctttgttggcggggagggcaatgatttatgcaaaagttcctaatgaaaaaatggctttgttctgggttgtagtgatataatcagagatgcgttccagcatacagtgctcagaggcagctgtggtagctgtggttttctcatcagcctgtctctgtcatgttcctggaaacacatctatatgcttattgttatattcctcagataagttctgagaaatacaaatcgtcattgtttatttacttatatttttaaatcaaatttctgatttattcatgtattccagttcatcctaagatggtgatgtatgcctcggtattgattttgctaaatttatataactttgataaatataaaacacatatattttagaaagtttattaatgtataattgacatccaataaattttactcataaagtatttaattttatgcacttttgcatatgtatacatctgtgaaactattaccagagtcaagatagttaatctagccatcacacccaatgtttctttattttattttactttaagttctgagatacatgtgcagaacatgcaggtttgttacataggtatatatgtgccatggtggtttgctgcacctatcaacccgccatctaggttttaagccccacatgcattagtattggtcctagtgctctccctccccttgccctccacctcacgatgggccccagtgtgtgatgttcccctccctgtgtccatgtgttctcattgttcaactcccatttataagtgagaacatgcacactcaatatttcttaatgccttttcattatctctcctttttgcctactctgtctgtctctagttgactcttgatctatttctgtcactatacattagtttgaattctaaaattttatacaaatggaatcatacagtatggattattttttgtctagcttctttcaccaaacattattattttgaggttcctccatattgttgtgtttggcaatcaatggttcatttcttttcattgctgagtattccatggtatgaatgtactacaatgttttttactcactcacctgtatgaatatcagaatatttgggtttgtttttagctactacaaaataaagctgctaagagcattcatgtgcaaaagttttatgggcatatgttgtcatttctcttgggggaraaaggggatccaatagtggatcatgcggtgagtgtatgttaggcttttcatgaagcttcaaaattgtttatcaaagtggttgcaacattttatattcccaccagcagtgtataggagtttcaattctttgaggacctcaccaacatttgccaaggctagtctttcaaattgtagccattcttataagcaggtagtatcatctcatggtaactacaacttgcatttctctaatggctaattttttgaaagatttccttgttacagaatcctagattgacagatttttttctagtagtttaaatatgtttatccttaatccttaatcatcctttcatcctcatcttttttctttctacatgtttcctttttttctcaattttcaagatttttctctttattaatggttttgggcaattttattataatattccttggtgtagttttcttcatgtttcttgtgcttgaggatcattgagcttgcttctactattggtttatagtttttatcaaatttagaagattttaaccactgattttcacatagttttctgttaaaaaattatttttcttttcatgtttcattttacagagtttccattgctatgtgtttgagttcactgctcttttcttctgcaatatatactttggagttaatcccatccagcagatttttaatatcagacattgtagtttttatctccataagtttaatgcttgtttttaaaaatatctctcatgactcaactgcttgaacttatgaaataactactttaatttccttgtcaattctaaaatttgartcagttccaggttagttttgattgacttatttttctccacattatcaattatrtttcctgcttctttgcatgcctggtaatttttattggatgtcagacactgtgatttatttgatgctagagatttttggtttattataaatatccttaagcattgttctaggtcacagctaattacttggtaacagtttgagccttttggatcttgctcttatgacttcttaggtggaatcagacccacatatagactatggctaattatttcccactattgaagcaaggctcttctgactctaatactctgtgaattaggaggtcttttagtttttctgttccctctgatctttccaggtggttcttttcctagccttgggtaacttcttcacatgcgagtgttgaatacttcagggagaccatctgcagatcaccaaagttcttgatatattctggatacatgtctttaccagtaatatgatttacaaatattttctgccagtcagtgttttatgttttcatgttcttaacaatgcctttgaagtcaaatttttaagttttgataaagtccaatttatcattcttgtattttaaggatcaagctttggtgtagttaagtgttatttttaagaattttttttaaactttagctagagtagattttgttgtttgcaagtcagaaatctgactgatatgataattaaagaaaaaggccaagagaattrcattttcattccataaattttgaatctaaaatgtgagtgagatactctggaatcataacaatttattctggactcatagtttctgttgcttgtctttgcttctgtcaaccagatggtgctattggattggctaccaaggaacatccttatctgaatggttgaggttgtattgatctaaaaaatctccagagataatagtggacagttgctatcacttcttgggttcatggacctcatcaccatcttatataattagaaagagcataccaccatcttggtgagacctcaaatataaaaaagagcaccctctaattaaaataccttatgataaatccgtgatttggtcttgggttcttatgagcaggtaaaagtactctgttgtattggaaatcatttgattgtgaaaaatgttctgacagagatcaataattaaattaagtgaaaaaatatattaatccataattaaggcagttaatccattatttattgtaaacaacttaaagctaccatggaattccaacatctgagcaaactctggtgaaataagaaaagaactgaattagaaaatrggagatccagggtaaagtcctggccctaacactaactagctgtgagatactgggcaactctcttttcttatctaagcctctgttttgtcatctgtaaaataagcatgggctatgtaatgtgaagttctttatgttttttctggacctcactgtctgtagagagaaccaactggaaataacttctttgctgccttaaaccagcagactttattttaggacagagtgagtagtttgttgctaacaactttgggggatactggagaaggaataacccgaaaaggtaagttggttgtggcatttgcacactttattaatttttttgtataatgtattttgtattaatttttttgcrtaatggtgcaatatatccatgggtttagtgtaaccattacmtacataatgtacaatgtacctgctaaacaatttctcctctctcacctccttcctaccctcccacctttcygagtctccagtgtcttttattctacactctgtgtccacgtggacgcattatttagctcccatttgtcaatgaggacatgaggtctttgattttctgtgtctgagttgtttcacttaagataatggtcttcattcccatccatgttgctgcaaaagacatgatttcattctttttatggctaaatattattccatggtacattttctttatccaataatccaaagaatgaatgttcatgcaggcacatataaagtgcttggcattatttcctgcagtgggtgtgcctgaaggtgaggcagagatggactggaaaagattgacgtttctttgaccagcaatgctgaccctttgctctttactagaggcagtggcttcactgtgcaaaacaaatgtgtgcttagtggagggtacctgaggtcaagggctagccatatagatgactatgagggaaatgcagtccgcattctatgatagtcattactttttgtatattccgcaaagttttggtataccatattaataaaacagcatatgcaaaagcacctaccagaacagctgtcagaacgcaggcactcaatgaacataacttcccttctcccagcttccccatgccttccttctaacatgtactatgctctttatctttataaacctctggagccctcttatgggtctctgaccattcagggttctcagtttgaatctgccccaggctttgatttttttctatagttttacttttataaacatttaatgactgtatatatttttctttcttgaacctacatgatatctagctagtgtaaccaaagggcaatttatttagaaacaaggtattaaattaacttaactaatatttattgaatgcgtactgtatgctagttaatattatagtgatgagaatatagtaggaaataagattagtcaaagttcctgtctccatggagcttataccgaaataatgcaaagtaggactataattaagtagtggatatattatttttgtcatcccaaatgtatttatctgtttcctyattttatggtttctataccccagtatttctatggggaacttgtcatccttatttgattggagtcttagtgggactgtacctaaaaatactccaatctcccttagctaattcatggatatagtaaaccatgctggaccaatcagattctctgtyaggttgagtaacaagaaaataattggagtgaattcagctcaaagatggcactcagacaaggtcattgactcctgtttcctagaacctcagagctttactagttcttgttggttccaaggctttattttttggctgttctttctgtgcaaaacctccttcastgtttcttgtttaagttgctgaatgtacttttgtgttgcttggaatccagtagtcctaacttataccaaatctggtaaagtaagaagtattagtttttacaatctctattaattccaattcaattctcaggtttcatccactgaacagacaggaaattaaatctaatttttattggaaggggatcctcctttcccgtagtaataagaactaaggagtctcttgtcatcatcagtcatttttctacttgggtcattattgaaatacctattatcccagcttctgtgccacaccaaggacaaggaaatctttggtatggctgggtatccctgagttaggcttcagcttctacaggcacaccatgtaaaacttagtatatataagcatatataatttctctgaaactttgtactttccagctaattattctgatgcaaaacctccctcagacaattaacttatctgagagactatgctgtcttttaagaacagggcaaactatcatgttcattctgtcttgttcactcacctgtcctctgtaaattactctggatttgtgtactgaactcaagggaacaattaatttattcattcatttagcacgcatttattaaatttttcatgtcttccaggtcctgcatgaggctttgaaattataaagaacttacagcttctgcttgatgatgactcaacagttagagtggggaaggtaaaagtttagtgagctggtggctaaataatcaaataattttggcagtgataagggacacaatagaggtctaaaagtaggcataatgggagcacagaggaagctcttgagtctgtttggagatgtcataccagtgatggcttgcaggagaggatagctgggctgagccttaggaaacaagtagaaatttgcttaatatacaggtggagtaggagtagtacattccaagcaaagtaaaatggagagagagagagagagagagagggagagagaaagagaggaggaaggagaagaaggagcagcagtaggagaaagacaaggacaaggacaaggttgggaaaaggagactgggtgagagaaaagaatggcacgtgcaagaaaatgcaagcagtcccacatgactggtatgactgcaatgaagagtccactggggaactaatgggagatgagcatggaaagggaggcagaggacaaagtgtggtgggtaaagaatcagggatgagtttatgtcctttgcagggacatggatgaagctgaaaaccataattctcaacaaactaacacacgaacagaaaaccaaacaccacatgttctcactcataagtgggagttgaactatgagaacccatggacacagggaggggaacatctcacaatggggcttgtcgtgggttggaggggtaggggagggatagcattaggagaaatacctaatgtagatgatgggttgatgggtgcagcaaaccaccatggcacatgtatacctatgtaacaaacctgcacattctgtacatgtatcccagaccttaaaatatattaaaaaaaaaaagaatgagttttataaataggctgtcctgggcgaaaattccagctttatttctttggtgccatggactcaaggaagttacttaactcagttttcttatctgtaaaagagagaaggtggtaatatgtccgttttaacatattgaaaggactaaatggatttatgaatgaaaagcacctagcatggggcctgccgcatagtagamttcaaagacatttttctttcctcacttccctgccacccctaccccacacaccctgaaatctatcacaagagccataaaactagaggttactgttaaaaagtgcttggtggatacatttgggaagcagtaggaaactgaagagagagaatgaagctgaattaaggagagcctttgaatgrgtagcacagattgtacttaaaaatcacaaagatttaaacattactcaattgcaagcatagtattgaaatgaaaacagataccaatgatacaaattgctataatcttgtcactaatcaatcaatactgtaatttatctatgacatttctatttggtaaatgccaaaatctctattttcagtttttacagatttgcagaaatattacgttggtgcaaaartaattgtttttggcattaaaagtaatggcaaaaccacaattagatggcatatgtacctttgaatttttattaaaattaagccttgatatttttaagttattcaatagcctttttttctcttctttatttctttcctttcctttaataatactttgctgtatttctccacatatttctctatgttcataagatactatataaacaaaaacacctatactaagttgatcattttcctagaaatgtaggccagtcacatacatttctttgcaatttacttttcttacatacaaaaatataagggacctccagctaactgcaggactcccataagatggaacattatgcacatattgaaaactaaacatgagatctttagatctacaagggatctaagagatcacctagtctagtggttcctgatgtcacctcagtttaattattttcttagtgggtagagattttgaatgtgagagaagtgttgaaagttctattaaatattaaactggcaatgacagaaaaatagatttggaaggagtaacctggggccatctttcaggtccaactttaatgcaatttcctcargaagtgtttcctgatatccctgaccaggataagtccctttctgagtgccttaatagaaccttctatttgttctttgttatgtttactagcataatattaataaattatttgttattgtccatcttatggacaygttcaatgtccatacttacccatgaagtatcgtggtaagtatgaacatgatacttcattacctaatatattcttgacagattaaaaaaggctgaaaaataaatgaataaacagagaattttttgtgggggagaggcagtcatacagctttaaaatttgatgcagtggagtgggagaaggttgcatcaggggctcagagactgatattttccttgtgaattcatgacacttaatgttaaattccctagcatttgaggaacataagcttgcatttattggtgttcttaggaatgatcagactctctgtatgaggttcgcagtaaccgaatatatagggatattgttaatttaaaatagaagctgtctctttaaagtgcttacatcctcaacacaagtcaccctgtttgtggagacttgaagtagtactcaattgcttgtttagtgggcatataattagaacaaatggaaggtgatgatcttgaggcacattttatctaggttgccttgtgatcagataaaacatatttaccccaccgcagaaaacagaaacttttttagtgatccaattgcagtctctctgatgtacccagaactactttagatccctataaaaattgtttttacacttatacattatttctttgtgtcaacagcacaattaagctttctggtaatattttaagtaaaatattrtacatttgagagactatctcctctcattatgtattgatttaattcatgtaatgctcaatcttatttctttttgtattggttaaggttcttctggttaaaagtaatggaaatcaataagtcaaagaaaaggtaatttattggaaatacaccaaggtagctcaaagaagggctggattaaccaaacaatagtgccttaggaaaagcagaaacagtgccaagtctggggatctcagtggtgaaccttgtgaactaggatgccattccaatggcatctactacgttgttattcatttagctcctagttcatgagtgtgggggaggcagatctctattttcctaattacttctgactataatagaaaaagatcaagaggatttgaaatagagtacagttagtactaggaatcaagacaactttttttttttttttttttttgagtagcttcctcggaaaatttgacaggacattgtggctagctgactatgagacaagaaacaaaaggatgaataaaaaacgttaacttttacagcatgagttattgagaaaatagtagtgtcgtgagtaagtttggaatgtggagtgctttttagggggaggagattattatatgtttggctttatgcatatttgaatgcaagatggtgagatgtccccgttaagatttttaaagggagttatagtgaaaatagaactgggaatataaagctagtgttaggataatcatgagaaagaaataactctctctggagctaattttgtatgtatttcactcttctcatttctttgaacataggaaccaagccttaatcatttttcaatctcctaaggcttarcacttagtaggtggaactaaaacatcatttagacattaaattgagtgactcagagagaaaagaccagagaaccaagaataatttccactttctcttgggacttgttcaaaatgttgtcttcctttttaaggctctgccagaataaacctattttagagtctacctcttttgataaccagagagtcaacctgcaccatttgttttctccagttaggtttatgcaatttgggaaaggttttttcatttaccttctcttggttgttggactctttgcattacagttgcttaagccataacattagcatcttgagagaaaacaatgagggattcatttcagtctgcattttcctttgaatctgacaaaaagaagaacaagtctggaaagatagcatcccagaatatttttgcttactcttcactatttaatcaatacttccaccaraagtaagacagaatgtcttacttcacattagaagtagaaaccaggttagacatcctgataataagtgaccttattgtggagatggatgaggatggataaaatatggattctatttggtttcatcttaactgcatttattctatccccattttattgcccattcattgctccatgtcagttcaattctattctatttcggcttgagatatacccacaatataatgctagacatttttagtcaaaagcattttcaaatcttgtcaccagatyagtcttctcttcttatgcatttcacgtttcctgtagtaaattatagtgaatttaaacttgtaayggttttcaacttgtagaccttaaacattttattaaaagtgtaatataatatcttggtaagggttaccactttataattatttccattgataggaaagttgattctgaaggcaacttagtgacttgcataaaggcatggagtgatttagctaaaagttggacaaagtgataaaatccatgtacaaatggcttgttctattgttaagtaatacagtttttgatgagtggagttactgaacttttcaaatagattagactcttctgatttggaaacgtatttgtggaaaatgccaacaatttctaaatgatttttwaaaaattccattgatttttaatactttatactttttcttccaacctcaactataaaaataarattattcactattttctatcaaatttcctttcttatgttgcaataatagccaaactactgagcattgtgtagaattctgctaaccactttacaagagagagatttacataagattcttttggttctggcttgacgtgagggattaagtgttttcaacactgtaaactcatccataaaacaatgttgaggtgggtataattattttcattccttagatgaagaagctgaggctgaggaggttattcagtttaacctaaggtggtagtcgtgagtggcagtgataaaggcagctgttaaactgagtttaagaaacttactgcagcatcgtaaatactgcctctctttgtgccccaacttccattcacactctatttctgttatgcatgtagctaaccaccacctacttcaggatcaactggaggacttgttaaaaataaaagatgcccacctctaactgtagcaatttagatctggcagatctagtgtggcccaagaatatgcatttctaataatcattccttgcagttaattatgcacagtaagcttggacaacaattgccttagttaatatcagaaaaatgttcatgagaaagaaaactttaaaaaatctttattcttaagtattgtttaaatactttgacaaataactggtaatattgccctaaaaactcttgccatgtcatcagttgaataaaactacaaagtttgaaaactctccaggacgtgacttaacatttctgatctctaatatagaaaaaatgatgacagaaggcacaacttgtcggcaggttgagagatcatggccttggggctgaaaaccctggggaatcaattttagccatagagggcaaagacgggggaaaaaagtacgagctctggagaacagataattctctgccagtttgtaattttgaacagtactcttctgccagccttggctcctgtggtttctatttagcatcgtgtaatggtctctcaattgtcaagtgatttactagttattttaggatttctgtttctttggtacttattattccatgcctactgaaaaactgaacaataaaagtaatcaattgggaacattttaatgaggcaatccaacccaaagctttgcattcaagtgtttgttcaaatttgagggggttatgcctaccagctctgttttacttggcctactcaatgagaaaagacaaaaaagaagagagaatttctggtaactttgagctgcagaagtaaaggtcgtttatcgggaggagttaatagtagaatgctctttggacagatgatgtgcttagattatttacaatccaccaccaaaaaagatttggaaacaagattataatttgccattgataggaggtgaaactttagctagatggtaggatctcctggatgttaaagtttaagtacacatggatagtcaaaacgctattttttatgtttctttgtgtggtacatggttttctagactgcattattcttgtgaggtgaacaccttgaatacagtttttttctattatttgttgggaaaatgtatacttccatgttaagttagcagctcaagtttcccargtcagcgagagtaagattttctgattggcttacatgatgctttcttccaaggatgtggagtactgttaactstgaaaatcacacaattctttggtattcttttaaagttaggtctctgattaacactacatttctgcatcatggyttttttatttaggggccctggggtgaaagcttaagcatttcattagtcttgaccagatcacaaagaactatgaggcattttagagagcatttaaataattttggagggttattagagagttcaaaacgttaaagtgaagcaacaaggtctgtatcgttgccaaatttcaagagaaaaggctaattagtctttgaccttggagctatttggaaggggaatgtgttgcttggaatgtattagattaaaaattattctgaagaatgaagagagcacctgataaactactatatgaatggctttatacttagcagttctaaattccaaattactcttgtttttaaatagttatacataaatctgaagtaactgcagatttttctgtttctctactgtatcctcttaggactagggtaatgactagaaagggaataagtatagcaatagctaactatgtctttttttttaattaaagtttttttaggtcaagaaagataaccaaatgctttaaattttcctgtagtggtatatgtcccaatgctcaaagttttgaattgctctattaaattaaattactcactagtttcgaaaacattggtttagaaaataactatttctaaataaacatatgtgtttaccagtgagtttaatgccaataaaacagttcctattcagggtgccttatatctggtaagcagawctaccaactgggcagagggccaacccacagtccaaatgggaaatattttttaaagttttgataggacacagtactcagttttaaagatcatactctgattatgattgaccgggtctcctaggttaaacaggtcttcaagaaggtgatcctgcaagaactaatctcagttattatcaagctaatgtgggtagtggacaacaccstgaaaacaaggggccaattaacttgggaaatgtggggaagagcaacggtgagcggggaggraagtcgctttacaggtgtaagattttcttggagagtagtgtgaccatgaaggacagggaattgccacctggtgaggtctatctctgtctttcccatactacttcctatggatgagtcgtctggactcaaagaagaccttaatccatggaartggtctctggttttctgaagggttaaatgtagatacagtaagggatttggagaattgaaatcccatgaatagagtcttgagattgcaaaaataacaacaataacagcaaacagtagctaatagttctctgacactatatgctagacaccattgcatgcactctgcctagaaatcacccatttaatcttcactacaatgctatgacacagataatatcattattctaattatacagatggaaaactgaggtacaaagagggtaattaggcaattttcccaagttcactcatttagcaagtggtagagccagaatatgaaccaggaagtcaggctctcgagtctgtgttctccggtacaagcttcacaaaggagggcatttcctaagacatatttgtaccagttgaagctgtgcatatcaagattcattgggctgtaaacagtgataacatgctttttatctgactctgtaaaactataaaaactcatattttctggaaactagtcactttaagtaattcctagttttgcagtttagaggcttcttggatgatccctacagctgtttctggaaggaacctgagggatcatgcaccagacagtggcctaccagsgggcattaatcaaatgatcattcataaacactgtgggagcaagttcatttcagagtaatcagaaattatcttttgttcctccatctcttcaaaggaaagccactgggaaacagggcaaccaatcactagaactctctccacttggtttaatgagacagtgaatcgttgaattaagccagtgtccttaagctgcccttagttggtygctccttgattagtcaaagtgtaatttgagtgatacagccatgttggatgttcctgccacatattctgatgagttagcactctgttgctgctgtcacacagcttcttaaaagaagtgtcaggataccctgtggggaaataagcagtgtttcgatggcaaagagactgctcgcgaggggctactcatggatacacatgttgcttaggcgtccagccagccctgcagtgattgatggatgttctgctcccttctggtgtatcttcacttgtgctgggaaagggatgaagggcacctttgaaagaggaggaaccayagtaatcacttcatctctcttctgcttaatgcaaacttactctggaaagataaatgactatccactcctgtaacaactcctcaaaatcattactatatattgctgtgggccagatttgtgcatttctaggattgtcccactgtggcagttatcggctgcagtatgtagcattgattgcatgtttttgttaacttgaaagtatcttagaaggaataagcagtaaattttgaagaggtctcagtgaatctacttgacatggaaatatataattgatgagacattgtaatgggtttaaaatttacagtcataactcaggtatacagaaatgaaacattttatttttctgttactgaacttaggtcaagtccccatttgttcagttggctgaaaacagttacttttgctgtttcaatttaatttagtcacatacagtttattcagtcaaattctacrttctcttcctggtcccttctttgattatccttatagatgatctaagttactgggtggcttataggtcatcctggcatgaggggaggagtgtcctattccttgggtcttctttggtccttgcagacttttgctgagacatagcagttctcttctagcttggggacctcatgtatagcatctggtgtactgggtctgcatgggcctgcctaggcctctggactacatgctcaggctctacacctcatgccctaactctggctctctttcggcaacaggcccactgagcacttccctgtctttcctcaggggatgctcaagaactcatggctactttctgtgcagaaaatagactctgaaactctaggaggcttcttaagctcatctgcctgaaacataccccagcttttgtggtggtccttctgccatgcctgccatgctgctttggtgccatgctgagtgaggggttttcccaagggcttgtagtgttttctggctatgctttgagagcaggttaggcacctacccctgtcagaatgattcaataggctcaatctctcttacccsgttcccctcccaatccctccacatattaaaagctttctatctacctttttgcatttaaaaacctcatgacctcatgtttcatcccttctttaagttttatactataaatgctatgctgaatcatttgagctctggctcattggaacccacaaatcccccttttcacaataataccagaaagcctagcattccaggtttgtctcagctactgactttaaaaaagccagatttgaagatcaaagctgatgaatgacaatgtgattctctgatgtatttaccatctcctctggaaataaggaatgctggtgtttgtttcaatgggtaaggtaggaaacacaaggactcctggggaagaaaatacatctgctaatatttcaaaaacattatcccagctatagcactttctcttttttactacatgtacttaaaaaaagtttagtcccttctccctttttccttgtttttttttttttttttttttttgataatgacattgaaacttcctcattattgggtaaagttctacgcagcataactcctgcttttccaagtcarattgctgcccacctacaraccatytaaagtaggtgccaactgtgagggaggkgctattatgatcttcatttctcagatgagaaaacttatttggagagattacatccagatgcactcagctcataagtgacaaagttgggattcatggtcaggtctgttgacattatcctgccatttccaatgcaagtctatttcagacttatcatacatgtattaagttaaatccatcctgaatagactacatggagattaagttcctgcaaaatgactttatgtatacacaatttttaaaaactgcatacaagttttaacttggggagaaatcagttctctagttactaataacctcaatttttttttctggatagttttaaatatatgtattttgatttaaatagtgtttaggtacttttttttttttttttttgagatggagtctggctctgtcgcccaggatggagtgcagtggcgtgatctcggctcactgcaagctccgcctcccgggttcacgccattctcctgcctcagcctcccgagtagmtgggactacaggcgcccgccaccatgtccggctaatttatttttgtatttttagtagagacgacagggtttcaccgtgttagccaggatggctacgatctcctaacctcgtgatccgcccgcctcggcctcccaaagtgctgggattacaggcgtgagccactgygcctggccgtatttaggtacttctttagatataagccccatggattggcaatccaaattgagctagtagatcttcaaagaacactggaactacaaataccaactgtggatatttactgtcataaataacacttttgtagagaacactttaatttgcctgatcttatatccattaagagagaaatgagagtaagagagaaagagcgtaagaataaatcattggctggaaaccttaaaaaatttagattacttcttagattaaagttaaatagtaccagataaataaacatgaaaagaaagaagcctatgtggtgatttcactgtttcacatggtagaaacataatcagttgaaagtcactcatgaatttatatcatattcatgaacacaccagaaaaccaaaaagatataaagtccaccattcacttccttaatgataccagatgcatttaaataggaatttcttaaacttttgtactttgacatgctgataagctccagaatgatattatatattagctaaagatgaattatgggttttgggtttccatttccttaaatcaacagcatgttcagttacagcacattgctaagggttaattttcaaaccaatgagtggtgagaagggctagtgaaaataaaaggggaaaaacccaactataactggtaaaactctttctatgtgaataatattttttcttttgcatttgctgtgtcttctggaggaatgacagttgtgtaattcagtctggttggagagacaggcatagggttaataaaggatttgtgtatgggatggtgtactctagcatgaactgccatcctcctccagtggtgtgtctgccacacataagtagcataaataacatctgccaaaacagccctctgaagtattaagcactgacatacccgaatgctttctaggtgttacaggtgtactgttcaagtgctgtttaattgcagtcttaatcaaatatgatagcctgattccaaggtgaatgtcttataccattgatttgtagtaagtcgccacatttctttgaacagtgtgccattttatatgagaattataaaacagcaatgattattttaggatcagagatgttgtgattcatcaggtactgttgatggatgatgcatwtgtgcttagtctggccttgcgcagaggctcgagtaatttgttatcctacaagacatgtgctgtttcctcttccatactactccccagtgctactaatattttaaggctaaagaacaacactgtattagatagaactacaggctatatgtaatgttaaatatatgtatttgtatatatgtgtatatcctctgctatacagatcaggtatcatgctaaaaccatataactcttaactgcatttttctggtaattagcaatggattatcttcccaaaaaatatgggttcttcaatcctcctggtcttggggagcacagaatgattcattatctcttctacattagccactttgtttgtggcaggatttgaaataggaatataggttgtataattacttaatgaaattcaaaattaataagatgccattttcagagttttttatgttgttctaatatgttcttcaagttttaaaagccattataaactttataaattcctatatttcctattataataaagtctgtatccttatttctttcaatatttatgcagatacatacataattatagtgccacatttgaaatatcctacttttgtatattacagattgcatgaaatagcccagaatggaggttcarttgatctttaagagaactcaggagaactgaattttgtattagctaaacttatttaatatattaaaatgatatacttatacattttaattttaatcctttacttcattttcttttttaaatagaaattatcttgtctacaatagcaatttctgtattggtgttttctcaggtaatgacattgatccctatttaattactattgcataattaaaaatcagccctttgacatcagtggggatggtagggctacagtgtacaacttattaactttcaaattatccaaaacatttgcttgcattttgttataatttctgtatgataagcatattggagataaagtagaaaataaatattatatattatcatacttttagatgaccaattttagcttcatatattttatcgagtttcagtaacatgagcagtgtattgctttgttcatcatgtgaaaaaattgaaacattacaaataagtttaagatcttcctatgggaaaaaataatttcctctatcagaggaaaaawttattactattatgataataccccttcagacctttttctagtcacttacaggtaaaaattgtagtactggttggtacatagtgtrttttattaatgttttactgcgtatattgttgtataaattgctttccgcactcattggcatgccttagaattctttttatttaggcttcatgactaatttgtagtggaacctcaagaagatcacttatgtgcttcactttccacatatgtaaaatgggaataacaacagaatctgcctcatagtactgctgaagggtgacatggrgaacacctgtgaggcattcagaacagagcctgtcatacaataaatgccatgtcagtgtttgctcttattctcagtatacagagatctgctttgatcttttcatctkctgcaaaatattccacaaattggcatattgtgttttgtaataatctctattgattattttcaagcaagatttggaattatccgcagtagtttcaaatgtacaaaaaagtaccttattttatttattttttaaataactgatctgatctacgagtctaatctggtaagttttgtcttgagtccagtaatgcagtccaatactccatttaggtaaccctgtccttgcttggtcaatttgttccacttttccaagtttgacctgcttaccctattcctcttcaagagggcatctggttgtttagtttacatgatttagtggtgcagaaggaaagggtaatcagattgatgtatcctctgagtcctccttgatatctgcagagcagctgagctggtctgctctctgtgctgttgacatctgctctttggggcgttagggggtctggtcatttgtcccttgtctgttatgatctacctgcagtggttttctaccttgtccccaggcttcttaattcttcctgtactctcagaacctctgtgttgtcacaacsagacttgggttattttgggtccccagtttccaggccctgaatgccatgggctctgtctcaggaataggtatctgctggcctgctgctgtcatttctactacattgctcctttactgccttaaagagtggtcctggatcaggggttgaaagtggaagtggaaataaaggacgctgatgtgacgtctgtgtttccattcttcttcctaccacttcaccagatgtgaaaaattcatataatctgaatcctctagtttgagttatgataagttaaagcagtttaagaatttaacgaactcccctctccctgattaaatctacttgttagcactgtgttcttactgcaaatcccgttgccttgccagaagataaatattaactttttctttctctttgccttcctgttgtaataattccaaaccacccaaaagaaataggtgagtttgtggagaaggtcagtaaaataatttcaaaagggaaaagaacattcatgcatttaaatattattcccactggttcatttatgctgcaatgaatatctatatatctatgtatgtatctatcattttgtgcacatgttttagtatttttctgagtttcatcctgaaaaaatgtaattgctgtaaggtatgcacattttacatttcactgtataatgacaaatcatgctacaaagtgactagaccaatttatactcttgctatgagtcactgagagaattctttactaacaccagatattttgcgtaacttattctgtttaaattctatcagcaaacctccatagtaggtgtattcccattttgtatatgaagaaactgaggttcggagttaaagcaacttgttcaaggtcacacaaatggtaagtgggtaatttcggaaccttttaaaataaaacatagaagcctactatcttattgttccattctagaaatatgtctgtgtttataatatcgactactttgtattattttaaactttataatattgactactattattttcttcacatcctagttaagaatctaggataaaatggaaaacgatatcacgaaatggaaaaacaatgttattccttagttagcttagtttaaacacctatttaatggtcaaaggcaagtagttgacctcccatctttttgactcacagtcattagttacacaagaaaagcagaacaaaacccagctggatggaggggtggatatgcaagtagctttcacactaggaattgtgaagcctgaggcatagccccaagactcagatcatcgggagtgcactcagtccagagggacaaatgttcagagtctgcatcacctaatattacaagcatctttattgagactgatagaagtgaatttctcaggtcagaaaacagaagagctcttttagctgagttgtgatatttaaaagtctctcattttgaatttcttgcctggccaatcaaactgtcctcccagaacaaattgttggataatgaaatgcatataatgtagcttgagagcgctgtcccatttgcagcactggcttcagcctgaggcacatctctggctgctcctttctatctataagttaaagcaatggcctcagcaagcagtacactctgtacagcagctgcaactcgttatcggctttgtccagaataacaaacagaacaaacacattttgcaagggcttttacccctcttatgtagagaaggaggaattaagcaatcagtgaaatgctgattgatcagttgtgctgactaagagaagtccaaggccacattagtactattaagccctaaaaaacaaagcaaaaagaaaatgttcttagaactttatttaaaccagtatttctgtgatgtgaagtacatttcccccaaagggaaaaatgggaaaatatttgcatttcacttagtacactttactcatccagactgctttgtaatgtaatgatggttaagtatttttacaaagataattcatgttttttggcagattttggttgatcatggagtatcagggttgtgtgaaccaaaggtgtgatgcagagcagctttagtaaaccatcccattcctatgccacccgtttgatttcagtaccaactgctgtggccacatctagaccactctttaccagaaactgtgccaccttcaaaattccagcatccttttcccctcctcccttattttttgatctcatatactcaagtattcttagtgtaacaattctttgagcattctttcttatctagcttaaaatctagggtctaccattataatcattcctttcaagataaccttaacttccacaccccaatttctaactggcctggcaaaactcagacctttggtgcaaaatcctccatctctatgcctgagcccttgtgtttgagaatggctgaagaaaaccatgtgcatggacattctgatgtcactataaattcatggtcacggatctcaaatgggagcccaagactactggctttcctgctgtggttgtctaatgacagcatgatyttactcttcacagatattagtttaaactctccaaccttcaattgaaaagtctacatcttactttattagaaagtagaaacaatcaagggttatgctcccattttcacactaccaagtaaacaaaccttcagtaagagaagatatatttcctatatctcctcctaccctcctgttaaaagggtgcaaacgtcccccctcctaacaaaaaccaatccttcttcatgctctttagatgccgtgttgtctctctttctcaaagtcttcattttttggttatactctttctctcatgcaaatttttctctctttttcaagtagagcaggctcagcagcctacaaacgtgtcttgggcacctttcatcaaaaaataaaaaacataaaaacaacaaacgaaacccttcttggctccacattctcatccagtttctattctttcacttagctgcttttcttctcatgttttgtctattttttaacatcctagtcactctctgatctacttcagtttgacttctacctccatcacttgagtaaattcaatacatggtttcaagtatattctagccctagcctgatccacagggaaggttctggaccacaagcaacatggcagagttgttcactcttgaggtaaaggagtttggcacctcatgcccctataatggattaaagaaacactccttaatcggggttagtccctgggaaaggttttaggtgtgagcaattagcaaccatcacccacagtggctgggagaggggggcactagcccaataaagaggatctaagtagtgcacccaagcaggtctaccacagttagcttcctatgtgggctcacgttgcatgcagtgcatctctatacagcaattaatctatttcataatattaataaaataatttcactttccatgttaaaatccttcaatgacttcctattgcactataaatggcaaatcaatatgttaacatgccctgccaacacctacagggtctggggtctgattgcctttcagatctctcctgataatctcccctgcttggttcaatatccttctgtttcaccaggaagatatcatcaatttccagctcaaagccttcacatatgatgttccttctggctggggtgcttttcctcccacatgacccatttaattaatatgtatcattcacatctcagtttcctcggactgttttaagcatccaatctaaattttgttctccactattattttctagcaaaacagcctactttattcctgcagagtttgtaatcatatattgtaataaaatttgtaattatatattgtgagattgattactaarctgtcttaatatactgaaagctccaattcatttatatttctttagcatctcccatgaggtatcatgaggtttgggaccatgtcatttcatttcaccattgcctaatggggtatctggtatgtaataaaagatactcaacttgttgaatgaataaataaatgcataaatgatgaataaattagatacacaaaattaggacgtcaagaaagaatcacttcyccccctcccgcaagttattccttaacaattctcctagggctatcagcactgggacatgagaggtttaatcaaatttgtgttcctttggtgctctcttctgggatcatagggcttgatggatattctctcattaactcgtacacatccctgccatttttgtgacactgatttgcgcagtttttagagaaactgggaaataggaagattaatagacttggctgaggatagaatgaggttatgacagaaccagggatagagtgtgcttctacttattgactagcttagcatgctgcacacttgttagcagttaaagaaaacacattgggaatcagtccatgtcagtaggtacgtaatcctggaaacttccttctgaaatgtattactataaatattctttctctgcacacagctcatttgatgaggtacatctttaggccaagagctcttcttgatgattaatcctactcaattttcttatgagaaaatgatgcacacaaaggttaaataactcagccactgtaatagaatgaattcatgtcaaacctcagctctgaggcttctagttgacctgtacaaacatgtagctgttttccatcttcatttcaagaatgttttatatatttaatattaaaactcctaattctgcttgttgytgagcttaactctatgtaacatttatatatgtaaatattacttgaaatagttttaaagccacaaattattttcaactggatttaattagaattttcctcgtactagtttgagagggtagctattccttgacaatctttttcttcaggctgaaatataaatgcagataaaatttggagcagaattctgccagttaatttaaactggggtatggcattctgaagtataatataataggtatgtaaaaatggttgttatatttagtcttaaagtttaagatatttagggaatgtatttactgaggaaatacgttgactttgagaatttctttatggagttgaagtgcctagtacattttttttttctcctcatactaattctaagtcaggtggtccaacaaggcctctcatcctattggtattacagtatgacctgtctcctgaactttgaagccatttctttccttcagaggagataagaaaatgtgtcttatcttaagtctggaagaaacacggagcccagtatcaaggkagtggagtagttcttttcccagacgtagcacagggtttttcaagcctgaagaaaaagattaatctccttaaaacaaggctttgttgacttgggtctggtcatggcaatcctgtttccagccatcctgtgtataagctctaacggtcagaagtttgtttgctttgattttgatgtggctcatcttttcttagctgctcatattcaagatttggaaaagaaggaacggtggtgagctgagcaattaattggattctgataaggagttctggagaaattttattattcctgagttttaaacccgtgtaactttaatataactttggtatgagcctttacattttttctctgtgtttttgtaattatattgtggcattcttattgggtgtggtagtagcaataaattataaatgtatgaatttatacattatggatttataatttcataagtttttgagattttaagacttactattttttacacgatgcsttatgtatttatagcatttaatattaatctaaattcattttgagatatattttatcatgcttttatcttttatatgttattagaaagcacttggtattttaaaaayatatattaatgtgagatttcacaatttataccttgtctttgtagtcacatgcgtagaggatatttacaattttactcaagttaatttgctcagtgttgatcatcagaccttttagccagtattggctgggaaaaaaagtgtaattctttttgttctcttgagaattttttggatctaaagtgattcctagggtgtgggtcaacttctatgatatgaaagatgacatggaggttttttattttgtgaagtgcattaataggtgatcacatttcatcctgggagagctgctggagaggaatattgatttagcctgttatggttgagtctttggggtcttgagcttcttagatttttagttctttttgttattctttattgttcaatcttgagagtagaaaatacacatttttgtccacttctaagaataaaactgaaaggcttctcaagagggagcttttgagggacaagtctgtgttccagacttatttttattctcggatctagcaccatgcttggcatgtaaaagggctttaataagtatttatagaaggaattgaagaattaattattacttatggactatgagaggtcatggttgttactctttctaatttgtcgatattaaacagagacagtgaagatactaatttagatcacacaacgtgaatgaagcaaacaaaagcctaaagctttagaaaaatgaatatattatatttttaacttcgcactgtagttaagcagtgtggagctatttaatgatttcaaccaggaagatattaatgtgtgaaataagagtacgtggacagtatattaattgtatgatacaaacaagatatacatacataaagttcattaaaagagtatgatttcatatggctttgaaggattgataggatatagacaaattgataaaattgatctaaccaatatttaactttaggtttcttcatcagataaaatattgcatcattttatgttggctaagtgatttgcagtctatttcaattaattattctttatagtttttctctgtcaatgccatttaataaagagaaaacttcagcagacagaagttatatgatctttggcactattggctgtgtgttaagccacagtaaggttcagttacgtattttattgttttataatcacacatttctcctttgattcatttcttatctacaccccttctttcacatcctaaatattttctttggataaatgtgtagggcaagatgaagaaaagaagagaaaaaagtagtcagagcttgggagtactgaaacgctttggactccagccagctgccatcactgaggtggtgaaagaacaccgtagtataactggatggccctggtccctgccaggagtcaggatggactttcaktgttgaagagccatcttggcctgttactagcgctgccccacaccattgtgtttgcctaagagctgagccaaagaatttacatatgtatgagccaaggtctgaaaatagaagttaaaaaaatggtgctaaattgacatatttgctattttatttttttggtcagttaatatgataaacttttatttaaatgtaaacattattttaaaaagcactttgttttaaataactgattttcattgaaattaattctggcctctaagcagagttagctacaaagacaatttgtaaaaatgcagaaaattcagagtttaacttggagttgtttaaagtttattttcatatttgagtctgatatttcagttcactgtaatatttcaatttatttaaaatattatcaagacaaatattgggttaccttcacaatatttttttcatttttcttaccccatatattaaaaatgaacaaaaatgaaagaattatatagtctagtggatggcaattctcttggtacagtactcacaggatgtcagaagtgctttgatttgcatgcaaatagaaactgcattcctaaaagacccttaattgaagatattaataattttcattaggttttaagtcttttaaccttatcatatggatagaaaagtaaaagatgtgtttaataaaatgtcttttacttatttttatttgtcatttatttaaaggtttattagtgaatctgtttacctggaaaatgtgcaattctatttgcaaatttggagcactacatatatttaagagaatccttagtttctgttgggagtggcaatattttataactgggccttcatattcctatgttacagccctggtccctgaaagtcctacagctatctttgtttcaagtgtgtatgtgttataataagataagtgttaattagttaatcaagtactaattaacctttttaatttatagaaaaacagacatttatggacaagtaaatttttggggtcaaagtctttaataatttgaagaatgcagttatttttagcacaaatattctaatgtgaaaagaatttctttttctgagttatatatttttatgccattcagagtcactaatatagtactaataatactttttctattgtgtacctttgtttctctcatttgtcttacattttatgtctaatcatcatttcacaaaatttctatcattactgcttgacctcgacttctaacatggcaattaatttttatacacaaatttttgaaatcttgacagagtttttaacttcctcataccgagttctttgcttttttagtttacaagatgttcaagaatgctcttttgaaataatcaattacctaatgcaagataaattagcaacaacattacatatttttcttactatcaactgagaatgatcttgataggggcaagtataggttaaaaataaatgacatcaaaaaacaataccagaataaaacatttaattcttcaacactcaaaggcatgtcaggtattgaaatccaagtaggcacttttgactaattgttagtagtttgtagaattcaaggattagggttggcttccttttgtctttctttctcttcttcctccccttcttcatctccttcttgttcttcttttttttcccctctccagatcactaatcttctccaacaaatttttagcctatataaaataaaaaaaggtactcctgccctatgactcaacttacaaatctacaaacctggaggaagaaatagctctgtgatccattcctggggaattgcaataaagttttagggaagatggaacttaatgtttgtgaaagcacgggtcctatttccgatttccaggagggtggaatgtatcttcctgaatcacattccgctgaaaataggaggccatggaagaaatcaggttcagtataacaaattttctacaaaagggggtggagtaggaatgtgcgtaggtgacctgttctctacgtcattccagtgtaaactactgccccttacacttcacgaagtcggtaacttcaagacatgttgcaccacatgcttctctgtgatcctcaaatatgtttaatttaaagagggtccagtagtgtcctggcacatgatctggattgccatagataaccatctacctcacagctagggttgctctttagaatcttgcaaaatcatttgtttactcttgacaaaagttaagaaaacaagcccatcagagttgtttgttctgtcagcatgttagaagatggttttgttgcaatgataatcgttgtgcaaagaagactgatgatgatttttttttacattttcttaacagtatttgctatttagaatgaatgttgtctaattatttagccattttattttgtaaaatttatgttgtaggcatatttagaccaagttataagaaaatgcttcagccaaaattaagtgttgagtttgatttgtgtaattgttagtttctttactagttgttccatcatttacacaattatttctatttgaaatgcagtaattgttcagaacttatatttctatactgatgtctactaacagctttagatcraatattaaataactcaagaataatgagatgatcttggcttacttagatatttggtttttatatctatagaacaaaggaattagaaaataattttgaagatttcatccagctatgtaaaactatctagggaatacatttactaggttttcaattttctacaaaacatctttcagcagaaagcartcctgtttcctgatatacaatgtctgatacatagaaactactcagtacataattcctgaattgattattcttttggaaatcctagatttgatttctgaacaatcataaacatttaatggcatgaaattacccagattccatggttctggaatacataacttcaagcaataagatgcaagatagaaacatataagacattctttgctattttaggtaagtccagctgaatcagttaatcagctagaaacgtggctcacagatgaattagttttattattaggtggattactgaaaaattaatagctttatttccgtattaccttatcatttatttaatataaaacataataaaccagagaagttgtggttactttcttctgtctcattgttcagtttttactgaagttatgttttactgattttcacgaaatgcaaatatttctgagcatcagaaatccagcttttgctacctcccactcatgtattcttcccatcaaattgaatcttaaccaggtcactctttcctgttcattccatgctgttgcccctgttttctccagatataattgacatgctccaagaggatgaacattgcctaagacttgatttctggtcttggctttgcaacttactagctgtgtgaccttgaacaagctacttaattctctgagactcatcattattgtttataaaatagggatagcattagcttatttcaagaattgtttttaaaattagcaaggaaggcataccaatgcctagctcaggggatcaacaagtggcaagtacctcaactttcaggcaagatcatacttatcatcagtggagccaatagaacagatttatttaaataccctattttcacttactggcataacagcaagtggtgtacatatttatatatctctctatatagatgcagataatatactaatatattgtggttatatcttccaatgttttagtttctattgaggggtctttcttatttattacacaagaataataattattatttttttactttcaggaagattgaaagactttgcttaggactcctatgtgacatgattttaaatttaatagttagctcatggtcaaactccatttttagaattttaatttattcaatatttagctttttatgtgaacattgagtttcttttcttaaattccactctaagttctgctttctatattgggatttttaaattacagcttaacatgattaactttgggcctcttgctatgttttataattgctatatatgctttttggctcatttccatataaatcaatcctctacaacttttatttatttacagcttgtttttctttctctttttggactaacttacacgtgacctccctttgggtgcactttgtgtttggctatgtcttcaattttccaaagtcactgaattctgaatcaactttctaaggcatttcccactgttcttctcatttcacaaatacacaagaaacttcgtgaattcactggataatccactctgtccttttacattggcaataactcatttatatacattctttagcaaatgtgtatgcacataacattggcctagaatatatactccatgctgttgaattaacatctaacatgtctacttggtctgggagtagtgtcttttttaagcagaaattagcatgacaagatttactgtttataaatacatgctccttgtactgactaacttgttctccttaaggtgtttgcaaatggggtcttatgaatgatagctttttttttgttattctagaataaatcacatgtgccctgagctttaatatgtgaaaccaattttacaaggtctcttttccagcttcatttttcaccttcttttgtatcactccaaactttatgttatcaaatgttagattgataagcatattcatcataatttgatcctcactttctattcctcaaaatgccaattggatcttaatgaataggttttacttgattggatttccaaggatatctggttagtttgaaccctcatcatctaacaacatgatatctgtctgtcattttcaatccttgacatattgggaaggttttcaaacaactttaagtcttcttcctggccaaactttgaggaatcctcctaccagcttgtcctagtttctgtgataggagaaaatgtgtgccttttacatgggtacaatccacaccactttccctcagagatgccttcttcatccatatctttaattgtgaccgtgttccttgttatgatactaaggctaataaaaatcatagaactgaacccaattacttctaccttttatattctattttcacacatttctggtcaaacacaaaacagtagaactttcttcagggagttattgcacctccttttactctgaatttgtttgctctccagtcataccttactccttgctttaatgtatctcttcaaaaatagactttatagaattattgattgccaggttttttttttcatgactcctaagcatccttatttcctctcatgcttaactgatgtaattttatttgttcctgcttaaataatcatcactgatcaggcaggaattaagcacacagcaatccattcattcagtcatttttccagaagcatctcttgcatgcttgctatgttagagactttttgatagatgcaccaacttcttagagttgtttctgattcattacttaggaacatttcaagagggcagttggaagtctctgtaccttcaaaggaattactaacacccttattttctcttcattccaaaacctaagacctttattctctaagacatcctgttctcattttttttttcaatctgtagcaggtcttcccttgcttatgtcagtggactgtttaaatgaagagtggactgtttgagaagtggactgtttaaatcagtatagacacaggctgtcagtgtttctttatgtttcctttaaagacattttcgtaatgattaatataaatgagttaatggaaacaaaaatgtaaacagtagttgataaaagaatagtatcaattaaaaacatactgtgaagtattcaacttcaccagtgatttaaaatagaaatgaaagcaaaataatattttctacagcggagcaaataaaatgaaagataatacataatgttggtgaggacatttttaaagggacacccatatattgcactggtatgtaggtgagtacactctctttggagagaaatttgtaaatagtaatcaaatatggcaatattgacatgcattgtagcagcaatgaaaatggaatattttgtaatcatttaaagtaatgttttaaaagaactttgtaataacatcaaaatacatttaacataatattgcctccaaaaagcattatgcaagtsaatggcaattttcaaaactatgttctgagcattgacataaatgctagaagataatactttagtgttaacagagattatgtttgtgtggtgggttattatctattattctgtatttccacatttctttaaatatcaaatgaaagtgaatacaacctagtacttgacattttaacattttcaataccagatatgtcaataaggaattcataaaataaagtgccctgagggatttcacaggctaaatgcttctattttttaaaatgtattaatagaaaagaagactaaatctaaaaaaaaaaattcattttatcagagagtgactcataagtttagaaaacctttgatgacctggctcacaaaaatrtacttccaagtacacagggtccccagcctgatgtgtgtgcctgcattcatgcctgtcactctgctcagctgcgtgcagacagcttatatgaaggaggactgtgtacatgtggtcagagaagaaaaaaatgcttattttttaaaatgttttgaaaaataatctgtcctaaaagtgtaacatttccactaaattttttcatgtctgactttaacattccctaccaaccaactcttatagcctcaactcctttgatctatcctaatgtaaactccctcactaatgtgtaatatatttttttccagtttggttatagatttcagtctagcctgaacactcaagtatgaaactagccactattttatttattggctgttccaacctccattgtggaattataattgatggattttccaagtctctaattcagaatatttaatcaaattttccaaaatttctgccttctcctccttcattctgatgactaaagacatggaccataaaatatatatacatatatacatacatatgtatatgtatgtatatacacatatatatatgtatgtatatatacatacatatatatatgtatatatacacacacatatayatatgtatgtatatatatacacacacatatatawgtatgtatatatatacacacacatatatatatgtatgtatatatatacacacacatatatatatgtatgtatatatatacacacacacaccgtagtttgcaagtctgcatctgggaccctttactgataaaaatgaaagcccattaaaactctcatgcccacatttctctctagactttagagtaggagaattctatcctagaattgttgattgttgacatttctatggaaaaacatgtttaattcatcatgctttgtagtcaactgctataaatggtgatgaagtcttttccttggtcaagctctggactcctcagtacttccactgtcatatttgattaaaacataagtgatgaagggaggaaatatattatagtattcattgcatgggtaccttagggtaatgggactatgactgatttaaatttattttgcatcctaaaaagtttccattagtgggtgcagcacaccagcatggcacatgtatacatatgtaactaacctgcacaatgtgcacatgtaccctaaaacttaaagtataataataaaagaaaaaaaaacttaaaaagaaaagtttccataatgaggattgagtttatatcgttttcttaattaaggaaagacaaccctcactacacacacacacacacacacacacacacacacataaaaagacaagaggtgagatcaaggcgtaaactagtattggactaagccagtaagtactgcttctcagtcctcagttctctaggttgggagttttccttttgctattttcattctcctccaattcatttttcaatgatcttcaacacaaatttcgcctttatttcttgttcaaaatacttccatgactattatgaatactatttatggatgaaggctgaacattttaaggcatactaagtctcccatgatatggtaccttttcattttcccattctataccctgcatctaggcttttaaaaaatataccacatgacttcatgcctctagrctattgctcatgccacggcatcccttctgggttttttcccctctttatctacttggtgaatttgcatccttcagtataacacagctcaacataattctatgcttaaactttactgaaaatgcacaaggaacttgatctttctttcttattttccccattttatttattttcccattgcatttgggcaactttcatggcaccakttattttattaattatttgtataaactagtatgagcctattttgtttagctttctatcaccaggagccatgaagcactttgmaatcaaatactgtttgtacttgaatatattaagtaagcgtgaggacttaaattaaactttgttcctctttaaaaaaatccttaccccaactctagcactgattctatgttattgaagcttacaatctttatgtcattttctgtcatcttttctgttatgagaagacctaggtatgagtctattgcctttattccttggccttctttgcaagggtatcaaagaacactgctgcagtacttcctgttctacatagtcatgtgacttaagcaagagcatctgccagccagtgaggccccttgagagcctggttaaacatgggactgaagggttaagtgaatcactttttattcatgttgaaatatgaatgctgaagtttggaaaattttatatataacattttaataactaaaaaaacttgacttaggaatagtgcttatattaaaatcagtgtttgtcattgtttcatgaagtttttacaaatctaagaggcttaagagggatataatagtccactttgctttagttgtgttttacttgatattactgattgctttaactttgaaacacagaacaatgctatagtaagaatgtagtatactactctattaacccaaaacataatatagataggtttattgtatatttgtggagaaaagtttattctaacgttctttttacaaatagtaaaaatgctatttgtaggatgctctgatttttactttttgtaaaaagaacattgtctttttaccccaacagaaaatggcaagcrttcagctttctttgggaatccaaaatctcttatgaggcatattaggtatcacatgtgacataagcaaaagcctgtgatccttagcatgttggaaagttgctactctttaggataaggttgtccatgatktctaggtcattccattmagctgcataaacaattcctttgatggatggctggttttctacaaccccagcattattttagcaggagaaggtagtatttgatgtgttgcaatttgtgttacatgcccatggaacatctctggacattacctcaggaggaggrgttaagagaaggaggagctgtggctgaagacatttaatggcagaatgaatggaaattcaaagatcgctgtgcagtcagccttaaacactgactgcacccctcccagatttcttttacattaactaaaaagtcttatcacacaatctcataaaatttatgtaatttcatttaattttagccacaaatcatywaaatgacgaggattttgacagctttcaaagtggtgaggacactgaagactggttttggctttaccaatgtgactgcacaccaaaaatggaaattttcaagacctggcatcaggctcctttctgtcaaggtaatacccatattgattgtttctgataaaatactatggggtatagtttagcagtgaagcaaaggtgtcccttacaaggcaaatacagttttgaatgtagctctgaagtactaatgtattaatgtttcctttactgtggaacctactgacttagcaaatgctaatttttatcttatctgagtaacatgacagtaatttttacccaacataaagaatgatgacaattcttgtgaacatgtaaaatgtaagtacactgcttgaaaaagaaacatcttttctttcatagatagctttctgtgactagatactattgcttacagtttggatttaaaaaatggagctgcttatatgtgtgtgagccacattatggtacacagtgtgttaaggtctgttctataaatagggcttactgaaaagttctcttttgaaatatcatttaaacattttaaaaacataattagaaaatatgtgtttttgagatttgcaggtcatcatgtagacactgctttagctttttccttttccttctggctgtttttttgggcaggctaaacttattattttcattttgtagagtaatacatagaggcagatagcagctgataattctgtccctccacaggtatctataattgagagggcaagcccaggaaagaaacattaattgcccttcttcctgccccccagcattgaattatgaaattcctgtaggaacctctgctccttcctgcaactttatgaagacgttcmttatcagagaagcctgaagttactccataggaactttgccaatgaaaataatctttagtgactataagtttaagtaattatattagctttagatatattgcttctttagcagcaaaagctgtaaaatttgaaatagaaaaaacaaaagaaaacctctgtctgttgatgtgaaaatgggaactcacagtttggagtgttctgcttatactttgcatgctcattgagttgactaagcttctattgtttcagttgctcaagtcaggattcagtggggttttggtcctgacacctgcaaggccaaggaatattcatagattcctgtggctgccagggatagggatgggaaaggaatgggagtaaaagaaaaggaagagagatggagacagggggaggggaaggggagaagtgtgagggatgggagggagagagagagagaaagagagagaaactagctcaagatcccaggagaaaagaggaaatacatatagtagccttagtggtgtgttaacaacttcagcctttaacattgagaagattctaacaagagtataggaaattaccattttaaattaagaaaaccagaaaggaaaatgtcttttatgttgttacatattccaatgtatccaattttactctttttaaatggacatcatgttttaaagatagttaaaatcattaggatgtagttacataatggccataaagggcactgggagcagtcactaaaggttagtggcattatgtctagttatatatattttcttgaatttagcttaattatagcaaaagaatgggaaaggagaatattctaaactaacatcaaagacattgtaactagatgtaaactatgagaatttattgttagtaatacctcaaggtactcatgtatcagttcagagaaaatcaatagtaatgaaagttatcccctatgattatatgtgccatctaatacttcaaagttgggtgacttggaatatcttcttctcactctgtgagaaggtaggtatgtaggtaaggataggtgcatcttcatcagaccccagaaaccgygaaattgagtacttacttaaaatggcacagatatgattgaaattagaatccaattctccaagatcacaataagtgctccatacaaccaccaccacaatcacaaccacgacaaaatggtctaattatgtggatggattactgtgaaagcagttctagctcatggtgacagatctgtttcaagggtctgtcacagtgcacagctaagaatgacaaatttgtaggagcactaagccatcatttcatggtgtaaaagccattactcacactcaatcattactggccagagttttggaggaatgccaagcacaaaaaatagaagttcttgaacttcacaatagtgaattaaaattccatagaacagcccaaggggacttgtgttattattcagttattrtgaaatagtcctctatctacttttcttcctgccttcactttaaaaactcaactgtcttagaaaaatatatccaaatttactatttttagatggacatcatattttaaagatagttaaaatcattaggatgtagttacataatggtcagtgaagggcactgagaacagtcactttaaaggttagtagcattatgtccagttatagatggtaaatggattgggaaagacaccctgtagtcacatctataatcattgccctgtaaattgggttgctttttcgacatatttagaggtttgcttttcctctctctttgatgacagagacggtgggtttkacgacagcaatgacgcacttataattttatgtggcccttccctgggtatttgtcagcggctaatatttatagagtgctttgccaatcggcacagttgtattttacttacaggaaagaggaaagaatttcaaggtgctctatattttaaagaaagttgatatcaagggtataaatgatcaacaaccataaaatactaaatactaaaaagttttagataccataatctttttccattagtactgaaaatgttcagcactcattattacattcagcaggctgtaacagtrtaatagtgggatatactctggattgggcacaaaaagatctggaatctaacccctgttatgcatttcctaatgccctgttcttggacaagtcacatattctctgaacctaagttttgtcatctgtatagtgcaaatgatgactgatttacttgacaaattatgtgattgtcacacatgaacaattctcaaaaatctttaaagttttaaatttaaaccattaaactgaacattttaaagcaaaaactggatatttaaaaaaaaattccattctatacattttagtagaaggacttagtagagggttagatcaaagagtccttatgttttttatggactacaagttgttgcaatgacaaggtatttgataagaattctcaaatatttataataatgatttgttcacctttgccttaatattaaacatctctaagaagatatttcttataataaatcagactcaaggaaaatgaagcaaataatctttttttttcagtatggcaaatttaattccaaaaggcagaatagacaccataataacctatttcattcattcattcatttattctttaataaacacggaacctctaccatgggagtatacaggaagaatgataaatagaaataagtggatcataagagtatagtctctgatttcaagaaacttacagacttcagaattctgagttcacaagtctgggaaagtcatcaaagctaaatagttttatttttacttgcaaatgaatttggaaatcaaaagtattaaattgtaaagcttaagttccctatgaatagaaaagtgttcaataagtactccttctaacattaatccactcattttttaacaatggtgacctgtgttataattaagctaggaacctaacaatccaagtgtcctctctgatacttcagctacgaatgagcactggtagtcattatttcttttgaaaggcattcatttttaagattttatattctgattttcacatagaagtatctatttagttccgtcttgaggagctattgtcatttgattagaaattggcaactataaaaactcctacaattagaataatttacttacattgtagtagctttaaagatagtcacaggaaatataactcattatcatattggagcctctgtacacgttagatgtaagagtggggatggggttatcacacacttttaagaataactattttattggacttttactacatatagacacattttaggacggatttcatctatggcaaactacatttttgaaatattaattgtgttcagtcccaaatgagctgttgcagaattagtttgcctgatggacaactttacatacttttggcatgcaatacttctctaattgggagatggcctttcttttgaacattttaattttttccattttttatatccccaattttctaaaatatagattcatttattagtcaccaacaacgccttgacattatgagcttcttgacataaaactcttgaaaaaactatagtttaaatgtcctagactaggttaagtgagtgaggtacctgagatgcaaaatttaaggaggctgtcactgttagtgtcatggtgtatctctttgagagttaggccctaagcacatcactcagtaccctagtcccagctttgggtcagaagctaagcattctggctgtagaactgcccaagggactagtactaatcttgacctgtgctttcctctccctcattccaatttgctcatgtctagccagactttctgacgatctagaggtgacattaggtcttattgctatggaaatggagactattcctctgcctttacatctgtattagactttcttcatatttccaacctgttccaaaaattgaggggtgctgtagaaagttttcagtatctcttaggcaatgggcatgctagaattcacttcaagccttcaggaggagtttggtatgctacgctgactgcccttgatgggatttgtatttcctggggcatttgcaatgacggaggcccgaaaaaagctgcgcgggccaaggtcaaagtttgtgttaggctccttagccctagggatctttagcttccatttgattttcttcatgtgatctaaatgagttgaacttataaaaatattttcaaggctactctgtttgctttttatttttttcaacttgttaaatgctatacattgatcttttaaatttcatagggaggtaactgactaatttgaagttctcataaatgaatcaatagggttgctacrttatgaaagaattttactaagtttcttctataatgcagactgaaatataagaccattttaatttatcaccaccatacagtaaaaattagcttatgatatgtaggttcctccaggattctgaacaacttgccacatagcagatgctcagtaaggcatattaataaacctacactttatgaacatactttgtaatgaaatttttataaatgctgtattttatttacaatgagaaaccttattagaataaaaatgattcataaatcttaatcttttgtttataaatgttcaaacataaaagtacttaagtaaattarccttttgattttgtccccttaacattggcttatgtttaaccaaagaccgatgacttaatattaacttggaatgttgtaagattattaactgagaatgtggtaaggcctaattgattactgctgttacagtgcttcagaattttgaagtgttaggccttgtaactgcagagaagtctcatgaaatatttcaaagacaaattgtgctgaaattctaaatttcaaaaatccatatcttaatagtgtaattccaagaataaaagaataagrtttcatttacttgattttaactttttaccatattatctacacaataattacctgaaataaattctggctttaggctttctacttttcagtgcttagttcagatttattttttaagaggatgagtactgaggcgaactaatagcttagaaacatcaggtaagccagaaagcacgtatgttatatagccttaggccttggtgaaaatggaaaaaaaacatgtggggcctctactttttctgaagtgcaaatagtttacgtagataaatgattcaacagcaataccataatcccagagtaaattattttcatttttactactagctcaagggaattactgacttttaaatggtgtttttttttttttttcaaaccttttatggaatctattgctgaattagcttaaggctttacaggcagaacattttagtggtggagtctcatatctaggagaagaaacatttctgttcctcccatttcacagatatgtaagtgctgaagttaaaacaaggacacatggatgcctgtttttgtacgtaaaacaaaatatacattagcaaatttggttagaattttaattaggcttcaaacaacagatggatctttttaatttgaagttttgttattgtacttatatacccgatgccatagttgtgtttaacctggcttcagaatgttctaagtcatttcttctgctgttattttattgcttactcaagggctcatttacatactgaatgttatggcaatacgacacaaatttgatttttccttttctttttttgagaataggttgtttaaatcaaagcataaggaaggattcttgctttatatggctgtcaacaattatataaataggacattttagggcaatgctgtttacagttgacgtatttcttccatttcaacctaaatattgtcatgtgtttgtaacaaaacatgctgtttttcagtttcaatgtgtttcttcctcttatagtcctgtaagctccacatatacaaaagcctaatgcaattttaggctgcaagaaaagtctcattttgmcttgttttccatcttgatataaaagacccgaagaaaactggttcgaagtaaaggatcgatgtccttagaaktagttcagaatgctgatgggttgtgaaacaatacatgagcaatgagtagatgatttttaataacataatactgaatgcaaaggagaacctaacaataatgataaacactaggctgcttcaaaaacttttatagattaaattacaaattatgtttgaattttgactgttacttcctaagactaagccctctcaatcagtttagcatagcaccagggacagatgctcaaacctttttcaaggggaatgtagctgtgtgactctcattaatagctgttgcattattctgattctggaaaacactttgaaacatctacccttttaaactgaatctcagactgagtattaaagggtaaaattgcagtcacttatttgtggtcccataaagtttatgaatcatcttactaagaaatgaaaatatatccataaatgtaggcttacaatgaattttaattgtgaggaaaatttaaaacccctaaaagagatgagatttttagagaaatttcagagcttgcagtattctatcttgtaacatcattagaacattgaaatattgtttgacaatggtgaaacaataatatcaacatccacggcagacaaaccaaaacaattgagagtttattggaatttctacttatatgtaaccccccctcacaaaaatgtattttcattaaaaattacttataacctgtgaaagaaatctcagactttacaaatattaagaattgcaacattaaatttagttaacaatgatttttttttttttgagatggagtctcgctctgtcgcccaggctggagtgcagtgctgcgatctcggctcactgcaaggtccgcctccggggttcacgccattctcctgcctcagcctcccgagtagctgggactacaggtgcctgccaccacgcctggctaatttttttgtatttttagtagagacggggtttcaccgtgttagccaggatggtctcgatctcctgaccttgtgatccgcccgcctcggcctcccaaagtgctgggattacaggcgtgagccaccgcgcccggcctagaatgctcattttaaaagtaatataggaatgggggccggacttggtggctcacacctgtaattccagcactttggaaagccaaagcaggcagatctcttgaggtcaggagtttgagaccagcatggccaacatggtgaaaccccatctctactaaaaatacaaaattagctgggtgtggtggcgcaaagtgcctgtaatctcagctactcgggaggctgaaacaggagaattgcttgaacctaggaggcagaggttgcagtgagccaagatcatgccactgcactccagcttggtcgacagagagatttcatctcaaaaaataaataaataaaaataaaaataaataaataaataaaaaataaaagtaatatgagaatggagatcatatagctatttttgtaattcagtttaatttagaaataggagtactaaataaaattataaagtaagattaaacatggagcaattacatatacataggaaaattccgttttagtccttctaaatattgtgtgtgaaaaaatctgcagtcttatgaatcttcctccaataaatttgctaacaaaggaaacatttagtattactaggcygtagagactagtaatttaatctttaatttttaaatttatatgaagtaacaagagaacacaatttttcaccgcttattttataacctgattggctcccagattcacaatacstgtaggctccagactaaaaaatgccaaactgttagtggaaagtaaccttaaggcatttttcttgatatccatattagctacaatccttggcctatttctttggagtatgtttacatgttttatgaatataattacataggtgggagaagaaaaacatacaaacataatttcaaaaagatggaaataatgttaataattgcagccacaatttaaacatattggttcaaaartttaaacgtatttctttgttttatgagattcaaacaaaatctcataaaaacatgagatttttagaaagtacagaaaaatctctctctctgtatgaattttattttaggcagttgcatgctaaacttgtgcttggttgttcaaataaagtgaatgttcacatgtggactccactcttgaacatcaggcaacttggaagtaacattaactttggcataaggactttgactgatcatttggtttaagtgcctagcatgacttaggttctctgtaaacaaatgctgagatgatgtttggggagcatgctctctattagggatcagcatctgtgaagcttcaggaagtagaactggacagagaactaaactgtaatgcagttttgataaagccttggccaacgggataggaagctgctgcccaccagactttcctggatgtggcctgaacctttctatccaggcctaacttagacactggtcatggggtattccaagaaagtcatggggcaatgcagccctctacagctgagatagaccctgaaaaatttgacagcaggagatggtttgctgacctcactcctcacagcagggcagcaagtttttccattattaatatgaataattatctatgttatctagaaattgaatcctccatcactggggaaaagggagggggkactgagaggtggatctccttattcatcacatcatctagggttccaacaatcttcagtgcttgagaactcaagggcctaggatcagtgcaaattgttctcgaaacctgctgattctcctcagattataatgactcaggtaattcatgacttgacatttcactttgacaatttacagatttatagataggtagttcttggttgacctgggcctgttgtggcttatccatggcaattttgaattaaggctcttataaataaatttaaatagagttcatgcttaaatttcttttaatcctcacttacgaaattggaaagcagaaataaaagtaagcttagaaaaagaaaaagaggttataagtcaaacagactgggttcagaaaccgctgctcttccagttgctaatagaatgatctttacttctctgaggctcagttagttcaagtgtaaaatggagatttcaatattacctacatcattattttttgtgaasattagatgagaaaacccactaatggctttaaagatagtattcagtacgttcatgttaactgttattaaggatgtcatagggaattgatcagaatggagttctcggtgacacaacatgctcccaaaccttacttttccaacatagcttcataattctgtttgaagtaagatacctttcccagaacagtataaatttattattcaaatccaaattctcaacttatttgtacaactgcatatagactttaataaacatagataattatatatgcaacccagtttatgttttaataggttatcagtaaagtaatggcagaaggtagaaataggatagtgacaggtcaatctacgtctaccagacatgcttaagaagtgttaacrctttactttatccaaatatcagtattacagcttttttaagggaggtattttaacatttgaactcacactagtgtaagtttaaagtatacgttatctttaattactatttccaaaattaattataccaacatttactgaatgccaaagatgtaccaggattatacatagatctcaacaacaaaaaacagtaaaaatataatagcctcagtatttttaatagagggagaattattattagttataacatagttggggacttggtatagaaatgtaatattgtaagcatgagaccacatcagtgaattaaaacaaacaaattttttgctgacatacagtaaaatttggcaagcattttagatgaaaagtaaaggaagaaaaagagaatgtttgggttatatatactgaatgcagctttattcttttccctagtgatggaggattagatttctacataacatagrtaattattaatattaatgatagaaacaattcatgaggaaacctaaagaatgacatttagaaatcacctttttgggtcttcttctgaaggcattacttatatgacacctgaatggtagaagaaagcctaagggtactttttgggcagcaattgccacccagccttaactcattccttactttcatcttctatcttttagcatgaactatacctatgtgaaatatttgtctttgctttcaagaggagaagatgaaaattagtaaaatgaccagaagtcagtgagcatcaaataactattttgaaaacaccatagtgtcagcattgtaacatgctaatatcacataatgaagtacatttctatgcattcaccaactgtgtagtgagaacattactgtgtggacaacagtgggctatttcagtggggatacagcatggaattaggcattgtgttttccagatgtaacattgagaagttaaaatctagtacggtagataaatacctttagcaattaaaaggtaacacacaacagtatacaccaaatgcagtcagtggaagcacaagaaaatcagtgattaattctgatttagtacacaccatgggtactaggaagcagtaccaggatgtaaaaggcaacgaggaagacatttatgcacaaaggactgacagagaggtggggaatctaaggtattccatatagagagcgagccagatgagaggactttgaatgtgaattgaggaatttggggaatggtgtcacccaattaatgtttaagaaagccttaactatatttcataggacaggtagaagtaaggagagactggaggcaggcagaacaagtaggaggcaatagcaggtgatgatgggatttttgtcttgggtggccatgcaatttcatatagtgtgaagttaattctaaaaaccaataggtaactatttattagttagagccattattattattagatactatgtgatgaggtagaactatttttaattggagtattatttaaataactagcctgtaggaccagatgtgacttgacagttgtgactccaagatacactaggaaaatatgacaaagggagagaggttgagactccaagaaacttaatatttaaggttttaaaatattcgtaagactaaccactgctagaaaaaacgttgcattagatatctacattttagataagttccaccaataataaaacaagtgaattaagaatttgaaacatggttaaaataaaaaattatatgcagtgtaagatgaaaaaattactgtttaatattttcagaattaaaagaaataatcaggaggatgggtgtggggtaggagagcatatgctttttttttctmctrtaacttttcctctcttatcaaattcactatttaatcatttrgaaacattctgctaaatactcagttgattatctgactaaagtaatttcactraagtgtgaacaaagcttagtgacttgtctactctgtgctagccactggtataggctggaggtgcactagtgcaagaagcagacccaatactctgcctgcatgaagttcactttctaatgtgatgaaatagataataaaaaaatcactagatggtatgttaaaaggtaatgagtattatgaagaaagagcagaccaaggagaaagagggctggggaacatactgtaattttaaatgaggccatcaaggcagacctctccgagaaaatgacatctaagccaagaggaaggaatctttaaattttggatttttaatacaaaatttggcaagtttttttattgaaattttaatttttattgcttaaaacatcagtggaaaagaaagggcaaattctttggttaaagcttaatctctcaagggaaaaatatttatctttgtatttccacgtatttcagtgacgcctcagtgatatccttattgaagttttctctgttttgtaatccattcccttatctagccttttactaaacgagaagactggagacattcatccatttatctacagagcctagcaaggtgcttgacacctggtaggagttcagtgtctgagacttgaatgtctaaatggtcttattggcatatacatttttattaaacacatagggatcatgtcatgataaggtcctttattttatagaactcacatttatataatcctttggttacttttcctgacattctacaagaatacactcttcttttcattaagatttcctttgtacttccccttttcaaagtaagacgtgctctggcagtaggcacttaaattatacttaaatgttataatctaattcctagcctgtggacctctgtcaacgaggactgaggatactaaaatatcttatgatagtaacaaggtgatttcttttatactccttggaatgaaatagcatttggggaactgttagttagaagaaaggattccaaataatagctctttgttcagtgtttgtccatcaattcatagataagtcaattggcactcatcattttaaatgcatcaggggccagtgtagttaggagatatatagagagtactttaggcagtaaacagaggctttgtaacaatataatgtgtagtgggaaagaggattggaagatctataaaaactgccaaaagaaccaaaaatataattaaagcagcaaaaagacatattgaacacaatctcagggactatttcacgcaatagcaaatgtctcttcaactacagagatggaaagcaaaatagaaaactagtttcatgaagggagtgagaaaaataccaaacagaattgtaggaataggctcacaagtgttgattttcttatgctaatttttacccttctttaaaatgatcagaaagtgtctaacccagatatgggataatttgaaattctcagatgagaaaagagaaaagcaaaataaaaatataaacaaaggtaatattttaagcaagcatgtctcagagtagcacagataaactgatatgtagaaaactattgaaatttacagtctacactcaaattttgccaactaaatacagttggtttaggttctatcaaagttacatattatctaaatttttttctttttcttttcattttgtaaaagcatggaggtttacacacgatttcctcaagaacaaaaaaaacaatacttccagtagaaaatatttttcgatggcaaattttcattacttagacgagaggtttcacctaataaaacacatcagagttacctggggagttttcctaataaacacacttctattcagacccattagcagagatatttgcatagcttataataatctttagaaatacactgaatactatcactcttactttctaaaatcttcaacttctgtcttgaattgtaattagacaaaaactagcaaattaaaacaaaatttagaatcagaatagcacattatcagaagaaacatgcgaagctgatttcctggatacagaagcagaattcagacttctgtattaagatcatttcttccatagaagtctggtttcactcataataaataataaataaataaattattgtggtttcctttgtgctgagtaactctaaagtatttttaaatttagtgaagacaaactccaactatttaaagtgtcaagcttgagatttcaaacactgggtcgaaggaaatagataaatctttaactcaaagataatttgataagcctagtaaaggacaaaatatttttggctaatcttgyccaggaacacacgcatatgctcactcacacacatacaaacacacataaaatgtacagtagagtacattgttcaatctttctcagaaatacaaacttgaaattcacatatcgtacctctgatttaaaaaaactaataaaattatctgttgagaggaacatcttaaacatatcctatcaattttaatggaaaacactaacatagttttgtgtgtaaatgtaagttaataggtatacacactcacacataaacaagacgtcggaatatagtatattggtttaaaggtaatcaagacattattttacattgcagaacacaatcattctaatgacaagagacttgggtgctttggatctaaaagaggcatcttatttctacagagagaattattatagaaaaataacgggctttcttcattttaacatttgaaaaattgagtgcatgttataaagcaagaggaacatagaaacaaaggtctagaaatcatttatggagttcctgctgcctactaaagtttgtgtgtgtgtgtgtgtgtgtgtgtgtgtgtgtgtgtatgtgtaatgggagtggaggtggggtggcaagatttaaaaggattaggcactttggcctcagtcctaaaactgtaagggaagtaaaatgaagaattagtatttttttttgtcttcgatgactacacttaaaccttgcagaaagaatagcacaatgaactcctttacttcaggaaattcgactcatggccagacttcttttctctatatgcctgtctatccccctgactgctgattactttgaaggaaatctcagatatcatactattttatccttgaatattacagtgtatatcttttaaaaggcaacaacttaaaaatgtaactacaatcctaagaagatcaatcttaaaaaattacttagtataatcaaatatcaatttatgattctaatttcctcaattattgcagakatgtttttctttatactttaatttttaaaaaccacattctaattagtttgtcctatagagtttcttagagaatctgtattttgtctcctaaggtgtagttgaaaacatttctctctcccttgaattttacggaaattgagagttagatttaaatggtttcaacaacagaatttagagtatttataaggagtagatgatgtctgcttcttaaatgtttttccagttgtccctcttcttagctaagaatttggtagacactggctcaaagattattatggcaaagttatcaaattccgaatgccatagtatagagaaggaagtagacatggatataattaactstaataaaaaagcaaaatacaatatacttctagaatgttccacagtgcttggttttgtgtcagcattaagagagtgataaagtttcagtttcttcatgaacataattctggcatggaaagggcaacccttgggacaactccatcaaacacaagagctctgtggaacacagtttgatagataatcttgaagattccttctggctctaaatctcagagtgatgatgagccgtatggtacaattcacaatgtttttgcaaactcatgaactttccttaaagctattcttgagcaaagctagggaatgataaaggggaaaagacagatacataacatttcagctaaagtgaagtatttctggcttgttaacaactctacaagtaaacttagaatagacaatgtatctgcatgcttcagttcctcttccaagaaaacaaaacaaaacatctgccagttacaagagctatatatttgaagaaaagtgacaagtaataggaaagcaactggaaatctgggcattatggtttcattaaatatacyktgccwttatttaatatgtctgtgtattttacctttggaatatttttgtgtgttttgtattatgtattctgctaagattcatgcaactgtttcttcaggcacagacagcacacattgtcctggaagatggaactaagatgaaaggttactcctttggccatccatcctctgttgctggtgaagtggtttttaatactggcctgggagggtgagtaatgcttttccaaggctttatttttcctctagtagagaaataactggaagatctcactcatggtggtaagttgaaatcactgcatcgtagtaagactacgtattgtcctgaagttgcaccatgccttgtgcatagcctactgctgccgtccttgaaagaaagttagacatgaacttcctgctactgtaaatgaaagacaacatgggcacactggtggtcccctggataaaaagaacaaaatgaattctagaaacttagattgtgaggacacaggttatgtgagattaccaaatggtttctgtaaggggaggtatgggtctgattaaggtgaaaatcggagcaaggaaaagaatagatagtatattctagtgctatttcattaggaaagaatcaattttgcacatctaatatgaaatactataagaagattagaaagtccttgggtattttatataattttgcactctagtaagaaagttgaaataacagatacatttattatctttaatcaatgagggagcatctgtgtagatctaatattttcaataattatcaactgtgacctgccttagtatttaagacctgctaacatgtacagcaatgaaaacgagagttgctacagaaattaagtggctgcttttacctagttaataaatgtttgttcacctgggaatcaggaggctgaagttctagtctcaattctaaggataactaattatataatattgggaacatcacttaagctttttgagttctagtttcttcatataaaaagtgagggggttggattaaatactaatttacagctggggatttaaacaattatgtgtcttaaaaacatgactagattgattgaaggggtttccaatacagattcaatccaactrgtattctatgaaatatttgataaattctttagagaaattcaagttagtctcataaagacaagggggcattaggttcactgatactgaatatactaattgaccaaacttccattatattattaatttatattctttcttaaactcttgcctccctgtgtgaaatgaagaatattagaggggtttttaaatagttccactggtgagaacattaaattacagtgtatgaaatctgtttgcaaagttttgcttcaccaggcaattatttaaacttttcgacagcactaattactagctgtgttaatatacctgccaacaaacaactgtttaatatagatcagcatgatggagggcactagagttttcttctctgtgatagtttacaggtaataaatcttgtcacatcacaaaagtcaaacaggagctgatggattaatttgctcccaacactgtagttctctaaaacaaagtatatttattcatttactgaagagtattgtaagcatatgtttaaagggaatggtaagttcttttatggaaagaaagaagaaagagaagtaaaatcaaattaattaaagttttttttgatgtaggaaaaggtattcatctataagattagtccatagaccctattttccattgagaaatgcttctttcattcattacgtgcctcactcagtaaggtggttgataattaaaggggttattttgtttttcatctttaagcaatgcatttatattgtgggcaagccttggttaaaaaattatcagttcctgacagataagagacatctgagaaattagctgatggaagctgcggaaaaacaccacagccctcgagtcaccttagggattgcagagctgaaagactatgtattttgttgacaaggttagttctggtaggcgttagtctggatggtgttgaagaatttatgttgactactgcctgcgttaaactttattggtttcaaagtcgttgattctgtgcccctgagcacctaaattcactttcagttgtaatccacaaaaaaggatttagcttaactcattttgcagaaagtggacatggaagagagcaggaaaaaaacctcaattgcagtgtattccagtgcatggaaaaagtgtagatagctcctggtattcatgggaataacgtttcttcttcttaagaataagaaatatgtgtgtgtgtgtatatacacacacgatatgtatatgcacacacacacacacacacacacacamgatatatttgtatttttcctctcacccaaacttaaaaatatagccctcctgcattcctccctaattccatatcagtactttaaaatagttagttggcatcttttaacttagaagtcagaaatccctcaagtcaagtctgcgagatgaatttttttctaagcagataataactttcaaacttatatgcttctttctaaaattaaaatattttaaaaatcaactttattgagttattctttcatataaattaactcacttattctaaatattcattgaattttaataatcatatatactcatgcaaccaccactaacacaatcaggctactcttcagtatcctaaaaaatatcaagaaaaacttttcaatgtttcgatggttactatcttggtgaaactggcagccctcaacagtaaatatcagtttgggctcaatgatatctggtaggccagggaaatctttagagtatctgcaaactttaaatagagcagggatattttaaaaattaagatgctagcaagggatttttaaaggaattaaaaaatttaaagaaattgagggaataaaacttatatgaaaatataccttggtactcacgagttggtttttctttatatcaatgacatcgtggtataaatttttatattctgtcataacatttccccaggtacgttaaaatctagagacattcttgttggattcttctcattttcaagggttaaataattcagagcatgtatgcagattatagctttgtagttacatacattatttgctgataattttttggcatgtttacccaggtacccagaagctattactgaccctgcctacaaaggacagattctcacaatggccaaccctattattgggaatggtggagctcctgatactactgctctggatgaactgggacttagcaaatatttggagtctaatggaatcaaggtagtaccagtggtggccatttaaaaagtctcaatttgagggagtatagttgacttattcttaagaattaggatggccaaactttcttcctcaatacggtagtacaaatcattaagctcatgtattcaatcttattcctaggtacatgagaataatctttaacttgacagtattttgagtttcatttctcagggcactttgaattttaatgcgttggatgaaacttggcttaacttgaaaaaaatgttataagttcaaataacaactatgctataaaaggattggggaagaatcaccttttaaaaggaatttggtaatgaattctgtatcaattatttgctttttaatcttagcctctaggggatgatttaaagatagcttttatgccagtctaaaagtaaacatattaagatttcctaaacaaggtaattttggatactctcttaggaatatatatcatataaacaattcaaaaatttatattccaaattcaatactattttttcaccattccatttttgaatgacttcaactgatcatttaacttagttttcactatttctcacaatttcccatcaattttttctctgctttaagtataaattaaaaatgattttgttcatcatgtgcattaagccagtaattattaattaaattcttgataaatgccatgcatgtcagaagggggacctagtttagtctcaggatttaccaagccaggtaagcctgctccctctcaggataattaatgcaacaattacatattttaaaagaagggcattgatttttttttttttgcctcttgtttttaaaaatcctaagtctcatgtcagtggatatcataaaacttaaaaacaaatgcaaattgactcacaagagttggataatatcttgtgataacctctttaaaatgactgtctgtctttctaggtttcaggtttgctggtgctggattatagtaaagactacaaccactggctggctaccaagagtttagggcaatggctacaggaagaaaaggtaagaaatgtaatagggcatccatcatcacctaaggaargttgagaaggtgcctgtagattcagaagtgccaagcagacagaggaagatcatgtagtttgggatctttgcatttcagagagggattccttctcttactacataaaggctgaaatgtctgaattcctccttaaatgctgatgagcacatattttcagtttatccactaggtggcactcatacatgcttggtagcacttcacatttgggaagggaggggtaagataaaattttagcattttctcttctctttagcaattgagtcttttactctccttcaccgttttatctagaatgtagtaatggaacttgcttcatgggttctagtgttctagtaccagctctactgttaactggttgtgtaactttgtgcaggtcacataatcattctatgcaatacttgcatcatctctcattcttatgagtataagcagattaccatcaagtctcgttgggcttcaacattatgacatgtaattatatataatttcatttgacatattaataatgtaagaaaagggttataaaactttatcttacacttttagtttaaatattaatttcttttcttttttttgagatggactttcactcttgttgcccaggctggagtgcaatggggcaatctcagctcactgcaacctccacctccagggttcaagctattcacctgcttcagcctccccagtagctgggagtacaggagcctgccaccatgcccggctaattttttgtatttttagtagagacggggtttcaccatgttggccaggctggtctcaaactcctgacttcatgtgatccaccygactcagcctcccaaagtgctgggattacaggctcacatgagccaccgcgcccagccataaatattaatttccaatgaaaaaagagcatttgccttgtttggatgttagaagtacttaagttaatggacctgcttcaattaacttcatctccagtgttgctgtagctgctttttgttcaactgctgggcctgtaattgacagaattttattctacgaaagtgctgcctctccaatgagtgtctatctatgggggctaaacattgctgctttctgaaaaataaaaaaaatcttgatcctggctctttagatctcattctttctaaattttaaaagggagaagaaggcatccatatcatatcctgggccatagccattttcttctcaactattatctgaatttatcttccttatccaggcagctmatttctgtaatcgtcatttgggagacacttctctccccccagcccccaacaacccaagctttccttttcctttttgttatttaggacacttgttctcatagcttttctatgtcagaactaatagttttagtgtaagcctaaccaacggcttgtaagttcgttttttaaatgtgctttgaaccttcttccatgatcacagacatgtagagtagaaaagaatccaagataataaccagttcacctccttcaatttaccggtgagaacaaatacattgcttaaacatttctcagataattagtggaagaaaaaaaaactagaacatgttttcattttttaacctctttttaaaaaaatcttattttagtaaaaagcctcccgtgggatagaacctgttttcttgattcctaactcattactctttcattataccacatgtgtctctatccaacgtagtcaaagaaccttaaaacaaatggtggtcctgcctgatggactaacaggatgatcatgttttagtacaacatgactactcaacatggcccttcagaaaaatgtgttgagtgcctactctgtgccaggaacatttggctcaaaacatggatttgcatattattgcttatgaagttcaccaatgtgatttaacttacttaacatcctgggttaaaagcaatagaagtgtagcagaagattgatgttcagaatttctcatttttttactctgagaaagaacctgggtattaagagtcctatgcctaactgtagcaacaatttactgtgttctgacaatacagtcaccctgggtcagagaaaagaaagagtggagaaattatttactgctcaagaagatagatgaggccaagtttgtaacttgaaaacaatatgctggatttaatctcctccaatttcactgtcactacaatttttttcttataggttcctgcaatttatggagtggacacaagaatgctgactaaaataattcgggataaggtataatcatcatctttagccaaatctatgtttcttcgggtgtgtgtgtgtgtgtgtgtgtgkgktgtttccctcagtgcctaagggatccattaatatgtaaaggagtgaatctggccagcttctgctatctgggtctctgttattttgttttactattttcactgtaattttcaagattgaatacttgattggtatgtttttaactgaatggacttgagattcattcacctggcagcttattgagtgcccactatgtgttcattataccaacaagtcaaggaatttataattcagctcatgtgatagaactttagtgaaacaagtggagaaggtaacaaattgcataacaattttgcctgaagtgaaaacctacatgctgaaaaatacactccaggaagtgtacagcattgttactgttatttgttttgtccttgtgaaagagttatttgtaaaattaatgcattatctttcatgaatgtgccaaataagccttgcatgcattacttcaattatatagtctttgttgagaccatatcaataaccaaggtgataaaagggaaggttatcttttgctttcagtgaagtctgattgctacaacatctgacccctcctctgagaatatctcatcaccatctgcttgttgagtttattattattttacttgaaatttccatattccaaatctgaaagaaacattacgtcactaacgttaactraattccccaaatgcaactaaagttttcttactaaatataattacataaaaataaaaagataaatgacacaatttgaaactacacatgtgggctgggtgcagtgggtcatgcctgtaatcccagcactttgggaggctgaggcaaacggatcacttgaggtcaggagttcgagaccagcctagccaacatggtgaaacccatctctactaaatatacaaaaactagccagttatagtggtgcacacctgtaatcccagctacttaggaggctgaggcagaagaatcacttgaacccgggaggcggaggttgcagtgagctgagatcatgccactgcactccaacctgggcgactacaggaccctgtctcaaaaaaaaaaaaaaaaagtacatatgggaaaaggagtcttcaaaaaawttttttgtagatttcttgttaggatatatacatatatatattgacacaggctttctgtaaacagaaggaaaaaacagctttgaaaataaaaacatggccaaatacccatgaccagaaggaagacagtgagagtttatgccatcattctatcccacctctgattttattcactctaccacgattttcctgagaataggtgttagtgaaattatatatcccagggagattcttgtgttctctcagcctaatgatgtgtgtgagcagtaagcaatgacgaggctatgagggcgggaaaggaatacagttgggaaaatcaattcagatggcagaattggcaggttgaataaaatatagtcaggcctaatgattcaggaaaactttacaagaccgcacttgtctttcatgtgatatgttaggttaaaacgagccctccttttatcataggcagttaggttttcaaaattggcggaatagattggcacagacaaaayagtattgcctcatatttctttatcagtgatggtggttcatattaaaaatgtatattatggctttcacttctattaaccttaatttgaaaagtaagatcgtatttcattcagcatgttttaagaaaaggggaaggagaactaaaaaccaattttcaaaattagggatccataaatatagacaaggggttatgcgacttggattataaaagtaaatacaggccaccatgaaatgtagtaatctactatggaagtgaaaggtggtttttaggtagtgttcccagacttagaggcagcactctgaatttaataacagcactgaaacatccatcatgcttgcatgacacataggtactttctactctcacttacccccaagtgacttctccttcaaggaatacatttaaaagggaaatgaaagcttccttctatttccttccatgcaataatttcatcagagaagggcatatcaatgaattattttgaatttttacccctcaatagaatcttgattactaaatatagcatgccatttttctaagtagttcaaagcagacttactaacaaataagtaaatctcaagatacagctgaaaaaaggtgacattgtcgtgttcaagctagcaaggatagtttgtgaaaactttacagagggttgaacattctttcaattcaggcccataggaacacttggatatgaacatgcctaaacagtgaatattttcatttcaaattctagaagtttatgacttatgttgcatttcatcttctttgtgaattaatattactatcataatgaatgaattcccgctttttttgtgatttttagattccttattgtctcaatagattttttttgtccatttctctcatgaaatgtctttaggtcatatacgctgagtagtgtaagtttactaaatatcccgatttgcatcagcctggagcctggagacctgaattctgatgccttttgactttgccttcatcaggcaatggtgtcagccctagaagaactaattgtatttccaagagtatttcccaaaatgtatgtgcaaattgcttaatcttttcwgtttgagaagatgaagatcttccatgatggttacgagtagttataaagacatctaagtcttgcagcagctgtttaaagtccctgtgagtttatcttgtcaacacctttatcgttgcttccttttaactgtctaatttttttaatttgwtagggtaccatgcttgggaagattgaatttgaaggtcagcctgtggattttgtggatccaaataaacagaatttgattgctgaggtttcaaccaaggtgaggggttttcctttatattttgtagttttatttgatcccatttagaccttcttgaaatatcaaaatctttatttaggcagagtttatcttccagaagcaccagtgttcaggggtagaaagggatctcatagcagctaaaatacaccttacaaaatcagtgcatttaaagctggttttacttacaggcttacatgggaaacttcatgccccaatttagaggatttttactaaatttagtgttccttccaccttttctgattcttcagcttaggattttaacaatgtaaaataaaggaagcactgaattgccaaagataggtccagtgatgatgaggagtcagagctagtaacctgccwgagagccaagagaattttacagaaatcaggcacagtaatcagaatctgggggcattttgtgcaggaaaaatatttattcatacactaaagatttattgtgttatagctttgtttcaaaattaatgttcgtaacgatgactgagtcaccctaaagtgwaatatctttagtatacatttataaaaaggtaaagaatacattttagaaagaagtccattggttttgattgaatatctactaatgtaggtgtgagtgagtttcttgagctacagtctctgtccttggggagcatagagcctggtggaacaaacaagcaagtaaatcaccatgtgcagaatcctgtgataaatgctgtccttggagtgttcatagcatgctgcaagggcatgcatggggcagcattgaaatgggataggtggatcagagaaggccctgtagaaatgtgagtcctgttttgagacacaaagagcgggtagtaacagtaaggtagatgaagaaccaggagaactttgtttcaggcagaaggaatggcttgccaagaggcatagaggtacagaacaacatagtatatttgaagagttacgcacagtttgggatggctgaaccaaggggttcacacctattggtttacacacttgggcaaggataagtggagatggactgactgaagctaggtctagaaggtttcatatcattggctaatcagcacttccagaaactattgtcaactcatttggtgtcattttggagcaaagtaaagctgaataaaagagcaagcaactagaaggttattgtaacttatcagaacaaaactcacgagagcctgaactgarcagtagtagcaagaacagatacggcaacctaggcagcttatacaaatgggaggaagaggggctgaatgwggtcaggtaaaagatcaccttactttctcagctaaggatttcaactagttaggttgagcatagtgattatgtcatttgatatctgagatgtttatgggatactgctatgaaatttttttaaagaaaagtttttgatccgctttgaaacttaaaggaagaattgctaccttctgtttttactacatacaatgggagttaaaaatagagcttctctttcctaggactatgtatttggttaccatggggctttacatgtggagaatttagccctgtggaagcctatgtggcatcacagctattggctggttctaccttggggtttatttatactatagcagagatggctacaaacttctcttccatcaccagtgtggcaatggaatttctcagagaaactctactttatccaagtagaaagtgagtgttattttgacaaaggcgattgaaattcttagaaaggaaggagtagaaaatgtacatgtggacgcaaaatttgattttaaatagatgtattcaccacaacattttatttctagatataacatacacttttttgcccatgatatttcataattatcrtggtccattcaatgtggcagctctggtcttcaaggaaaataataacaaccaagcttttttgaacactcagttaattttcataaaaactccatgtcatagatgaagaaactgaggcttagcaagtaagtctatttaaaatcaaatgtaacttgcccaagtttagtgtcaatttgaattcaagtgactccagagtctctgtggctaacctcatgctatttttctttccattttgatgggagtttgacggaaaagctttaaaaagctcaatttctagatttatgttccatgaattcaagaaacctcttcaagactccctgtgaaccaattttctatttggcctgcttcttacaaggcctgaatatgtttgtttgcttctctacgtagaaatyttttcccatgctttctccttccccttctcgcctgaagaagtcagtttcaagagtcagctcattgttcctttgtgaagcttccatgactcatctcacctttggatcccatgtcatttaataaatagcttcagtataacaaggatcaaattgcatttaactctttgaaaggattgtctctttcacttgtcttggttggctctttgaggggagaggccatggtttacttatttgaatccccagcactgccyatagtacctttcacatagtacatggtcaacaaataatgaawaaataaaggaatatacaaagccagtaaatggtagttacagttggtggtaaagaaattgcacattcttattttcccttcaaatcctttaatcagtgtttcttatggttctatgacctccattattaatataataaaattatcattattactaataactgtaagtcttattaataaaaaataggcacgatctattgagtacttattatctgctaggtttcttctcaatgctttacactgattaatttattccatcttcagtgtaattatatgagatgggtattattaggaactcatttactgatgaagaaactagggtgtagagagattaaataccttcttcagtgtgaatggccataggattatacataggaaggcttggtctagtgtctgtctctcagaaaacatcatcccatactgcctttcaacatagtagaaataatagttacgcaactaacagttatactattagtaaccatccttatactaccatgtgataatattcaaataagtttacattgtttcactccttataccttttacatatgcagagtaaggattcaagaattttaaatcagaaatggtaaaatatgtgaatatgtgaatagactggaaactgactctgcttgtatgggtatcctacccgctcctgtgacaaaaccttgtcattgagagtctttagaaaggatgttcccatgcccttcctgacacctgttcatctgggaaatgattcatgttgtgatacagcaccaatcagaaggcrtatagaggacatttcataaggaagagttccagcgtgagagtttttaaaggctttaaaaaaagttattaaaagagtaaaacagtctgatcagtaacatgtaagactcagagaaaacacacattgatattatctggtattcyggctcctgtcacgtgaaaatgagagacaaggattttgggttcctagaaattagtactgagtcgtgatgttcatgtcgggcagggatgtgcattcaaaacatgctgaagcctaagaagtatgtgttgttaaagaaaatcaattttaaattagatatgtaattacttatatgtatggaatttgatcatggtgtttgcaatactcacttctgatttttaattttaaaattggtcccattcatatgacttccccttgttttacatatttccctgtgaaatgatttagtttgaaacacagcatgatagagggtgatgatagatgatagaatgttagaattgagaactgccttggtggtttagtctagcatttcctaaactggaaaacagtggtgtggagcaattcatcttaaaaaattctgtggtcaagcaaggttgcaaaatgctgcataagatattcctctctgttaagtccaagcacaaatccatatatgcaagtatccatgaggtcttgtgtaacttctgttattcttatggacagtatttaatgtgtttgtgtagagaccagcaaaaatgagcatatctgtgtttttatctgtgtccaatcaagggagatgctgcagtggtgaaagctggctcctttgtttcttaatgtcagtgcaattaaataatattactatagctatgataaaatgcgtatttgtatcaggagattacatatattttgtgagttttgtttgactacatgccttggaaatgttgataacttcattcattatcttgtaattacaattttctgtagctacaactagatggtaatattgctttattttacatcagaagcctaaggttaagaaaagatctatactttttcaaattatttgatgagaaagattacctgtgacattcaattcagcaataactccccccagatcttgaaaggattagggtattttttttccttcagaatagtcagtgggagaaaaaaaaccccagatatagtttatatattttttcctcaactacagtctaaggattataatttcacattctatacagacttagtggagaggtagatatttcagtcaaaataaactgttctttcaaatactcagtttgtacttttcatctgaaaattttcacaaacgatgaaatcatcctaaattcatagcgtgctagctaactctcaaagcaggaaccggtgtgtgtgcccacccttctaggctttctctctattatttctccttttatgactttggggagctgcttcttgggttaatgcctgtgaaaatagatctgcctcccagccgtgcttcagacatagataatgattatgatatgctctgggatctttttatgaaatctaccatttaaatgcaaacaattgcacggcaacctaaagggactggtggtctatacctgcttagcaattcctgtgactyatactgattttatccattaggcccaactgcagaagccttatgtacagtaattcagctttaccccatttgatctttactgcaagttgaggatcaagtggtatttaaagcatgatgtatctattgccacatctgtctagtgctgaatcaggcaataatgcttaaacatttcattgctaccagttgttaatgaggcaaaacatgagaaagatggttaactatgcatgcaaccagtttcttagagatcattgttattactataatcaaccgtttatataaaacagcaaagtctttttttctcataaaaaagatacagtctgtggcacttgttgtgcctttcttacaaactgtttgttaactgccagtcactccctagtagttaacaatcaatctgttaccaatctaagttcaaaacattgtcagatgtgtttatgattttggtctgttgcccatagctgggacttccctctcattctctggtttttaaaatggcaggatgtcaaagtgtacggcaaaggaaaccccacaaaagtggtagctgtagactgtgggattaaaaacaatgtaatccgcctgctagtaaaggtaagtaatttgttcatttcaaaggtgagggtttgtcatattgaccattagtgttcagctaatttcctctgtcacagagaaacttatgcattctttcagaatgtcaggggtctacattcttcttgttgcttttgatttacaaaataacacatttatccctgttcaaattaaaaatatagactgctatgttttttctttaaaaaaaaaacctcaagggccactaaaacatggaagaaaatgatgactgttcttgtcattaattgactgacagtctgagatgcatcatgttcactttctttgtggtatagagatgaccaaaaagctagagtctgtctgatagcatctcctttgggcttacatttattttgtaccacacgtttgtaggaatcatgccctgacagagtacgaactttcacattgtttttatatcaactcttagacaaccagttaaaattaaaccttaaaaattctcaaggagaacttaaccatcataataatgtttcttaaataaagttttgttaggatttttccttctcctcactcctctctcagtctgtctctgtctacacatctcccctccatacacatacacacacatacacacatatttgcataacaccaaattagcatgcgtattgggagactcttcatcgtacctccttattagagaataccagcaatattcaaatcatgatttcaaattcttgtcarttttattaacaaacatttgcatggatagcatgcatggtagcagatgctgtggatggcctgtgtatatctcaatctcaagttaccattttaattcatgttgcccatcttccaattgcaaatatctatatctctttgcctgatggctggagcctactggcaggcagtaaatggcatagaattaatgatctctggagtagcccccaaccaaagcacagaaagagccagtgtttaaccaccctggctcctttgtcccatggataggcagtctctaaggtaactattccacacgggctctcagagttccctactgggcttaaacttcacttatccctagtggtaactacttgctaatgcataatttattggggtgtttcatgatgtcacttcctctctgtttagtatggaagtaccttccaaataagcttttgttctcttaaatccttgtttcaggaaatgcttcatgggaaaccctcaaagacaccttcctatgtgcttttatattaaaagaaatttctaagttttccattcgaatataaatcttacagaaaatragaaaaccctaggaaagaaggctgattaaaatttgataagactaaaaggcaagactgaaaaaggtctgacgtgggccaacttaacattttcagaaaatggatttatatctttttgcaactggtcgtgtgaaggtaacctactctcctgtcagtccagtcatggcatttgtaggcactgaaacttctcttgagtgcaggagagtgcattatccattttttcaggatcaaaacttttaatggtgtttatttttatttttatttttattttgagacagggtcttactttgttgtccagcctagagtgcaatggtgtgatcttggctcgctggaacctgtgactcctggactcgggtgatcctcccacctcagttttctgggtagctgggaccatacctggctaatttttgttttatcttttttggtagagatagggttttgccctgtttcccaggctagtcttgacttcctgggctcaagcaattcccccctatcttgagcttccctatgtgctaggatcaccggcatgagccaccaagcccggccccaaagaaatttttgctcagcattatttattttaaatgtttacaaatttttccttccctttaaggaatggttagtcaagagaaagtctagcaaaattatactttggcaaagaaacatgttattaaattcatcattcttgtgtctcttttccagcgaggagctgaagtgcacttagttccctggaaccatgatttcaccaagatggagtatgatgggattttgatcgcgggaggaccggggaacccagctcttgcagaaccactaattcagaatgtcagaaaggtgcaatgaaccttgaattcatgtgtatctgtgtgggaggtgggggcttccgctctataccctcaaagggctgtgatacattttatttattcaggcatttttcaatgctggtatttgtgacttctgaggcagtgtcagtagagatattctgyaggggaaccaatgaggagagaatatcagagaaaatagggtttttcttcaggcaaagtaacttggggatcatgtccttgagttaaaagaactggagtccaatggccaaatgtattttgctttacagttttaaaccgacaactcatggttccttatcatgaccttgggacccrtaagacctgcaggtctctaaagaaatattaaattagatttagtttagtttgaatgtaaagyacatcttaatgaattataatgctacaaatttgtcaattatgtccttttttatattcttctttaattcagttactattctctttaccttcttaagaaaaaaggatacctcatttttgttcattcagaagcaacattttttggaactgtactaattggttaataaaaattctccctgatttagattttggagagtgatcgcaaggagccattgtttggaatcagtacaggaaacttaataacaggattggctgctggtgccaaaacctacaagatgtccatggccaacaggtgaggtattttcacttttgcttacagtaaaccagctctgacatactaactaaatacaaagaactcagagcacttacctgccatttctttagagtaaataaatgcacatgtaccctaaaacttaaagtataataaaaataaataaataaataaataaataaataaaataaaaaataaaataaataaccataccttacgtggttgacagttgtttgactacctgataccacttttgttgcatttttggaaagcagccttctctaatgataaccttgctataatttaaagttattttccttcccttggcataaattgaggttatratactcaatcaaatgatattccaagggaaattgttctgattttaagcttgatttcagaacattgtaacattttaagaaggtaagtgtgacttaagagccgaggaacctttagatcctcttggtttctcttttttgcctcaaacaatattaatttattaaacatcaggctttttcccatggcccaccctctacataaattataattcaggtctgagcagtcatctctttgttatctccctataactctcgggctttaaaattattgtagttctcttaaagtaagtcacttatatttcttagtttctgttaagccggtgagcaaccctttttgttatgagtgcaatgcccccctttctaaaaccgattatagaatttaatagacctgcgtatttaacacacaacaaagcttcctgaattgatttttgttgggaaaattactgggattaacaatctgtgacttttctcacagagtgattttcactaagcaattgaaattttgaattttaataggctttacttgttcactrctttataaggmatacatttatattattctcttcacttttccttttccctattctttttctccttttctctccagagggcagaatcagcctgttttgaatatcacaaacaaacaggctttcattactgctcagaatcrtggctatgccttggacaacdcyctccctgctggctggaaaccactttttgtgaatgtsaacgatcaaacaaatgaggtaaatgatgtcaataaacctgttcagttggtgatgagaaacgcagggcttttaaaaataattgatacataagcattgtatatatttatgagatacatgtgatattttgatayatgcatatcatatgtaatgatcaaatcacactaggataaccatcacctcattttttatttctttgtattgagaacatttcaaatcttctcttctagctgttttgaaatatgcaataaattattcactcagaatattcacccagagtttttaaatacactatgatgcaaatacctttctcctgtttgtttgtgatttttttggggttgagtgttgaaaaacagctataggttttctcccatagccctctgtgttttaaaacgtcatttctctctcttattctctcatcagttgacttgttaagattcactatttgagttattaatcaacaactatctcatatattcaatgttagtgggctgttggtccaaatctgtttgagccccatctgggtgggtctctgggacttacttggcactggtgtagtgtttgagaagacccttggaaaagtaattttggacttggggataagatgaggacttgagtttactctgaacagaacccagaggggtcccaaagactatagaccaaattttttatttatttatttattttaaaggaaaacacattcagttgagtcttcattgacccattttccatacttaatcaaaaaggtcagatatgtaagtccttaagatatcggaccatgttacttaatagtactgttagttacaaaaattttgttaagcatctaactcagtttttaaatttgagctttattgttccctgaataatacatagccacacttgacattcattgttacagaaggaatttcttcctgtttcttattcctttaggggattatgcatgagagcaaacccttcttcgctgtgcagttccacccagaggtcaccccggggccaatagacactgaggtacgtcaaaaagatgaggcctattatgtatgcaaaaaaaaaatgtatttgtgtggaaattcgagaaaccaaaataatcaccccagatgatcttgagcrgaacattctcaagaagagtgctttggtaacacacattttgtattaaaatctccccatgaatgtcacagaggaaatttttatcttttttaaaatttaaagtgggaaagcccttaagaaacccgaagcgatggtatttttatttaaacccattatcattctaatatatttagttctgaaatttacaattgttgtactatgcaaatgaattcccttttgctctctctcgttctcatgactgaaatgaaattttaatcccccatctgtgacttcacaaaaatccctatggcaactggttgtgtagccactaagggagaataaacagcagcaggagaaggaggggaagggtgttggaggggagagagggcatgcatgcacatacatagatgattcagacggcttcagaaaagaaccacaaggaatgcttagaggagttttgtatttaatctaaatatttttacttttttgtgtgtgagctcttagttcattgttcaaacccatctttccaaataaattcttctggtgatatccagaaaaatctgaagtctattgtgacttccccacacccaggggcctccagtagcaaatcttcattgtcagaactctcagaaaagacttcgaggtaaaatggggaagagaataagagctttctttctgcaagctctgctctactctctcatgtctgaattgccgttttagatatttatattttgttcttgttttaatattattaggaaatattggttcttaatagccaaaatcagtattatattaccaacccatgatgaaactcataaatcaaatttagttatgtgtatcatctaacacatgctaagtagttttttaatttaaaatttaaattagcatatattagtacttcggattaggaacattgcaattaagatgtaataatatccactgtcacataattctccttttttgtctttccaataattgcaaaatgaatattctttgttgtaatttgtcatatctagtgaaacaacagaagtaaatcctttggcaaagattaagaataatcttcagaaactgttttttagagccgatagaaatttaaatttaaattagtatttctaattttctatatcataagtgatatagcttcaattgttatatccacctagaatttgatttagaagaaacaaatgatatacaatttactaaaaacttggcattctcagaaggtatctgatatgtttactgcttgttggaaacttcttttttataagacttgaagtgaacagaagtgtttatttgattaaattctcacactaacagatatttagttattgacaaaaaagcaaaaaaagctgaaatgctataataaaaattatttgttgcttatctgaagttcaaatttaactgggtatattgtgttttatctggtgaacttaggaattttgaagcttctaactagttggttgtatttttttctagtacctgtttgattcctttttctcactgataaagaaaggaaaagctaccaccattacatcagtcttaccgaagccagcactagttgcatctcgggttgaggtcagtatgtgggcttatttttggtttatgaattttggattgtccctatcacatgaagatttttaaaaactaagtgatgtaaggcatactagtgtttaataaaagatgactggtaatattgtaatagactgtcattttgtaactaattatttggttccttcttgatgatgtctagtggaacttctcatgttttgatttaaaataatgtcttttaaagtttacttcttccagagtatttgtaataacataacaaagaatagtgtttagtttagaatttatttcccattatccaaaaagccatagctctatgtaaacatgagatacatttcagactacagaatcattatagatgatagaattctttttgtttcaactagaataactgttattcaacatcatgtactgagtattattttacctctaaaaagcaaatggacaagaatataacacttaaatccttaatttgaatatgtatgttagtgtgataaagtttttacccatttccttcataaactacacattcatatcattatttaaaatttagaaggatatatgtgtatttgaaaaaataccacacatagatatatttacatatatgtatatatttttggatatttatatatgtttaaataaaatgtaaacctctgccaaaaattttttacttaagagaaaaaccttaataaactttggaagtcacattgaaatcagagatgttttaagttattagtctttttccctatatattacatatttttcattacattagaccttagatgaccacataaactcagacaatgtggtttgtcttctccaatcttgaaaatgccttatttcccccattttagcagtaataacagtgtctttttcttattgcttataggtttccaaagtccttattctaggatcaggaggtctgtccattggtcaggctggagaatttgattactcaggatctcaagctgtaaaagccatgaaggtgagaraatatgatccttactagaattaatatgcttcctttaatgagtctaattagtattttataatttagatttatgacactacctcttttcaaagttgctataattattttccttamctgtgcctttataaatcttgtattaaagaagcttgatcacgagcaagaatttcaactttctgtaatgtgcacatctgtaaattgaggaggttaatctccaaaattatttaggttattgcctccttatagtgaaaacatataaagccacatttatttatgctgtttatttcttttgaggcagtgagtttttcaaatatacttatcttttatgtgaaagagaaattttgggcatctttggtgctttaaagtatttcaagtgctctacaggatgcttcaggcatctctgtggttgaaatgggaaactccagttggagaagcaagggcaacagtacattttgttcaggtgttataaattattatctgtcactgggggacacagttctcccatcagtgcctgggaaacgggatgatatggcaacattttcaagtagaaaaaaggatttgatacacaggtgtggaaggacatccttcctgtttctttaaactctctggagatctcccaacacttactgtagtaaaataaaactttagaaaaattccgttgtatatttaatgtatttctcttgaggagttcagttggtacccctcgttgtgctaatcaggccattcggaggcaatgtgagctcttggtgacattgcctcaggctttgcagtgtaatgccattcaccagagaccaggctagtaragtcagcatagaatggcaacagaagactaggacagcaaacctgggaaaaatagttggccaaaggttttcttatttttctttttgttagtattctatagtcaaagattttcacctgatgggcgtctgttgaagaggtagaacacagtctcaatgactttactctttttcccatttgtttttattttttaatactctcctccattcatgtgcatgcatactcacatattttttggaataaattttcaaaacgatgttttacttctttgtattatgctttaatttctcattagataattggagactgtccagtggtttagattagttagtacacaatctaagtgtgttcagagtttagaatacatttaactgtatacagtttttattctatttgggagttttgcaaataattagaatttctatagttttgtattttaatgtgttttacatcaattgggtaaagttatatagttttaactaaagaacaggaattattagattagattgtgatcacttagaaggttaataactagaggtggatttttaaactaaaaaaataattggtgcatatattgcaacaagaattagaaaaatcagaatgatttaaaattaagattgcaataaggtttaaaataaatgaacactcatcatgtgtatgtataggatcttttcctgtataatttgacttataaaaaatcgccatattcattgtatagaacattcagaaaaatacttaaatatactaaagtttgttggtacttttctttagttgtgaggctttctataacttctgttgctggtatgttctcagttgggactcaattattaaaattcatcacatattataaaagcatttgcttacctgtttgtatcttcctgacattttgttaataatattactcttaaaatcttgagagatgactcgtattgaggaaagagcataggatttgaatcataacatttgaattagagccctaatattgccacttattagctatgtgacctttagcaaaccatttaaccttactgaatctcaatttcttcatccaaaaggttgaaatctctttcatagtcttggtataaaaatcaaatacattactaaaaagtacattacaagcattaagtcactatttgaatttaaagcagcataaaatatatttaatgttttattcagatcctccccaaagatatgtggggttttcaataataatttctatacttttatctgaatattttgttgactttttaggagaatttaaaattgacatgctaatgtatgaaataattagaaccatctggctgtatgttataataattattttgctaagtgtcaccctcatcttggtttataaaacaattatccttagtagcctacataaagaattattttgaaggtctctcccgatgtaaggaatgagatagagctatgaataccttcatatatatacacacacacacaaacatacacacacacatgcatgcatacacatagttttatttcttttaccatatggttttttaaatatgtacaaacagttgtataatgctttttgttaaagcactatagcaagcatgaatctagaaaataaatagaaaccagcagaaggctctcagtgcttccagcaagaagggagcacattattctgcattttaaatgtacattcaatgttcttcttagacaaataaatacaagggggagcagcttttttttttaacttttattttaggtctgggggttaacatgtgaaggataaataagatcctttttgaataagcaaatattgagggaattcattaccaccagactagccttacaaaatatcttgaaaggaacactaagtatagaaagaccactaccagctaatacaaaaatgcacgtagacacacagaccagtgtcactgtaaagtaactacacaaacaaaccaacataataaccagctaatagcacaatggcaggatcaaatccacatatcaatactaaccttgaatataaacaggctaaatgtcccacttaaaaggaatggagtggcaagctggataaaaaagcaaaacccaatggtatgctgtcttcaagatacccatctcacatgtagtgacacccatgcgctcaaaataaagggatagaggaaaatctaccaagcaaatggaaaacagaaaaaaaaaggggatacaatcctaatttcagaaaaaacagatttcaaatgaacgaggatttaaaaacagayaaagaagggcattatgtaatagtaatgggttcaattcaagaagaagatctaactatcctaaatatatatgcacccaacacaggagcacccagtttcataaagcaagttcttagagacctgcaaagagacttagactcccacacaataatagtgggaggtatcaacactccactgatagtattaaacaaatcattgaggcagaaatttaacaaagatattcaggacctaaacttgacattggaccaaatggatctgatagacctttgtaagaactctccaccccaaaacaacagaatatacatttttctcattgccacatgacacatactctaaaattgaccacataattataagcagctttcgtattgcctctagttccattttatatttactaatttaaaatttttggaatatgttattcttttaaggttgattgaactacagggttcagtaatatttgtggctctctagaccaattatatagaaatggtctccagctttgccaacagtggcaaagatcacctcatggcgatcttcatgagacagccaattcttttggatagtttcattttcaagaatttcttcatttctttgaccaaatgcttgtcttcctttaacttccattcactagtcctgttacggatctctacggcccacagataacctaaaagcttagttaccccatgtctttttatttaagtgtggtcattctcttctttagaccatatattcatgtactggattcttttgtttctttcaggaagaaaatgtcaaaactgttctgatgaacccaaacattgcatcagtccagaccaatgaggtgggcttaaagcaagcggatactgtctactttcttcccatcacccctcagtttgtcacagaggtcatcaaggcagaacagccagatgggttaattctgggcatgggtggccagacagctctgaactgtggtgagttcttataagcttaattgcagagttttgacatatgcactgctgtgtaatgtattttatttgagctcatctaacaattgtgctttgtgtgttcataaaacctttcctctactgtgtgagaaagcagttagcaaacagccacttaatatagtcatatgatgaatactactagttaatttcacaaaatagctgatagacaaagaaacctttcactttaatgctccagagtggccagtaggtttcttgcatttctctactctatcgcaggatattgcttttctctgttgctattgaggtcttgagaactattatgaatgaaaaatgagaattaacattggttaagtgctcttaggtatcagccctgcagcaatttcctctcaaacacattttcatgatagcatagatcagtctttctactattacttcatacttctgctgagtctactgctttgttctctttaaaattcttcaaatctttggaactggatcatgaataagagtctctttagctagtttgggtaagcaattggtgatataacttgtatgtcaaaaaaaaaaaaaggactaaggcaaaattaggtggctaggtagtggaaacacaaaccattttgaggataattttttagcccaggtaggtactcatatatttgggattttttaaattatagaatctcattatagaaatggactttaggaggaaagggaatatattgaaatcttaaggctcagtataatactatgacttttattaataaggataaaaatgattttcagaagatggtaatataagtaaaagtagcatcagtaacatattttgtcagaccrtcttcagaatttttatttcaatttttttccctaagtgcaattctattgtagacagtggtaacttctcggattttaagattaaaaaagtagttgtattcagttgtctattaaaaaaggcacaaaattcaagattttaaaaactaatcctatttggttcttctttaggagtggaactattcaagagaggtgtgctcaaggaatatggtgtgaaagtcctgggaacttcagttgagtccattatggctayggaagacaggcagctgttttcagataaactaaatgagatcaatgaaaagattgctccaagttttgcagtggaatcggtaaggattctttgctttggaaaaacaagggcattatttgtcttgtgttgtagggagaatgatttttcatgcctaataataatagttaagattattatacttgcatgcattttcttctagaattgtgttaatagtttagaaatattgtgtattacagcactcaatgctgaaattataggtattaacattttactttatgcaaagagaaacagaagtccagagatgaagtggtttatcaaggcttgaagtgccaatgaatctcagatctcctgaactgaaactaagaaccataccaacttgcaataacaaagcaatttttaccttgtttctgggatcaatcacayattttgcatgtgtgaattccctgcaaatgagaaatttgctttaaattttttttaaataaaataaacattttagaataaaatggatccagtcattaaaatgactggaaaacctgtagtttagatatttaaggaagatttgcttttctgttatttatttccattgccccttatgcctatcaataagctattaacagttaccaggaaaaagaatcaactcactttatatctgtttttgcccctgactttatttttgacttcaggctcatagctggtgaagtggaggtgctaggggcagtgttaaatccaacttctccatggtagaaacaggcacacccttaggaataaagcaggtactgctgggacaactaaaaatgggttatgtatgtttcagaagacaatgctaccaagtatcttttgtgttacaaacttgtcaatcaaataatcccaggataactctgctgcacaatttgggaagctcttgccatacatttgttctttcattgccagatttaattatgtccttgcttcctcaggaaaagaaacaggcatatgggaaaggtgtaattacattcccattggtagtgtaataatattccatgacagaaaaatatagccaccatatgttgtattctgtaagttaaaaaaaagaattccaagcttctgggactatgctcagactgaacttgaaaatgaaaaatccatttatatacagtgttcctaatggcttattgtggtaacatcaagctagcttcagcagcagagaacctggtttcattaagacagagacttttaagctgcatgtaaaaatcgtaaaaatccaataattcaatatggctgccattctcaaatgaatgatgattatttctgctttgaccatggttctgtttcaataggacaggataaaatttaccgcaaaagtgtatttcttagaagatatatatatatatatcctcccttctagaattttacttaacatttgagtaacaacacttgcttttcagaatgagatgagggaataatagaacatttctagattcactctccccacataagttggtttacctgattgccagactctcttggtgtggtctgttctgccagtgtgctcagcttttaaaatgttgagtccttgttcttgttgacagattgaggatgcactgaaggcagcagacaccattggctacccagtgatgatccgttccgcctatgcactgggtgggttaggctcaggcatctgtcccaacagagagactttgatggacctcagcacaaaggtatgtatttttgtagacaatattcttaccaaccaaaaaaactggcttgatagaccttttcaactagagaaagttatgtagatgagaaattacattttctttattaaatcatgatcatgttctccaaaagcgtattccaaaagatgacacttttgcgagagcatgcagtgcaactcttcatgccaggatgcaatgataaaccacatggttcaaggtaaaccagtggtcactttacctcaaattccacttttatagtacaatctattgacttcaaggagatgaacttaattcaactccttcttcctttgtttcaaaatctactctcaaatatttaaaatgctaaaatatgttttagtggttaaggaaaaataggacataatgtctcatttttaattttttagaaataatgtggctggcatgggtgacatccagaaagtgaaacaaagcacattgagtagtttgactttactcaaaattaaggtgtctaaaatatrcatggtataaaccactcaatacagtaaatgactgaactccaccaactgccatatactcataaaaacacgagagatttgagggtttataatttattttctatcaaaatcactttaacatattaggaactacttctttctttgcatgttagaggaaaactcttgagaaaagtaagctatgctacaaaaactaaattagagactaatgcagaaaatatgctccaggaaaacagagacttttgtctatactctatttccacaaaatagaacagtgcctggaaataccaggagttcaataatgtctttgaagaatgattacacgtgcagccaagaaacctgtgtaacttacatggcagtcatagaagtgaatttgacagaattactgtaagggctattttgggaattatttaggaaatagctcacggacagcttattgcttcatctttacttactttttgaactgaagtgaaatgagacccttgaattgttgacatagaattttgaaaacagataagtacaattcagcatatttaaataactacaatggcagacttacatataaacaacttgggtttcgtttttctaaagttgtgaaaattacaaaaaagggaaacatacctcacataaatgtttcttgttaccattctggacatatgaatcacatatttagagcaaaaacatgtttttgaagatagaaagtttatttcctctagcatgttagaggctccaaatattttcaatattaacaacttcataactgccaattgtgacagtgtatacatattctctattaatttttttactctataagaaaccaatctgaagactgaacttttcatgtaagaaagtttataataaagagaattttggaatgaaatagctttcaattatttatattgtactcaaataatcaatagtcccttaaatggtttttcttgttgaaaaaaaccctcgctcttcccttgagaataattagtcatatcattatgtcctaaacaatcccctattctcttgaggttataattagcaccattaaaagctgcattaacttatccaggtccctaaattaactttttacataaaatcgaagacttcaaaaaataaaaataaaaataagctgaggaaacaggtgaagataatttcaaattttccctgtatctaaatatccattttacttcattagaatgcaaaatacttttccaaatttataccctttgtttcctagatttcttcttttagcaggcaaccggaatgatgaattaatcattattaaattgttaacattggctactgaattttctaaccactttgagaacctcatcgtgggcagctgtggggacaaatgtgtcacattttcatttgcacgtgctggagcctgtagtgatgactgaagtttaaaaaaatcctattaaggcacattacagaaaaacttacattaaattattattttaatgcctattaataatttgaaaaaattcaaactgctttccctttcactgtcaatccaaatcaaatatattataagacaataagacatttctcccttggattatcagccactgcatgtcctaaggtcaragattaccactttcctattttgggttcagtattctacccattgtgggtgtgccgtaaatatgaaatkataattatgctaattcatatctgtctaatcaggcatacatgatatatgactcagagtatttaagcatttaggcagtgattaaccataataatagtcccatatgattcttctaattctcaagttttatatgccatcttggctaaccgtttacaaccatcatcatctcctttctcctcctcatcaacatcaactaacttttattgtgtgtgtcactgtacaaagcaccctcagctattttagrgagagccagagtctttagacttatttttccatatttattcacacttatcacattttctggtttcacagaagcctagctgctgaaataatttcatttccctctgcctgattgctcaattattttctctttttcctaaattagtttgatttactgtcatatcagcactttgaatggcaagcctcaataatgtaaatcaagcatattcactgcaggatgctattcctagtacctcactgattttctgacacattgtgccttctgtgcaggggagaatggagacggggtttgagagttcagtgctgaccaggatttatgccagggtattttgccaaatatccttgttgaagccagtgctttttcttactctttgatatcttttgtcaccaatttctaggcctttgctatgaccaaccaaattctggtggagaagtcagtgacaggttggaaagaaatagaatatgaagtggttcgagatgctgatgacaattgtgtcactgtctgtaacatggaaaatgttgatgccatgggtgttcacacaggtaggcaaagtatcttcaagaactatagtaatgctttcagttcatgtctttgatggccaaggcagtctttataaagttgttgcctttaaattactatttctagttgacagactagygataacattttggacaagcatagtattttacagtattgaaaatgttctcacatttaatttgatcttcacacaaaccctgtgaagtaaggcggatattacactgagttaattgaggaagagccaaaggtaagcaatatggtagaaataagatccataaaacttagtgttgagaaataagaagggaggttgagacagtttaaagcagactgagctggtaatcacccagtaaatgagaaaataggcacaataatagaaataagtttttcagaaaagtacactagttagataagagggcaaagatgataacttaggatttaaaagtgctaaatttggggtgtgagcagagctgtcaaaaaagggagttgagaatgtggagatggaatttaagaaataaaatagaaataaakaagttgatacaaagacactggaaactgttggcataaaaggggaaattgaagttgtaggcatagacaaagtattcaaggacataggtatagaaagaggagagaatagggttgaactttgaactctgggaaacatttagatttatagggcaggggaaagaggaagtattactgttgaagatagaaggggagaataaagagttaagaggaaaatcaggtagtactgtaccaactaagccaatgcaagaactattttataaaagagctttgtttttggcagtatcaaatgctatgcaagaccaagactgattatttaatttggctcttttggatgtccaagagaacaatttcattgcaaagtcagttctgtgagctctattaaaaggaattacatggtatcaagtggtaagcagaattggcaaactttcaagaagctcattcatgtaaagaatgagagagaagctttgtayggttgtctggcaatgttgggagaagacttccggaggcagtgaagatctgagcgtgtttgaaggcagaagggatggagactaagattgcagatataaggggctatgatgagrgaagtgaagatggaaagggatgagatacagaaagccagctgatgagccagtctgagtgataatattcaatgaaaggaagaacttcagaaataatttgagatgaagagcagggaagttgaagtcaatctagtaagtagacgattgaagccttgatagctacttactagatagatgaacttgggaaaggttagagaggtttctaaaagtactgtatcagagtaatatgggcaaaacaggaattgggggaatacctgatatcacatatatatcccaacaaaccctcagactgttctatgtcttgcatcgtgcaagtagatggttaagtcgctgaagttggttatttcaatatgccaccaagtaatgagtgcttcttggatatataggtgactcagttgttgtggctcctgcccagacactctccaatgccgagtttcagatgttgagacgtacttcaatcaatgttgttcgccacttgggcattgtgggtgaatgcaacattcagtttgcccttcatcctacctcaatggaatactgcatcattgaagtgaatgccagactgtcccgaagctctgctctggcctcaaaagccactgggtaagaccagaataattgaccatgggtttgcagattcttttcagatagaaatgaaaaattgacagatagtggaagactgtactgcatttacaaactatgttccctttttctgtatgttagctccaaatcatttatagcaccctgaggacatgattattaatgagcttgttgccagattgaggtaaattatattgctagctggctttgtttgcaggctaatctaaacgaatcaaaatctaggtggctaaagcaggctgtgaaaaatctgcttcctaattgcactttgcagatgttgttaaaagtgcagattaatccttaattttagtcttcagctgttttcttcaggtgtatagccctatagcaaatagttgacagaaaatatagctcacttgactcaagcatgcaatacacattacttttattttatcaaaactccacaagactgaacagtgcggaattttttcacaagtaactgttacaaccaaacaaatacatctgctgtctatgtaacagccactagcaggcatgattggagggaaaggtaatcaaaacctttggtttctaataatatatttagcaccttacacttaaattatggcatttaaatgaacacaatatttacttctttatattttttttacgtagttccacagcactgcgtggagtggtgaaaggcatgttgccctgtacaggagtcacaattctgcattctcacttggttcttctgttgaccgtgtgattttgagcacatcactcattgtctttatcagtttcctcatttgttaggtggaagttgtactaaagaactcatttttaattctatagttctatgaattattttctcaaacagaataacccaaactgacattctggatgaagatagtcaagttctcaaagtgttagttttgtaaggagcccaaagttcaaagataatttggagacagagcaaggacccaaacttgaaatgcctacattttctgaccattatgtactctcttgtactagctaactccactgtattcttaggtacagatatgtatatgtacagatatgtatatattttctcaaaaaatattttgcagattctcatcttagtggaggttaaatacaaataaaggttaaactttatttatcaataaagctatcgattttgggttgaagaggtgaaggttgagcgttgtagcaatgcatgtagtgcacagagagtaaattctcctgtgacctgtgcctctatactttgtatcatgactcctattattcckcaagtggctactaaatattgatgcagaacagagaatcaagtgtcttataccctgaagtagaataataccagaaattttaagaaagaccaatttatgttttggtctgttttcaataattgctcgaagaaaaaaaaataaatttktcttctttttatagctacccattggcattcattgctgcaaagattgccctaggaatcccacttccagaaattaagaacgtcgtatcygggaagacatcagcctgttttgaacctagcctggattacatggtcaccaagattccccgctgggatcttgaccgttttcatggaacatctagccgaattggtagctctatgaaaagtgtaggagaggtgagtccttggtttatkaygcttttcttcttgttctcagttattttgttaaatttgtgacaccattgacagtgttaaagttgcctggataccatcaacacatggacagtgttaaaggtgcaattgacagtgttaaagttgcctgaatattagcatactaatatgctaacagtctctatgtgattgtttacatattacatatgttacatggccattttgctggatttgaaggtcttcctattcaaaaggtgaggccatatatctggctatatagtatagatacacatatgaaaacacattcatatacatataactgagttgtaatatattttataaccaaatcaagaaagtaatatagaatataatatatcaaaaagaccactgaactgagcttaagaattcaactttagtccattcatgcaaattgtggctctaacttcctgagacctcattccccacatctataaaagaagaggctggactagttcatctctcaggatccttccagctctaaaattctaaattgatatgagcatagtagattattaagccctctttaattatactaaaaagttctaagcttttaacatctttagaagattttttagaatgtgctgttatactatttgaaattaaagttagcctttgattattgcatcttcaaagatgcagtgttcttctgtgtgagaggaaagaaaggaattcatatctctgctgagattcactcccttgcctccttccaccaagtcctaatcattttctgcatccagaaggtttgggatagtggagaaaacatgaaacttggaaccagctggacttggatattactcttggcattgccacttattagctacagactctcaggcaagactgagtttcaggatccacacctataaaatagaaataataatacctaccttgcaggattcttataataccccctcttaataaatgtaatccatcattattgttattattaaattagtattcataaatgttgcatggggtagatgagtgctgaagtatgaacaaatctcagtctttctctatcatttgtctatctaccatttatcttagtttatctgtatctcatctctatttctgttgtggccagtgtgggagcttttagtctatgtatctaagttgattagagtacagagcaaaaggctgtttatgacatatttttccatattgttctttatttgtcccataacacagattatagcctaaacccaggccagccatttcagaaatgcatgtcactaatcacagaaaatatagattaaatctgtcaccaatacagggaaaaagaaaaagaaatgctttactggtctatcatattcacacatgaaaggcagaattatttctattttggcttccttaatttgtaagatactaatgaaagattttaaagtagtaacaaatcaacaaattggccttttaaattaaaatgtcttactagttgtaaaacactaaatattagttttttctccattatagttgttttaaatcttatttttcaaatcatactttttagtgtacaaaagaaatagaacgcaaataccatgaaaatctatgttgctagtgtttgcaccaaataaacaactgttatttagtttacatttcatgggaagggtcctttttaaataatgttcaccataaaattggtagttcaaggaacttgagaaaattatgtaatattttcatttggggcttcttatctgagggattttgttgtcaaacaaaaaataaaaggtaggggggagttttgttgtctaacaccttacatttagttcaaaaagtgagcaaacatttcctgagttcttactaaacgcaagacactgggaggatttaaaaaaggaatagattatagataattgagatacattgtctgcagttggtaaattcagaatacctaaactgacccgaatagacaatgaattattaatctctggtaaatattaaaagatagtacttatatatagatgctatgagaatatagtagaatagggttgaggaagcccattatagtcattccactggaaaatgtgaaatagtcactcaaggaaggtgcattttaatagtatagggcaaatgtggtgggaggacgacttgagcccagggggtccagtctgtagtgagccctatagtgccgctacactccagcctgggtaacagagtgagaacctgtttcaaaaagcaaaaatatatagagagagtattgaaaagcacaatttttgagcaaacatttatagatacatattcctttgttatacacgttttttttttaattgaatggatcccatgtaccattatatagattgtgcttaagaataataaaaatatatggagagttacttatagaactaatttcagataaattttaaatatgtaatacttcaaattttcttaaatatacccaaaatatttccttaattttacagaacaataaaatgtctgatttctggcagtcttttccatgcccaggctagacaatctataaacatattgtctaactcttcaagataccactatgacttgcaaattgcatatctgaattgcattaacaggttgtttattcctgctcttgtaaattttcccttatttctaattaaatttggaacagtgtgaaaaggttatctgtttggctttagtgatcattgaatatgtatcttgtcacataattgacatgaagatttcctaaactgacattagtggtaatttgagtctatttgaggaatcacaaaagtttactgaaaatagcattatgactgctattattttaaattggagaccaaaaatgcatagcaatctattattctatgaaaagattcaaacaatgtttatccagcgaaaataactgggtaggttgcaagatcaatttaagtttagttctgacatgcaacttgtccaaactaaatcaccacataatttttctaattgattagtgtatgatgagctgtaaagattgtggaaagacacattgaattgtcacagaaagtttagtctcctcctacgttcaaaatcataatcatcagtatttgttatgactctcaaggttctattaatattaatgcttagctgtaaggaaagccaacctgtcttgaatactgactgatactcatttacaaatagtttctgtttcagtgttaatatatttctggtttctttttatttgccttccattctaaagaacatgcgcataaagcaagatcttactaagaaaaggtctctatgcttcaaccttgaatttcttattttaatactatggtccagagcaggtacaggtgatttcctcatcaatctcagcaaatacagctgaactccctgagtggtaaaagactgacctaatgaagatgcattataccaaaaccatggagaaagtgagagaggaagaaaaaaaggaacacctttttttttttttaatttgagaggctttatgatatattttttgttcttatttgktttataaaatatattttacgtccagttcagttacaaattaaagatacataagctctttctttcaatatgaggtcttaaacatgtattacaggtmatggctattggtcgtacctttgaggagagtttccagaaagctttacggatgtgccacccatctatagaaggtttcactccccgtctcccaatgaacaaagaatggccatctaatttagatcttagaaaagagttgtctgaaccaagcagcacgcgtatctatgccattgccaaggtaagatgttacaaggggcccacagctactagttgcttttccagaatgtagtcagtctggacattaaaataaaactgaatcacaaagtggttttaaatcagggatttttggaaaatttttaattcttttatagtattaaactggaaacatctatagatttcattagagtcttttacaattaatgataaattatcatttttrtttgactttaagcctggatttaagggcaaattgcagttttaaaggatgattaaatagataaaatgtccccctttttaagtatacttagtactaatactcaagtagatttgactatattgacttgtcctttactattaactttattacatgttccttgaatgtgtaaaattgtattgtagaaaggaaggtgcatacaataatgtcccttagtatgtgccacttgagtctagaataatcttaatttatttgcttctctttctgtgtttaaaaaacagcaacagactataaaggcccacatgattatagggttttccatgtaattattttattggtcttactttcaggaaaaaaggccctacatttctcacttccctccactacttgcttctcatgcaaattaaatgccatgttaatctacttttatatttactgtgcttagagttttgaagtttcagctcatctgattttataaaaggtgacttgggcagctggaatctgtctggtcagaaatccctgaaaggctttttgacatttaaggaagcacaagcgttaatcctccaacagtatcaaaccgcactggttctacaaagctctactgaccattttatgtttgtgtgtgtgtatgtgtgtgcatgtgggatgagtcggtgaaaacatgaactttctctttaaaaggattcccgtctttgtaatttgcctgtgtagaaacagaaaaatgttgttagtgattttgaactcatcgcaacttttatgtccatattttgagtccttaagagacctgaaggagaggaagggatatttccttaattgcatccaatgtatattctcctcgctcttatggtttctaaatggaaaatatttaagccctactgaaattctgggagttgctattatctcttgatggacattttcccatgttgagtttcaaggtaattagaatttttctctggcggtggcgggtgggatagcagtgataagaagttattttagaaagccatttcaccttcatcatttattatccctatttcagtcttttatttaagaagcagctcatgacattcatatgtgtgtgtgtgtgtgtatatatatatataaaatttttttctcaggcaaaggacagtaaatagattttttccttaagtctagcaatcatgtttctgccactttgaaggagatgaaaaaggcaagcatttccaagttcccagctaarctgtaaaactcaagcaaatctctcattcttttctaacagacttataaaagatgagaatctgggaaaaatgtgtggaggttctttctttcacagggtaccctatgtatgagcaagaagtgcaggggctgcgtgtaaattattgcctgctcgagtgctgggagaaggaactgatttctgtttgttagaggtcatcattactgttcatttcaacagcagccgggaacttggtgattttgacagagagtgtaaggacggtggagggctgaaggggaaaaagaatgaagggagtgtgtaaatctttgcttgctttcatgagtcttagaaagagcaacttgctctgaggtctgatttttacagcagtcttatttcaggatgactggatcatcacctcttttgatttggggagaatgcggggcattatttttgatttttggaacattaaagtaacctcaaacttgtttgggggtcattatagacttcattacagtgatgttacatagcaaagctgcagtgcttggagatgaggtcttaagactggcaggatcttgcttgctgttgagaaatcatggatttttttttttatccagtctatcattgatgggcgtttgggttggttccaagtctttggtattaygaatagtgctgcaataaacatacgtgtgcatgtgtctctatagtagaatgatttataatcctttgggtatatacccagtaatgggattgctgggtcaaatggtatttctggatctagatccttgaggaaatgccacactgtctttcacagtggttgaactaatttacactcccaccagctgtgtaaaagtattcctatttctcagcatcctctccaggatctgttgtttcctgaatttttaatgacagccattctaactagcatgagatggtatctcattgtggttttgatttgcatttctctaatgaccagtgatgatgagcttttaaatgtggcacatatacaccatggaatactatgcagccataaaaaaggatgaattcatgtcctttgcagggacatggatgaagctggaaaccatcattctcagcaaactaacacaggaacagaaaaccaagtaccacatgttctcactcataagtgggagtggaacaatgagaacatatgagcacagggaggggaacatttcacaccggggcctgtcggrgggtggggaggtaggggatgcatagcactaggagaaatacctaatgtagatgacaggttgatgggtgcagcaaaccatcatggcccgtgtatacctatgtaacaaacctgcacgtcctgcacatgtatcccagaacttaaagtatatatatatatataaaagaaagaaatcatggatttgactgtagtcctttccttccttccagtgaaatgactacaggattctaggccctccctcactgtatgtgcttgtgtgaaaacctcctttgatctcttaaaagtttcagtaacttaaggttctctccacctcacagtgtagatggccgacagctaattgtgcctttaatcacttagaaagtaagacagaatattaagtctttgggaacctgactgtaattacagggagaattaaacaaaagaaacatacattgactaggaaatgaacatggctttgagtatttctgttaaatgtcatcttactctagtcaacaaaattatgagccatgccatatctcaacaattataatcatggtctctctgatactatcattatgtaaaagctttaagaaaagtaagctccctgggctgaaatataccagcagagttactagttgcatatatttcttaatgggtcttaaaaacgcagtgtgttattctaaaatatgttgttctggaatattttcagatttttcacagggtatatacacgtacacatacacacatacaagaataagagtagacatctttttgtataaagattttggttttgagagtttatctcttttttcagttaaattttctactcagcttaatgacccatagttgtagttttacttttgagaaattgataaagtaagcttgaggaagaggctgagctgcctatcagaacagaagttattactacattgttttggaatatattaggattttaaaaaatgcctgccttagcacaaaaatcatagtgactgattcaaaacaattttttatttgaagtcctctgtgaggaaatattctggaggaataaagccaagccagatccgacccataaattctcactgactattgtatgtttgtgtgaatgtggagtgaggtgataaaaatatgctatctcctacaagataactatcaacactacaagttaagagatcattatattaattctagattttcttaccaatttggcttaactgtagtttcaagagactttctttaattccaaagagatgtaccaaatttagggtataatgggtaacacaatcaaataaagaggagcgagtcaaaacctgttaggagatttttctgagaacacaccactcaaggcaagcacctactctgtatgccatttgtggatatagttggcaccatctttatgtttattggaaggaatgtcagtgatgtcagtttcatgttttgtaactcagtctrcagtctcgggctctctaaataacacacagaggcatgactgctatgtattttaaaccaaataagacatttagaaaaatgtttgccaaagaaagtatctcttctcctcttggcaggccattgatgacaacatgtcccttgatgagattgagaagctcacatacattgacaagtggtttttgtataagatgcgtgatattttaaacatggaaaagacactgaaaggsctcaacaggtaaggcagtgctgctctcattcatgccagacaccttcagtgcaatttttaaagagtcttcttcctactcttaagcatttggtctacattgtgattcaatgaggtagatagtgccattgttggaaaatagtacccgtagccagaagacaaatggcaggtttttttttttttagatgtttacctttagaaatgtatccattaatctttttaatcatcttctattcccacccttgtcatcagacatagtaataaggtcttttgaatgcacaaaattggtatacattgatgaacgtgtattatttaattatgaagtattatctagatttaaattttattaatcaattaaatgaatatttgttttctataaattttcctctacattctgaagtctgttttccccttttaatatcaatctatacattgctgtatattgaggagaaaatgcattccttttgcgctctactgtttttaaattgggacattcagttcagcatacaattaagccacattcaggtttctcttaacagactcttcacctctgactaatttacatttttatctccatcatggccaattatttttaaacttcattttatgttgagaatattttgataatgtagtccttaaaatctacttttaaatttttcatgggaaactgctggggcaccttaggctgatgaaagcatggatcagttttaaacatctatcttcaataagaggagcatttattagcagattaagaaagacaatatagtcctcttgaacttcttccctctgaaagcactctgaaatacactactattggaaagacgtcttacctgcaaactagggatgtgtttagagaaggaaaaattttgtttgtataaaaattgttctcaaatgatttgacaaaatgtagatactttaatcacttaaaatatctttgaggacagtggaaaatctcaaaacctggattgctcaactatttagcaattgcaacatatacttgggttactgtatttgcctgatcaatatgtgtacaaactaggtamtaaaacacttgcttttctttttgagaaaaattaggttctttttcatctatttaattattgcccatgtcaaatgcttggttttgaaaactgaggaattctatctsacaaagatgaaaccagctatagttgcttgtaaatcatcctttctagtgatcacataaaatgaacagtagacagcaaataatttaggaattgaacctatacatttatcttataattttgctgacttaagtttccctttcttggtttatgatgccagcagaacttctgtgtaaaattatagtctgttctactgttctcagtttcaggcaactgatttcaaatgcctatgaaaccactccaattaagccacatgggggtgctagaaacttatagtatgccagtcacagcagtggaaaagacctggggtggaaaatagcagatgttattgtgatttaaatttccacttgacatacgttctgatttttggacaaattcaatgttttaattgaatagttttcgttacaaccagaaggcaggttgagattctaactaagcataaataagggtatattgatagtgaaaaaggtccttggaggattaaaacaacacactgttacagatcatttataatatttttctgacttccacattctgttgcatttatttgccgacaatttgacattttcaatctccattttctggcataaatatatttgtaaatagggatattttctattgttcataatgatctacatttaaaactctttatgtaaagctttatatcatttcaaaaatttcaaaaacttacacttaaaatcatctctactgtataaatttgtttttgatccagggaggttgaagtgtctattatatagcaaaagctaaagtaaacctgaagtggaactcacagatgatccacggcgttagcaaacctaaaccctgaactcattatctgagtgtcactttatggtttaattcctttctttttgaagtgtcattgatgcacgcatagcaatttgataatgattgttatttagcggtattagataaataacaagaatagatggccactaaagctacctgtctccatcattttgtggcacataggggtctgaagttgaaagaatacgacagctgatggaatgaatgttaagtatgtaaggccttgagtttccttgccctattttaattatactcaccattagtctgggtctgagtcctctgctttttctcggcccctcaatatccagggaggcttagtcatcaaggtacgtactgctccaacagtaacaagagctccctattaatgacctatagctgacttacatattgcgagtttggagagaggctgagaagattagttgttctttttcatttgtatttatttatggtttactttgaagatctcaactgcttctgtgttagaatggctgtctttagctgtaggcctaggagctagcgatttatttggtgtgcgttcagagaactccaaaattctcctgcctcaacatctatctctgctgccaatgtaccgcactccctttgtacttttcatagagatccttgagaagacaggcagtggggctctcacttgggaaaagagaagtaaattaagagaaaaaatatagaatgctagacrtgggttttctggttccacccttgtgcattggaaggagcagactatggagccagagattggtgcgcagtcctccccactgtagaatcagacgtacatcacctctttcatttctccagattcatgttctttctcttaatctctgcttctagtttttttgtgaagcttaatttatrtaagtataaatgacatctgacatattgtgagggcccaagaaaatttttcctcttttcccctgaaaataaaaatgctacttgttgtaataaaggttactttatgattttagatatgtattatatattatgattttagatatgtagatatgatagttaaatatttaaagattcattttcagactcacaatttttatttgcttttatattttgcaatgtatcatttcttaatttcctttatgatgcatcacttattttaatatcagacctattttttaaaggaagcaattgatagctacgatgcaaatgctattcttattaaaagataaatagctttcccttatgctaatgaataaaaattcctactctacagttgttaatcaatctcgagttctaaagtccgataaacacatttaatagcagaggatgagcatatcattaaattgatggtcagtctctgacttgtgtttacatatagtcatctgaaatgaagttcagaatttgagtcccaaatagactatacccacgcatggacacagggaggggaacatcacacaccggggcctgttggggggtggggggctaagggagggatagcattaggaaaaatacctaatgtagatgacgggttgatgggtgcaacaaatcaccatggcacgtgtatacctatgtaacaagcctgcatgttctgtacatgtatcccagaacttaaagtataatataaaaaaagaaatataaaaacaagaacatagtttatgtttgaaatgtaaacaataaatgtgcttatttatgcaatagcttcaaacaatatattttaagataaaatacaatggaaattattaaaaaagatatactcacatatttagtatatataaatattcacagactgagatggggaaaacaaaacaatgattgtaactaggtagatattatggaaataactgatgagttttccatgcctgtgagatagtagaaattataatcagaaacccttctctttgaaggggagagataaacatgtttcatgttcatgattacgtatgaagtctcatctttctgcagggtgatgagacaagagggataggtgtattaggccattyttgcattgctatgaagaaatatctgagactgggtagtttatgaagaggtttaattggctcacagttctgtaaacttcacaggaagtgtggtgctagcatctgcttggcttctagggaggcctcagaaatcttacaatcatggcggaaggcaaaaggaaagcagccgtgtcctatggaaaaagcaggagccagccagagagagggagtcggtgggggaggtgccacatactttcagacaaccagattatgcaagaattcactcactattgccaggagagcaccagggggatggtgctacatcattcatgagaaatctgctcccattatccagtcacctcccaccagtccccatctccaacactggggattaaatatcaatctgagatttgggcagggacaaacataaaaactatatcaacaggtatcagaataatcaactcagcatcctagctttgagtgcttgccccctcagaactcagtatgctgtctctaatacctgaatatagtagcaatggcaaccctcacaagacttctgaagcaatatctattcttaccagcttaggtaataaccattatttagacagcttcagccaaaaaaagatctctttcctgtttacgctcactgactttctccttttccacttaaactgcttattgctacccaagggcatggtagggaagctgactgttctaggcagttccccaaatttataggctggtgtagtagcattaactgacctagggtgataacatatttacagtggatttctttaggatttgagaagtttctttttactcagtacgatataagttgtgtcatgtaggattcgaatacttgttatgtgtatgctttggaatttagatgtttaatggtcaccaaaggtcttttaacttcacattgtcagatcaccctgcaaggagtttgaggaaaatgaagtctatataaatttttagtggaaccacaacatgtgcataatctctgtccattagctttcactgctaagctattgatattttagtctatttttcccatactcactctcccaatgccgacgctttcacatattgtgctcttcccatgtagtattttaataaataccaaaagaaaaatatccttactccgatctgtaagaaattataaaaatctcacctatagttcttttttccattagtgcatagaktcaattttggtcatgtaaagatctcctgcctggagagaggaaatgcaggtaccataaatcaaataaagatgtcaaatgtcttcaccaactaggttcttctgatatagcctattccttattgtaaccaaataatgaatttataactcttaatactgaaacttgaattttgattcagtttaataattctgaatgccttccaagggtaagataataatcacaaaaatttttggactacatattaagcactgttctaagcacattattttgtttaattcctaacacaacattaagaaatcagtgattgtcctaattttattgatagtaaactgaggcactgagagattcagcagtttcctctacatcacatactaataaataacagaattgggatcaagtctaagcaggactccagaacccaggatacttgctatttaaccccttatatttgatatataattatattcttatatactttttactttagtaaaaagtaaacattgtttttatgtacaatgttgctatttatgtgagcaatattgtggatgaagcttagaaagaatacttacatgtaagtatatacctacatacttaaatatcaaatataatatatttatatttgtgtataccatagatgactgcttaaaaataatacatatatgtgtatgcttatatacttacatatcaagtatatggtatgtaagtgtgcatgtaaatatattaaatatatgtaaacataagcatatatatacacacacagaaacaggtttgcttggggtatagaaacagatttgtttagaggtgtagataacatctagaggaaataagaagtaagactacctaaaatagacagcttcagtttagaaacagtagccaataaaggggtgatagtcctatcatggtagaatcagcatatataatgaaggtttctactatattattaataaacaagcacaggtacaaatatccttcagctggactccccttgctataagtatgtaaggaattcaactataatagaacttgtgrgaaagaactatttcaggactttacacccccaagcattattatttataataccaatttggattggcaattttatattgaaagacaatcatgatacttaaaaaaaaaaaaagacacatgaacaggcaagaaaaaaaaagtgagagtacaattaccagctttaagcatctgcttatccctctggctgtaactgtttttaatttttttatttccttattttgtttttttggtttctttagctatttctgactgacatatccagcttggagattttattatacctgcctaaattgtataatttcgctcttttactggctaaaactaagctgaattaagttttgaatccttgcttcaagtgattatcttaaagaagatggccagcctctgcttttgctataccatgttaaatcatcaaagtgaaggttttctaccatttatgatgattgcttgttcttgtgcattccattcattttgggcaattttccttcaatggtccattttgctctcttgtttttatgtacaatgccgctatttatgttagcaatgttgtagatgactacttaaaaagaatctattttcattcattttacacgttcaaaagtaggagatataaccattgtgatacaatttataccatacgagtattggaagctaaaatttgtatttgtttccctattgttgacataaactttactatggatttatttacaaattatccagatattgcttttgtctaatattctgtaggtttcatgtggtttttttttgctatcttcactctaataactttaatattctctttcctctttactgcttatagtcaatatagttttaaaaaaaagagtaaagtgcacttttcaagggtccaatttccatccgaaatcactatgttcaatgtgataaactatgtccattggtgagtggtgaaaaatcataggcgtgcctattgcttaggaaaacaatctaggacaaccctggtgagttccacttgggcattcaagtgctaaattgagctcagtaaagttggccatttccctgcagccacaaacttctggcagatgtaataatgcaggtgtcacgttagctggaacactccctttgaatgtcctctcctacacatgctaacttctattgactttttatttaacttgctcatgaggcatggcaaaaatcaggcaagaacgttttgtgcttatgcttgattgaagtttctgggggaaaagtgtcacctaagagttgttggaacttagatataagaaacagaagggtcagtactttactttctgatgamaatgtatattttctggtagaaaaaaatcaacaactttcatcttaaactactaaatatacaagtaatttaaagaaagataatataacatataatcacattataatttttgtgatactttactatgacatgtttttgtgatagcatctattattttggatatagaaatgagaatggagatgattgaacactttagtggaacccattaatttgatttgcagaaaatggtcttatgtcttctcatattactactaactcacacgatattctaagcctcagtttcaccctagtaaaaacaaaacaaaaagaaacaacacaaactcccttcttattttactggtcagtcatgcagctagctgaatatatactatatgtgaagtaacaaactttaaagaaaaacagtcttaccagttattacatatkaccattctatgctttcagtcttcatactccaagccatttatataatgaacctcttcaggtgtactaaaaaatggggcttatatatacaagtacttatttctttgtaagagaagagtaataccatgggaaattttataactctgtgaactaatgccaaaaatacattttatttttaatttgcttttatgttccatgtaataaaaggatattttaggtgatgtcataggtttgataggactccactaatttttaaagtaataatttattgagatagatataaaattttacatcaaatatttaatgttctgagagtcttcatttgttatttaaatagtgttttcatagttttggcaaatgattgtgcatttttgaatttgtgagagagtacttccgagtctggcatggacaagatgaatgttttgcttaaaaggttttcagagtaatattcagatgactcataaagtgcctattatgtttctgtatattaattattgtatgtttgctagttcataagaatatacaacttaaaaattttaagttgatttaaaataacacatactcagaatatgtgtatatatatctataaatagtcaataattaatacattattcctgtgttaatgtctctgaactaagcgtgatgggatatatatttacttgatggcatttctttttattaggagctggtattagaccaaatggtatttgttctcctattcagtcattatgtattgggtacctactatgtgtaaggttttgtgctagttccaaagccatttgttgatgaataatcactagttattagaccaaatggtatttgttcttctattcagtcattatttattgggtatctactatgtgtaaggctttgtgctagttccaaagccatttgttgatgaataatcaccagtcattgaatctataatataggtttataacctatacaaagagctatatatagacaggacacattaatggacatgtgagaagcagaaatatgaattcatgaaagtttagtggaggttagaaacaaaagctcttagctaactttacacatgttatctcatacaagtctcgatgtacagtttttaggaggtatgtgtctctatcccatattttatgaaagaaatgatgactcagaatgtttaagtaaattctccttactccatattggagccaggttttgagttcagaaatctctcagtccaaggacaatattctttccttcaatatatcccactgtcatgggagccaaaggaagaaggaagagagaatttaaaataaatgaaatagaaagacactttcaagaggattgcatggtttagagagagaagagagaaacagaattaagtcctcatttgatgttgggtaggtaggagtggaagctaggctataaggtccaaacacatagtgagaaacaggtaggtaaaggtatgaattctactcaggaactgacaaattgtgtttgctctttatcctatttatgctatttttcataacagtgaaaatctgactatgaagaaattaagatagtataagaagaaaaactaaagtggatattagctacctgtttgttcattgggtgaaatagttgacgccacacagtcttacttcattgttccgtaaatattgcatatatcctaatatcatcccccaattaaattgtgattttcattagggaaagtatccaataccataatgtcttaatatgtttttattataggtctttcttagcaaaaaattgtgttaatttgtatgaatgcagaatagagttcactgtggcataaggtrtaagtcataatttctgaaacagatacaaatggtttccaattctttatttaccatatattttcttgggaattgatatatggtgctttgtataaacactcaacaatatttgtatgataatataacaaakaaactttcttggtagaaagtgaaaatcatcatttcttagtgatggcaaaggagggggaattgtagtggagcaaaatgcatatgattcctggttgttcaaagggattgaattcacaaaattcacaaaattattaattagaaaatacatagcccaagatataaactgactgtgttgggaaatattgtaaaccaacatctctaggttttaatttcttaaagtagttatgtatctactaattagctaggaaggctctgaataaactgttttttaataaaaagagatttatctaattgttttatattgtcaaagattatatacatgtaggcagtataggtatatcgtgaaatctctaactcctggtgagaactaaccagtgtttgtgtattcttgatcttcaaaaattattcacgttttcaaatttttgcattttctgagaagtttttgtgagaaatattcacagacattttcaactatatgaagggatatgattttattaaccagtgaagaaggttaaggcaaaaataaatacttatttaaaatacaggcatctactgtatatctccggtgaccttaaagtacatttctattataataaaggtgaaaaatatcactatcctatttttatggatggtgaaactgaatcacacgaggtgtgtgtcatactttatgtcacaccaatcagaggaaaacaaggaatctagcccagggctcccactttcagttttagtcactaacccttttcaaaagcttcttttgcgagatatgacttttaaatcagacagctggagatcagttcctgcttagcggtcaagttgtgagccacctgcattgttgaccccacttagagaggagacattgtgaggaatttgcccttttccaaaactcttgggggaaaacacaggaagtctggcagggagaaagccccagcaagtcacctttgaaaaatgtaaacaggattttcaagggtacaaagacccaggataataattttctttttaagttttgctttatttataataaaagatttgtatatatttatacacaatatatgtctataggtatcttttctttaaagtacaaataccttgccttccatgtttagggaggtgtgagtaaaacaactcttgagcgtagaatggaattaaatttacgcaaaataggctgccagagctataattacagaagctagataattagttgctgaccccagaatttcttcagctgctaatttatacttgagatgcctttatggggcataaagcctttgagtctgaccttaggatagagtcatgcacttcgtatccaaagactataaggcagcgaccatgcctcctaacagtggagtaaatacccgagagcactctctctctagaagatcaattttgacttgcagggagtcgtaagtatggtggccctcaccacctcaaagtgtgagtacagaaatactacacaggagaggaaagaaaacaaagggagctgaggtgctgggccaaatgtaggtgacttgctagttttgctcttctaaacttctcctcctgcttcttctcttctttctcttcctctttctcctccctgttggtctggttctttcccttcctccttttcctccagcaattgtatctattaagcacttattaccttcttggtgttgtgctgaacacttgccacatttattattttatctggctgatgagtctttttctcaggatggtggagcatgactacaggttttgggcaaaggtatttgcctatctaaggttgaagtaggtattttgacaccatttgcctatataactataatgatgataatgtaatggccatcacagcaatatccacctggcagtattaaattgcagttacttcttctacccctccccttctacccactcttcagctgataaactgacaagtatacagttgtagtgtcaagtggatggtaatttttgctttcatggattttaatgtgcattttctatgtcttcttatgaaaaaccccagataataaagatatctgctttccatgtaggtagtaagcctcatatcaacatagactgaatatgacatgtcaccaggaatttaattctagmattttcccacatcctcctaaaaataacttctccttttcctcctttctaaaaatggcttacattttttccttcaagaactagaaaaatgtagtcaaaaattattcttatatatcttacatttttctaggaaaaaaataagcagtagttattagtagataggcttctgttaagtttttaggaggctgagacaggcagatcacaaggtcaggagtttgagaccagcctggccaacatagtgaaatactgtctctactaaaaatacaaaaattagctgggcgtggtggcaggcgcctgcagttccagctacttcggagactgaggcaggagaatcgcctgaactggggaggtggaggttgcagtgagccaagatcacgccactgcacttcagcctgggcaacagagtgagactctatctcaaaaaaaaaaaaagttatttattttaacaaggctctaagtaattctttctagaagtcaaagaaagatatattgaaatatatttatatatttgttgcttggtacaacctaagtgatgtttggaaaactgctctgtggaaacatgatgatttaaacaaagatgatggagatgttttaaaatataggagtttcaaataaatttatttgcaataacaaattgtaaaacatcaaagagtgcccattcaatccctattttctatgaggccttataaagtgtttcttcttatctgttagatttaaattctgtacacataaaaatcttatattcaggggaaaatccagagttttgcttactgaatacatcttctttattttggggaaggcatacattgaatagatttaaaattataaataaatgtattcatcagaaataacagaagcaacatttcatagtatggacttaacccgttaatccaattggctcaagcraaagctatttgattggtatcagcatcctttttttttctttttttttgagacggagtctcgctctgtcgcccaggctggagtgcagtggcgcgatctcggctcactgcaaggtccgcctcccgggttcacgccattctcctgcctcagcctcccgagtagctcggactacaggcgcctgccaccacgcccagctaatttttttgtatttttagtagagacggggtttcaccgtgttagccaggacggtcttgatctcctgacctcgtgatccgcccgcctcggcctctcaaagtgctgggattacaggcgtgagccaccgcgcccagccagaacactttcttatatacgaattgacataacttactactttggttaggcagtttccatttgtttttcatcttggtaaagacgaatggtaaaattcaaatttggtaaaatcaagggcagagagagagtcattgcatcttaaattaagaaccatgggccgggctcggtggctcacgcctgtgatcccagcactttgggaggctgaggcgggcagatcatgaggtcaggagatcgagaccatcctggctaacacggtgaaaccccgactctaataaaaatacaaaaaaaaaawtaaattaaaaaaataaaattagccgggcgtggtggcaggcgcctgtagtcccagctactcgagaggctgaggcaggagaatggtgtgaacctgggaggcggagtttgcagtgagccgagatcctgccactgcactccagcctgggagagagagcgagactatgtctcaaaaaacaaaaaaacaaaacaaaamaaaaaaacaaaaccatgaaaaaacaaaatgtggtttattatggctcaaaaattgcaattaacctacattaagcgtttttcttcatcattattccttgtattcatagagcataattatgacattatattcaatactaaatgagtggctttaccagattaagagtaatatcatgatatttctggattattagggtcattaaagattagcaaaaaagaacaggaaattcagaaaattaaaacttgcctatttaaagatatctacattatcagtttctcataaggtttccttcttaatgttgattttactgttattattactagcctttaaggtgaaatatagttttaagtatgccattttttgaaaactattacttgtaacattttagcattattgtgatagaatctgggtccacttagcactattagataattttcttgatgccatactgtcacgtgaacattggatctaggtattatttgctctgtacaagaaatataaagattcaagtcttcttaaattccttcaaagacctcattcctgtatagaaacagccatggtactcaaaaattaagacaaaatagtagtgcctacccaattgcctgggtttttatactttgcttttctaaatgccacttctatttttgaaaattgtcttttgcatttctcgtaaggaaacacatagcaacttgtctccttgaatgaagagaggtgacaaataatttctccactgatggcattattgtgattgtggcatggtcttgaaccygtgaaacgccaaaaataataagtgaagcagtaaaaaactcaagagagaggctagtgagggttcatgagtcagagaacatatatcttactcaattctcttattaaagcagatgtcattactgaacgtcaggcttagtttttttctgccttttggagtgkttttttttttttttaaagaggataataataaaattgcaaacccattccataattgtaggccaggtggagtgctcattttcacattagagcttgtgcaatctggagggaaatttggtttagtattactcgtgagttggtggatcagatgaaagccagtcaagtggaagagaggactgtgtgaagtgcgctggctcccctgataattagaatgctgcaggcgttcctccagtcagctaatagatttccccagctcctctgtgccaggtgaaaatttcctcattaaggggaatttattccatttccttttatcatttattattgaagactaagtgtgagtggaggaaatttcagagatgacagggaggaattttaaacaacaacaacaatatctacattggaagtcttagagaatgaggagaaaggcttgtattgtttgtaaaccagagaacacaccagagactttttgctatagaagccgagccatgctgtctcaccattaaaagattatggcagagtgtgtaaaagtctgatggtctggttttaagacatttttttcaccttctaaaatttcagtcattttgtgctgctaagtagaaagaaactgaagattatgaaaaggccagcatcacagccatttggtgtgttgttttattgtatagattctattatgcaatgatgaaagtctaaccttttgtaaagtttgcccttgaactctcaaagcaaggcaaactggcacgggaaagaatagttgtatatataatagcatattttagaggacacagttctgaaatatggatttaatgtgtatatgttcaaaagagtaaaaattaacataaaatactagtacatacaaatatatatcaaagaacagaaggataatttattatgcatattttaaaattgtgtgcttttgtgcaatatgctttcttcagctgatcacatttctagctgggcataaagctgtcttgatttacaacataatataaatggagtattccctattgaggtttcaaaaagcagtgttgaattataaattcagtatttatatttcttttagtaattattctgttttgagtttgtttcaaattaaggtttttattttccttcagaaaaataaaaatgttatagccttgttttgaaaataagcttttacctagtttgatcaaaaaaacaaaaacaaaaacccaccatgatggaaattggttttggcaaacaaaatggagggagcataatgtgggcagataaagatgaggaacatctatctgagtctccacattgttaaatgagctttatgtttgcttaagattatgcatcttgtatttatttgactctgaggagatttaacctgatctaaatcactgccccacaactaatgaattgtgtctttgaactgtctttttttttctttgattataatgggacacacaatacaattttgtatcagaataagctgggactaaagtcaattttctactgtgtataatgacatctcagccagcctggtgttacaccaaagagagaaaacagaggagaggaaaggtgaggacaatacagagaattgacctgcttccattaggagtaccttgtggaattaggcagcactgactgtgggaagggatctaacttgcctgtgcctctctaatggccctggtgggtcagtatcaacaatgatttctcagtgaggaggattgctaagtgttttgcactatttcatgatcatgtctaaagagcagaaataaccagagagaccatgaacaaaatactatagaaattacattactttggacatccaatgatcacacatacccaatatctgtattcaagttaaggtagatgaacatgaatgtactaatataccatttcaatttaatacattctaatttttaagacatttaaaaatattgtattctgttattgatctagttatttgaaaattgggcagaagttgaagcagtttttggctcaccaagaaaatgtcctaagaatcaactagtgagattaaaatatgcaaggtgcaggtctagcttgatacatctgtttcaaaattctcacctagtatgatttaaagggatgcctatgtagaaagttttcactcccattctgaagtatcattcacaatcattattttgtgttactgttgctcttctcagacattttctttaaattatgaaaactctctggtgtgggaaatgctatgggcaggggagcagtaacagttgagttagtcttagtgacagatggcttttttttttcgtcaccagagctgagtacaaaattaactcacttcactttttaatgcacaaggccaattcttatcaatcaacctttttcttttctctcttctttctcgttctcccttctttcttattatttttatttctttgctgataagtgttcagttttattagtaggtagaggcagaagactttgtatatttgctagagatgtctacatacattctgttagactcttgtggtgaaaaagaacaagagaaattatgcatattccagaaatgaaaatactacattcctgaatgaaaatactgcattgctgaatgtagacgacacaaatgcaaatttattgcawccctaatagaaatgtgaggaatctaattttttcttatttaataccattatttataattttcattttaaacaacatagcgacctttgaaaamctgactggtattccatgtaagaaggaatgcaaacaaataattaaagaccctctaaaaattgcaacaacaaacaaatagaaaaacctgactgaaaaagctaaagataactacatgacttctgcttatcttagcatttgaagaacccgcacttatggtgctgccgtgttagcccatggtcacaattatagatgtgatggttcttttcaaggcatgtgttttaagtgtatctggatgactgttcttcagagttaggattttagtcatttaagtaaaagyggttattgttctaatttagaaaaatcgcttatttgtcaagcacttccaccgaaaggctgagtgcatacttgcacataaacaaatgagcaattggtttgggagcatattcttggcaaggaaagtggaaacatacctttctaaaacaaataacaacaataacaaaaaaaaatcttcgccaggcgcggtggctcacgcctgtaatcccagcacttygggaggccgaggcaggcggatcacaaggtcaggagatcaagaccatcctggctaagacggtgaaactccgtctctactaaaaatacaaaaaattagccaggcgtgatggcggacacctgtcgtcccagctactcgggaggctgaggcagcagaatggtgtgagcccgggaggcggagcttgcagtgagccgagatcttgctactgcacttcagcctgggcgacagagcgagactccgtctcaaaagaaaaaaaaatgtttcctctactttcaaaattaatttctctctctctctctttttcttgaaagtaaaagtaaccacaaactttggtgtttccaaggctctctgaagctctaaagtcacctctggggtaaagcctttccagacttctccattggcagctggggtcccctgccctgagccacggcttcaacttgtgcacacttctcccacrgcacctctcatgatgtagacatatcawtggctatttgtgcttcctaacatactctgacctcctaaatgtaagagtacaatatttcatcttccatcattaatacaggcaggacaggtctgatacagagcacgtactcactaaatgttaaagcagtaatgacaatgaatgtggctaccctcaccatccagtttcctcagtatgtttcccatacgtgccatgtccactgctgctctcaaacaatagccaatactgttgccattgcctattgtacacctgtcaactcctttatctacataaagttgaactttgttttttcttttttgaggtggagtctccgttgtctgagctggagtgcagtggcgtgatctcggctcactgcaacccccacctcctgggttcaagtgattctcttgtctcagcctcttgagtagctgggattacaggcacctgccactatgcccagctagctttttgtattttttgtagagacggggtttcaccatgttggccaggctggtctcaaactcctgacctcgtgattcaccctcctcagcctcccgaagtgctggtattacaggtgtgagccaccacacccggccaagttgaactttctttatagctctgttctcatccctccactgctgtagtgtttctcaagtacaacctttcacactattatctttctctggcctcacgtagcaccacatagcttatccctccataaagtgttttgaatcactatcatttcattgtctcaaatattgtttccttatcttctggggcagcactgttcagtagaaatttctgtgatgatgaaatattctgtaatctgcactgtctgacactggagccactgaccatgtgtggctgttgagcacttgaaacctggctttggtgactgtagctctaaatttttggtcttaaaagatttaattagtttttcaatttaaataaccacatgtggctaggggctgctatgttggatggcacagttctaaagcacagggcttggcacacatactaagtcagcaataatacttaatattggattgcattcaagaatttgacaggaaaatgcattgctctgagagaatgcttatcaaatacttgggaaaactaaattcaaaataagaataaaaagagaagaaattaaattcaatgggagatttaacacactgatttgagacagaagagaatttaggtgcaatagaaaaagcaaattgactaggaagagctgtagctgcaaaaatttaaactaatactgacactggaaatccagggaaatagccattatatacaccagcttgattttttcttctccaaactcagaatatgaattaattaaagcagattcatgattagaatgaacaaaatgcaatagatttaatccaattacattttattaacagcatttcatgaaaatgttttcttaaggcaagttagatcttctggcaatacactattttaatttcrttgtattgactatcaaactattataattgaattgtattgtattaacwattacatgaaatagctggcccacaggtatctggttaaagatgcttttacagtagtattttattcttctgtcccttagctctttacaaattatttttgcatgcattttgaaatctagttatgagctaatttcaatcacttctttgtcttttctataaaataaaaacctagggaattgaagtttttatatttatccttcatttatttataatttatattcataaattatatttacatttaatttataaaatatatgcattttatttatatgtttatattacttatatttatccttcatttatttattttcataaatrtttattgaatgctgtctgtgggccagataatgtggtagatttggggagtaatctggtaaataagccaaatgtattctttgcctttatggaacttaaatccagcaggaaaaagcctgattgacgaataaaakttaggagacattaaaagtatcaggtgataatggacatgctaaactgtatgattctatgtccatcgttccaagcaaaagaggcagtaaaaagcacaagaagttcagtgtggatgacagcaaaccaaaaggcttcacaaatgaggcttggctttagttggactttgaagggctgctgagggtcagggagaagttgagaaggtaaaaggaatgttaaaggtattacagatgagagaaacaacacaaataaagtctacgctatggaaaggagtagggggaaaataagacaaatctagtttgagtggaaaacaattataaaatgacaaaactgtcttctcaacatagacagatgggtgatattagtaagtagaggtaatttagggagaggatatccaaactgatgcaatgttgggacacctaggtgaagatgattctcaaagttcatatgcataaagacctggagcacaggtcagatgttggagaaccggccatggatttgggaattgtcaaccagtcatgctacttgcacccatgacagtggctaaatttagagagggagagagggaagacaaaagcaggtaacaaagggtagagccgtgggtaggggtagggggaaacccaaaactagtaaatggtagttttgagtaataaagtagagcgagaagccacttagtagaagccagaatatctttttaaaaaatagatcatcaaaagggtcttgtgatgacaggttgaggaaaatgaaaactgaaaaagggctcctggatttagagagtgaggtctctgattattactaatgagcacatttattagaacagtaaatgcacttgccattttttataaaagcagcagggaagaggtcgcatagagtgtgaaagcaggagatcagagattgtcagctttgcaaatagaagacttcatagaggctagaagattgagtgggttagttatttgtgtatttttaaaagataacaagacttaaatatgtttgaaggtggaaaataaraagcccttggtgttcttgaaattgaacttgtcaccgctttttattgtttttggtctaaacttgaatctctcttttctattaaatcctagtgagtccatgacagaagaaaccctgaaaagggcaaaggagattgggttctcagataagcagatttcaaaatgccttgggctcactgaggcccagacaagggagctgaggttaaagaaaaacatccacccttgggttaaacaggtaaaggagtttcccttttcccccatcccccactgacaggatttctgtggtaaaacgtaggcacccattcaaaaggccattgttaataaaaagaggagtggaattaagaagtgacaatactcatccggttgatgctcataatgtcaccaattttattcagcaagtgattaatttttacttaaaagggaaagaaggaaaggacactaggatgtaaagataagagtgagtacctgattttcttggcctaactgaacaaaacaaaacaaaaatktaaactctcctctgctttttgacctgtgttcaaatatgtaagtagttaagaaatccttagtgtaattgaaggacttgaaatttcctagcatggtggctgaccctcttgaaaataatagttatctcctttggcagtaactttttacagggtaatactttatattaagtgccccatgattatggttcatttagtattcattgtgatagggctgggcataatgagctcatctagtattcatgacaatcacgcatgaacattcataggtgtgctgttgtgattttttttcctttggcctttaatggaagggatgtcttagtttaaagtaccaccagctggtttttgtcctttaaaatcattgacttttcactgtgtgctcaaggggcacgtgcatacccttaggtctcaagctttttgctaaatattttccactcagcgattattatctttcttccttctcacctgccttacaccagcttgccctgtcggccccaaattcttgctcactaagctgagttactggcccttgagagtggaattgatttccaaatatgttcaatgagatcttgttctccccccgttcatcccctatggctttatggtagttgtgtcatcccaccgctcagtgccacaggccacttaaatcctgcgcattaatttgcaagccaaagagatccttacgtataggtcattttgctcagattttagatttcatatacakctgcttttagagagctggtggggtaagtcttcctagtaaccagttgactataggaccactttgcgatgttcatgagagttactattactactagtgatccaatgccctgtttctcaggtgataactagaccacatcactattttctctctcttattttcagaattagaaagcaattccaygggtcatacattttcctgtttgcatactttacagtaataggaattaaaggaatatgtatataaagcacaaaaaatttagtcttgaaaaaattataataacattcttatttgtttattttatttgttttctcttacagattgatacactggctgcagaatacccatcagtaacaaactatctctatgttacctacaatggtcaggtaggaatgggcaaattggcctatccagaaagctctagatttcatagacagttcacattagggaatatatattttttacctctttggatatctaggtaataaaaaaaggcatcatggccgggcgcggtggctcacgcctgtaatcccagcactttgggaggccgaggcgggtggatcatgaggtcaggagatcgagaccatcctggctaacaaggtgaaaccccgtctctactaaaaatacaaaaaattagccgggcgcggtggcgggcgcctgtagtcccagctactcgggaggctgaggcaggagaatggcgtgaacccgggaagcggagcttgcagtgagccgagattgcgccactgcagtccgcagtccggcctgggcgacagagcgagactccgtctcaaaaaaaaaaaaaaaaaaaaaaaaaaaggcatcatgtgtgtcaggtatgatgatatgtttctgtactcagtcttttaagaactgccttaagataatgaaatcaaacaaatgaaaaattaaggacaatgactacatgatcatacaattatgctatgttctcatgactatttaatttaaaaaattctgccatatctattttttataaataagtagggcttgtataacactttatacttatgggtttccagagactaatagagaatacatgttaacaagaggaagatgagaaatacatacttaatgataggacaactagtttaattaaatggaataataacacttaatgatttctgcatcttccttttcttatttcctcaggagcatgatgtcaattttgatgwccatggaatgatggtgctaggctgtggtccatatcacattggtaaaataataaattatgtgtatataggactttacacaatttatatagttttcttcatacatgttaattccattattccaagaactatatcaaataaatgctgtaatatatgttttgcaaattaggaagctggggttcagaaaaataaaacccaaatatatacagctatttagtggtagagtgggactcaaatgcaggtctcaactacaaattctatctcctctcatttcactgtgtaacttaattttcatcctttttaactgaattgagcctttcactggagttgggaatggattagattttgacctgttatcttctagcatagtttttcataaggatctacatttactcaaggactttatacattagccagaaattacattgcagataccacctctgacctcatcctacgtaacatatatgactttcgtttacctcaaatgcaaaaatcttgtctgtttggtgcatgggtagagcattatgtaggtgaattaaaacataatcaccagagatatgacatttctctccagtcaattaaataaccactaaagattattacagatgcaagtatgtattttaatggacagtgatattagtcaacatatggatttaatatttaatctccacaaagcattataatatggaaatgataaaaatctatgatttgaatatatttaaatcttattctattactttaagcatagtttatttagtttttacaatgaactaagagcttcaggatatgttagtttaccaatctttggacaaatcttgaagtaggacaaaaatgttatatctttaccaccttagtcattgtcttagtccatttgtgctgctgtaacaaaatacctgagattgggtaatttataaataaattctcacagttctaggggctgggaagtccaaaatcaagtgccaggaagttcagttgtctggtgagacataggtctctgcttctaagatggcgccttaaaccttgtgcctcctataaggaaggaatgctgtctttacatggcagaaggcacaacagcacaaagggaacaaattccctccatcaaaccctcacccccagttttttctgagacaaggtcttactatgtcacctaggctggaatgcagtggtatgatcatggctcactgtagccttgatgtcccaggctcaagcactcctcccacctcagcctccctagaagctgggcctataggcatgtgccatcatgcttggcttatttttatttttattttttgtagagatggaatttttctgtgttggccaggctagtctcacacttctggactcaagcgatcctcctgcctcagcctcccaaagtgctggtattacaggcaggagccactacagctagcaagcttttctataacagcattaatctattcatgagggatctgcacttatgaactaaaaccctcctaaaaggccccacctcccagcactgttgcattggtgactaagtgttctaacacatggatttcaggagacacgttcaggccatggcagttatcttatggtgaaatagcctgaccatttcaccagcatctacctgtctactctctggagtactttttcttccttttcaaattttacctattcatgcagtaattctgcattatatcaggatccaaagaagactagtcaagctaataatcaagtgtgtgcttacttgatagttgccattaatatgccagtatatttgaataacgtgttttcacaagaatttttagaagacaatatcttaatgcaaagaattagtacaagtctgtggactttcaattctatggcatcccagtagacgtgatattttgaggtgtttaggccattattacacttcagatttctttatagaaggtcactcactctgcatgggtggccttgccaagtttaaaaggatatgcttggaaaagataggactcttcaatcaatcaggatatgtcagagctgcaaggcacctcagggatcattaggttcagccctcagacagcagattaagtggaaaggctgaaaaaagagcacaggtatcctcatcactggattaactatttttgtgtattgaggtcaatatattcactttgaatttcttttcagtaagtgagggttatttttatcattaaaattacctcccattaacattgaagttctaaatacttcaaatattgagattttctattgcagaatttagcatatatgacaagcccaatatttccttgctgtttaattagtacccatttttcctactactaatacagtatgcatcatgggtttgaaatttatatcttggagtttaaaaaattgaattgaaaatcattagcttccttagcctggactgactggtgatacatttctgcttctctttgtattgtaacttcgtgcttctcttatcccttttgccaatctcattgtctctgcaggcagcagtgtggaatttgattggtgtgctgtctctagtatccgcacactgcgtcaacttggcaagaagacggtsgtggtgaattgcaatcctgagactgtgagcacagactttgatgagtgtgacaaactgtactttgaagagttgtccttggagagaatcctagacatctaccatcaggaggtaagaaaagaaaaacagaaaaaaaagaaaaaagaagacagatatatgtagtatacactttatatatatgcattctggtatatagatgtatatagtaattcctcttagaagaaagggctgccagtggcatccattgtcttattttgtagtaaaactctaaaaaaaatcactccattcttatatttttgagcccctggcccagagtgattatttttcacataaagtttttatttacattttctttctaagggtttcagctagattgaaaactctacttggtaacatgtgccagatacatattaactaatacaagatgatccctcataaatatcttgcagagtgattgaattggtcatctagacatacaataaacagcctctttctagtttgtgtgatgtggtttaatgataaacagttccagttccctgaaaatagtcaattgctcacaaaagaccagttaattccttgttccatcagatgaagccattagtcttcagtttaagatcaatgagttcattgtgaataattttgcttcctttatagctttcacttacagttgttcctccattcccatcccaatattactgagtatcttcactgtgaattcatgtgattgcagattactataagactgtagaacaaaataaattatcttataattaaaataaaagctactggaaaattttagtgatgtccagtagttaggcctttgatattattacagttattattactttttaccagaaaatcatctctatgtggaaaatatggtcaattagaaggaaaaaagtactaaattggaacsaaaatacttaaattttagttttgactgacaacctcattgatttctttaagttacataaattctccrtgctttatctttattttaaatgaatcrtctgagtataaacacatgctacttgcaaatactgtgaagttaacatagagtttatggccgaagtcagattgtaaagtataaagtatagtgctagaataatgttattattttactattacaaaagaaagtagacaagtttaggaaggatgtataattatagttgtctacttgggcctggcctactaatcctttaataaaattgatccattaaatagaatatatagcattttttagacctctctctgacatggttgtttttaaatcactccttaatattcatttgagatagacaggtggggatcaaaataagtgcatcccacaaatatttctcgaacaccttgtaaatccaggttcagtatgatagacagctggaaaaacaggttcttatcttcaagacattaacaataaaactagtatctgtgatataaatgtgaaaagtcaaatactaatttaaaaatattaaaaaacattacagatgatagcagcaggcattttgcatataattaattatgtcctcatgaaatggtttaaagaaagatgaaaaacttctatgactgcttttggatacaattatacatggctattaatgagatttgtttattaaaactgaagtcagtattatagaaagaaagaagttggcccttctttgaaactaattggtatttaaaatatagtattactatatattaggaggtaatttaaaatatgttggmggacataatatgatgtacatatgtaaatgtagacaatggtacttctgtcacaaaacaagttaaatgaatgaattaatgacagacattaattagtgataggcaaaacccattagagaatgcatgactcgagacagaattgaggttcatttatatcatttggtttaattgtaattaaatgtaatcctmaaatactgcctaaactataaatcatttttactaacatgtaaattagtaaaatataaagcatcatccttctcattggcaggtgtacagatagtagaattttataaattggagataattcataaaattccaaaaaccatggccatttgtaatgaggcaaatactacttctgttagaaaaattttctcacatgacattctttccataatacatctaatttgtgcataaaaataaggactaaccaaagtgattagtggccaggataagttaagatgttctcaaataagcttgaagtatttccttttcatgtttttctattgaaaataagtttctggttcagaaatattcttgtgctatggtaagttagtgatatcaggttttaaaaaacagaaaactaagatgggtaaaaaggatgcaaacagatctaggtatgattaatggaattttgggagcttaatggaattttgggcctaaatattttagaaatctattaaacaatatttgaaatttagaatattttatttcagtagatttcttgaaactattcaggcctgatggctatgataaggatgatgatttacctgtgtgggttaccaggttctcatccctttgttcctacatgtcccgtgatatttggtgttggatcaatttgagattggattattccataaaactgtgctatattaacattttacaaacatgttctcatactgaattccttttgccctgtgggaaaacctgcacgacaccatcacactgttactctaaaagattcctgaggccgtgatttgtcttcccattgatggtctctgattctagtcgtcaatgatgagaatttggttttgtgctgaaagcttttctactactttccaaaaaaaaaaagtagttttttaaaaatagcttttctcttattctttaacattaactacacctgaaatgagccagaaaagtagagttaacttaagattctaatatttggtctattacttcagcatagctgaaagtgtattagtttcagcatagttgaaattacaatctatagagttgagttcaggccggggatggtggctcacgcctgtaatcccaggatttggggaggctaaggagggtagatcacttgaggccaggagttcaagaccagcctggaccccatctctactaaaaataaaaaaaattagytgggcgtggtggtgcatgcctgtaatcccagctactagggaagctgaggcacgagaattccttgaacctgggaggcggagattgcagtgagctgagatcatgccactgcactccagcgttcatgtacaagctctatacatgtatttgctagataagggatatgggtgagtcacttcacctttactgagcctcagtttctttagctgtaaaatggggacagtaataatcacctcagaaggatagtgtgaaagtcaaaacagatagtccaggatacatagtagaatctttattaaagagtagcagctattatcttactattgttttgaatttattgcaaaacagaatttttaattccttaaaaagcagaaatttctttaaaaacaagtcaatttaatacagctaagttgaaaaatattgatgtgtttattaaagccttttattacactttaagctcctatttagtctaattgactcaaacttttgctataagttgctacttctccctcagtttaaaaaaattattctaaaatccttcatataagagattttttgtgtccatttaatggagtaatttgtttttaagtctctaaaacattaacaacactgctgataaacccaacataataaggaaataaaaagattatagccaagagagtattttaaaggtttttgcaaaaatttatattgaacatattttaaaataaaaatagtttaagtacacttataaatatgcaaaatggtggattattattttcagtactgtttacaatgcctttaagcactcaattgcagggtgtttgtttagttacacagtaccgtaattgctctcatcagacagaaattagcctcatcccttataagagtatttcagaacaattttaaataatgacaaaatatatttggcacatatctatcattttggcagttctactaatattcattagtgggtcattaggacacacacaaattatgctaagctcaatggcctatcagatatatgatttttgatattaataatcatgtcttatttatttatacacttacggtatataggacctttaatgtttagtgtttaggcaggtattatcctaattttatacacaagaagactaaacgttgggggaaagttcagtcttsttgtctataaaattagacaagaaggggtgggtggtacacagaaggaaccaagttaggaagggacttcgactggaaatctatttcctcaccgtctcacgctggtttaccctcactgctacaacaacacctgtcttgagaaactttgagatttagtggactatttttttttttcttgaagttttgactgctaataggagatttggacttatggaagaaaatcttacacaaatgtctgaaataaggctaaagattctggcactgtttgtaaagcaagtagtraggcagtaggaactaaaatcagttactaggtactgttgacaggtaccaaggctgcagccaaggagaggggaaggtggaaggtcatcaaagtggaaggacatcaaagtgggacctgagatctaggctggaactaaggggtagctaaaggttagataagctggaagagaagagaaaggaaacaacagccagggaagtttcagtggtgcagagaatttgttagtgggaaaatacctagttggagctaatgagtagtcttttgagctgagaggggtgataatagataagactggaaagtcttaagtgccctgggggtcaaaagtttatgctttattctctaggcagtggaaacctttggagaactctgagtgtaggagcaatttgatgaagcagacttgcttaatctgaatgtgaagtgctgagatggaggtgtacaggagaagggagtgttaaaagaagaaatctgtattcagttaggaatttccagcagtagtccaggaattaattgattatagcatagagtacatagcaaacatttattgacttgattttcctttccatttgccacacatgtgagtgtcacaaatgatattcacgtgtacttgtatggaaatcttgcacagattttagcatctaagtgccagaaagtaaaaattttgtgrcatcatttaacagtattcattggtaggagagatgtaaatatcacagtcaggttaagaattatcagtaaggaaatagacacaatattagcatagttgtccattcataatgaagttattccaatggctgatattgtgagtgtattttccaggcatgtggtggctgcatcatatcagttggaggccagattccaaacaacctggcagttcctctatacaagaatggtgtcaagatcatgggcacaagccccctgcagatcgacagggctgaggatcgctccatcttctcagctgtcttggatgagctgaaggtggctcaggcaccttggaaagctgttaatactttggtaaggagagaaacaagtatctgtttctaatgttctattttgaagagctgcaacctgaatgttgactgaatgttgactattggatatgttaactacagggcagatagaatgcatacacttagtgaatttaaagttgttgtatatccatgattgcagttaatgctgattatgagttgatagcagtattctcattaagattcagacaatgaaaataatttcaaaccagttttgaacaagatttgatatttagaatcagaagctaggaattttatgtatttcagtgtccaatttacatttaatggtgcctttagagaataaagaagctgggctaccactygagctaatgatacattctgtaattttattgcatattttaaactactcatacatttttattgttgtttctattaattagaatgaagcactggaatttgcaaagtctgtggactacccctgcttgttgaggccttcctatgttttgaggtaacactgtatattgttttccaaaacaatgattcaaaaattgggagatacagaaatgcatgctgtatgctaatagcactagggttctatatgtagtaatttataaatccattaacaatttccaaaccatcacagccagtttaaggaccaatgtgtggtcttctagtttaatgctttcccttcagggagtggccataggaagactacagttcttcatctagaagtgtagtgtaaggcatctccttaccaaacagagagggtagctttatattaaagaacaggacaatttaaaaaagacacacaaattgaggtatctctcgccagcgtgttttctgatacccagaaatgacagcttatctttgactattgtcagcaccttctgatagtgcctttgttttaaaattttcagtttttgagatcmgattgtttaatagataaattataagggtgaggaacaggaacagtgaggatcttttatattaaactttaaaacaaagttttatcataaaagaagaagttgtgaattatcacttactttcttcagatgttaccacatgtaaggaacaacttcaccaaacaagggataataaaagaaacacaatttgctttgcacaatttgaaagtgtaaatggaatttgagatgggttcctttaaaatgatgaaaatgaaaaatttcaaacgaggtggaaatctttttatttaaatgtcattttgtgtaaaccatagtctaataatactacctgtttgaggagttaatgtaaactaatttaaacatgcacacatttaaggaaggatggaaaataaaacagctttgactatcacacttctttttccttttttgcaatctatatctttgttccagtttcacatactctgaatgataagcattattgctctagccttcctctcttaaacaaatgaagcaactgaaagycctttaggcagaaatttgtaataggataaactggtgaggtgatggatatataaataacttgattgactttctataatgtatacatagatcaaaacatcacacaatacctcataaatatatgcaattactatttgccaattaaaaatacattttaacattaaaagataaatttgtagtagtgtaaaagaggtaaatgctgctgtttaaaagcaaagtaatatttttcttatttttatttttgctttctgttactcctcctctcctaccctcccaacccattttgcaaatgtcaarattcagagtaaattgatttcagatagcattttttctcaagcatttaaaaagaaaggatatagttgaaaaggttttattcacatactgcacattgtattagcaaatattactttaaaaattgattcatttgcaatctggttgagggagtagcataacctgctttgacaacagagcagtaggctaagatcagctgttgataatgaactctgaagaaacaggttagggaaatcaggttctgggctgaatcctgttaaggcttaagaattacctggaaccagcagagtgttaatgtagcaaatcagaaagggcaaactttggagaagtataatttctagagctaccaggattccctttgggaattaatacaggtttactgaccccctacactttaccttcttccatcctcagcttcgtcagttttatactttggttgattgtcctggtgattaaatggagaaaagtctcaatttagcaagaggcaccttcttattcagccccgactkgaactataggttgtctggaactgttctgagaaccagtcaagtctagtattagcataaacctgwcctgctttttttccccttccttttccagtgggtctgctatgaatgtggtattctctgaggatgagatgaaaaaattcctagaagaggcgactagagtttctcaggtagtgtccaatttctttgtagtgactgttatctcttaataaacatgtagtgacatttatctcttaataaaatgtagtgacatttatctcttaatgcaaccttactttgtatgttttcttttcacacaatgtgttagaatgagttttcttttttcctcttctaccctctagtctcctaaaagaatgagaaaccttgaaggcattaaattataactagacttttaaggttggtggaaaaagaggaatacctgtgcatattttatcaaaacagattttagactccaggagtctaaaaggacaatgatttttgtttttctcatgaattagatgctggtcagggtatttctggaattcccagtctcaagggctgctcaaccatgctcaccattaacaagtgaaagctttcctgatttttaattttcacatctgggaactttgcctagtcaaacatgcaactttaatagtaagtccctcactcaactattttttattttttcctgttggcacattcagtttgtgagttaatacaagcatttcttattttgtggcaactcagccaccttcctccactgccccccagcctttaccttctccttcagtgttacctcagcatgatccatttaagatttacccagtggggttattgatcttgtattgtagaggataaaagtaatgttttccttttaaaagctttcaaaagcttgttggggcttttttttttaagggggaacaattcatagagaagagtttgatgttaggcaagtggaatttggagggaggaagagtgaaatcaggagcatttcaaagaggaataaagtgcgtggactgtttctgcacacatgacgctggatcgctcttctgtgtatgatagctgctccccaaggatgtttgagtggtaagagtagataagaataaagagtgagaagaggcaaagagtgtaaaagaagaaaaccaggtagactttgaattcatgtttgtgtgcaaatcagatagcttagaagggaatctttccagtgggccagttttcactaatggagtgagacaccaactgtcttctctattttattcctggccaggggtcctgccatgcggcccttttcagaggctggctactgtactcagctggtctcatgtgagtgatgaggcaggtgtcccctcttgtctgcctcgaacactccttataggatctcagtacaatatttttaaagtatttttcctttagcgtatggatagaatccatatgggaccaaagtttaataatagagatgttgtgattgagtactttacagttcaatgttccctatcaaactacagcagcatctgggatactgaattcaatgactctagagtaaaaccagccccaatcaatcagtaatctatgtatgtattcatttatttatagcacctgttatatggtggcattgttctcagtatcaggaattgtaatcgtgaaaagaaagatrtggtctctactgtcacataggacttctttttgctaggctcaacagacttcaaataattacaattaaatatgatgagcaatgaacatcgcaatagagaaaatacaggatgttgagggagagtgtgaaagtcttgggctccagtccctgaggaagggacttttaaattgatacctgatggttgattcagaattaactgggcaaatggcttacattgtgggagtaggaggaagaaaggaacagcattyatgaaggtctgaagatgagaaagagtagggagtttctcaaaactgataaagcattccttatatggctaggacatcaaacatgatgctgattattaatgatggtgcagaagtagtcagggaccagataaaggagactttattggtcattataatgagtttgaattttagtcatattttttattttaaaaagatgagtgtgctgtagtacacagagtgaattatggggcaagaccaaattcatggaaagaggtgagtgagttgttgctatagctcagggtagagatgacagtgcctcggattagagtaatgacactaaagatggagagaaatagtaagaacatgcattgaaaagaattagtgaatgaatggaggtggagggtgaaagaggataaaggataactcctgagttttctgccttggataactgggtagacagtgatgccatttattgagatagggaacactgaggaaggagaaaagtatagagggaggaattatatatttattttttaaccttttgaatgtgaactgcctgtgaggaatccaagtggakatgatttaaaggcaagggttattataataggtttggaattgaggaccaagatcatggctagagatagagaaggaaatatagattttgaaatgaatagcatatcactttaatggaagatttgagaatgaaagcaatcactgagggagagagtatagaagaaaaggaacagctaagacagacactggaggaatactggcatttaaggcagagaggagaagaaagaaccacgaatgagctgaagaaagaagcacagaaatgtagtttacagataccaaaggaagaaagtgtttttcagaaggccagccttgtataatgctgcatttcatgatagtggtcagaaggagtttgtgttcagaggcaaaagggatattcagagaaggattcagggaggagatagcatatgacctaggccttgaagggtgagttgagatttgaaagatgaagctgaggagaaaagatagaatacacgtggggaagagacacatggaagcaagtgaatgcagggcctggtaaaaagacagtggcccaggttgttttagcctatggtacagaggagaagatatctaaaccctggagatcttccctcaacctcttcrtttagtatggagaaaagcaagtggggattatgttgtggagggcatcccgaccctgacatggaggaaatgagtgtgggaagcacttcaagatgagaagtgtctgaaacagccaagaaaggaaggacttttgaagattaataaataaaaatacttgattttacagttacaaatgtcatactctagaagtggcataagacaaatcaactcgaggtaaaggatttcatctttggcccaataagaccaaaagaaaatgtcactctcattctgagttctcccacaattctcaaagagaaatatgatttagggagttgtagtgcttagaaaagataagggtagaaagaaagaaatattctgaaccaataataatatgtcattataaagtagagaaatattcatgattctgacagcagagaaagaagccatattctgcttcctccttagtcccctcttttctctaattgacctggatgcctatacttgaggattcagaactcatggtcagtttgctgagcactcaaagttggagaaagaccctctgcctcactacaagcaaagaacaaccttgttcttacagcacagattaggtaatgagtttatgtagttatgttcagccttgagtattttgcaagtattgccctgatacttataatacttaaagtacatggcttattgacactatatacatagcgttagctaaatgttcgrctcctctgttttccttcgtgacaggagcacccagtggtgctgacaaaatttgttgaaggggcccgagaagtagaaatggacgctgttggcaaagatggaagggtaagtgctttattctcatctccttcattcctgccttctcatcatttttttctttaacaattttgaaatattgacaggttagaattcataatatctataaaacaggtctccagtaatagtggagaagctgtaaaaaaaatcaaattctctgacaattcagttgatgtgtcatgggtatcatatttcctatgtttcatactgttagaatttctctgatgatattcaaaagtaattatcatcctgtactcatcattccttttgaatagattttctctctcattttcttttgtctgtgtctttccttttatgtttcaatggctattatgaaaacatctaatacttttctttctgaagttcccaatcgaatcctggtttttcttctttcttcatttcccatcctcctccctttttattgggttaataaaggcaaagtcaaacagagtaaagtggataaggataataatattaaattggcttaccatatcacatcttgtatttctaatacaatgaatacctccaacttcaaggagaaatgaaaatgtgaagaatattttactttagttttatagttgtattaataatgcatttgtgacttctcttaaaatgtagtaagttatgttgtagggagtctatgccattttacttgctttaaggaaaaatacaaacttagcattcatcttctgctttgcaaatacttcaaaacactactgaagatgttaaatctttttctctttttccttccagattagcatttcagagtagatcttgttaataaaaatggtaatggtatctacttacaacagaatcacataatcttgagttgaaacacctttagagataatttattccagccctccaccctccaagtcagatattttctttacagcatccctggaaggtggtcatctgttttcttttaaacactttggtgatacaaagctcaacacattgtaagattatatattgtggtcacttttttttgacatctcaggtattctttatcttgaactaaggtctgtttccttggaagtcttatccctgattttctgagtttcagagcaaaaacttaatctatttccttttcaacatcttaagtatttgaaggttgagatataaaataagaggaacgtgatacctatatatggaagtggagaatgtaagactggcctagagacatttgtactttttcaaatactgtactggtaaaataatgctggtttgttggctttatttggctctaggtttgccagcatatgtgctttccctaaggttttctcagatatcaactattgcacatcgtcctgtactccctcttttggaaatgttccaggttattcacatagtttttaaattgccatgttaagaaatggacatagaactgcaggttgctgagctcagtggggtggggtgcctgagctcagtgggtgaatgcctccccttttccagacacttcaccaaaaaatgagctcttattattttataaataagctcttgtaaaaaatgagctcttacttatatgtggtctgttttatccttacaaacattctatgagcaggtaccattgttattcttatcttatcagaaaccaagactaagtaagtaaagcactttgcccaggtcacagaacagaaggatggaaactcaaatgtcactgttttaagacgttgctaaatctgataagcaaatctcttatgtaatttatttaagtcttttatacctacccaattattctcccttactctcagctgcatcatttcccaaggacacacatattattaacatataggttatagtgattgagaccacagactttggaatctgacagataatattcaaaatcctaactcagtcacataccagtcacctgaacctgggttatttattattacattacttttatttccttacttctaaaaaaggactagaatatttttcctttcgactccttcctctttcaaacytccatttaatgatctcttgatgagatctttgagacttatttttggtccacctaagttataccatttacctagatagatattgagctctcccaccttcttttctttcccagtgcctaaaagataaagatattttaagtgcttttcaaatgctttagcttcctatcctgttcttaaaagtcaatatgaattggtttagttttactcttttcctattacttatacccatgctaatcagtggatgagggaggtaggctctcagccactcttagctgcctctacaggaaatctgttactgcacagagaggcagcattttctactgctctcatcaggaatgtagcaagggaactacttagtgctcagtgcatctgttaggaccaaaggggaggatgagggagtagcttccttgaaggaagtacctgaaaactttttctaaaatccttttttttttttttggccaggttatctctcatgccatctctgaacatgttgaagatgcaggtgtccactcgggagatgccactctgatgctgcccacacaaaccatcagccaaggggccattgaaaaggtcatcatttataaataaaagtggaagggaaaaggcaacactcagaaaaaaacacctaaggtttttttttttttttttaaagctaggtagcaatgtaagatatgctgcaggttaaatttaatgatgaggctaacttccttgctctgagtcacctgggtattctaaagataacaattttcttcactgtccttttgagcccctttggttgtatgcgagtacaggggttctcaaacttgaatgtgcatcacagacacctggagagcttgttaaacacattgctggactccatcccccagtttctgatttcatatttctggatcgggctccagaatttgcgtttttcacaagtcctaaggtgatgctattgctgctagtctggggatggcagttagagaactgctactcctggggattctaatgtttcagggccacacacaggtgagcggcatctgaagcaatgcttctcagttaggagtggtgaaacaggtgtggaccagtcacttgagaactttctggaatctatgctttcccttctcacccttgacttcacctccaaacagcactttttgatatctcttttgagctccgagagccagccgtataaagaacttaacaaaaataatgactctgccttagtactcaatatgcactgctaggtgtacatttagaacctatcatctttttttttttttttttggagacggagtctcgctctttcacccgggtgggactgcagtggcgcgatctcggctgactgcaagctccgccttccgggttcacgccattctcctgcctcagcctcccgagtagctgggactacaggcacccgccactgcgcccagctaatgttttgtatttttagtagagacggggtttcaccatgttagccaggatggtctcgatcctgacgtcgtgatccgcccgcctcggcctcccaaagtgctgggattgcaggcgtgagccaccgcgcccagccgaacctatcatcttaaataagctttgaggaggtcccattagtctttaggtatattagatcaggctcaggctcagctctttttagtgagcttttccagtgaccctgccatcagaattcaggcagacctgtctctctggttgtacattgggctggattctgaaggtctttgttctagaaggtagaggtagcaggatactttgtaatagcagaagcattaaagaaaaaagtccttggatctcaaatgtacttcagtttctcatgtcaggataaatgatcctcagaactcaggattttccaaatctctcagagctcaatgtgtcatagactctacttcgttttatacccaattacattgctgaaccactcttgtgagcataatgagtgaggagctcttgctctttgtaatcaatgccccctcttggtatagggacattctggctctggttgaatacagggattcctgtatgtgacatgcagggcttccctgcagggaaacactgtttccttctgaacataatatctaaccttgtagagtccagggcaacagaaaagcaacataaaagaaatctctctggtttctttgcagtaccatgtaatttcagggcctgtacctcccagcaggtaggtcattacattgatatagaggttggactgcagtttctggtgctaaggcaactagactgaaaggatttcatttaaccctcaatgtaaaaccaggttatataattgtaggtagataggggaatttggcagagagataatcgtgtacaattatttgttcttttcctattattttgtgtgtatttattgcatattattttgttaatagaarcctaatagtgccctccattataattattaatgtagatatatagctgtctgtgaagagaaattaaagacatccaaatttaaggtactgtgccttttagaaagttttcaaaaactaagatatgctctttagcacactatacgattatgctttttaattcaggtgaaggatgctacccggaagattgcaaaggcttttgccatctctggtccattcaacgtccaatttcttgtcaaaggaaatgatgtcttggtaagaaatgccaaggtgcctgagaggacaccaccactgtgttaygtcatgttggtttgcatctctctggtaatcttctctgtgaacaccagacaaagagcaactgagacccctggatctgtttgtgtctgagtgtggaatgatgcatagcatataatgtctaccttatttgaaggcccaggctattggtggcactgataagtcagttacagctttgtaaagcacactgatccactgggaaggtcactgtatgccacctacagtatagtatagatggatacggtgagacagactatcataaataaatggaatgtgtagagtagtcataaattctgtgtactgaaattctgctttactccttacccagagacgataccatttgcaaaaatgataaatgaactagattagtcctaattaatttagtctacttagtttaactaatcggtaactgccttagtctgttttgtgttgctataacagaatacttgagtctgggtaacttgtagagaaaaggggtttacttggcttatgattctggtggctagatagtctaagattggaaagctgaatctggtaagggtctcaggctgcttccattcatggtggagagtggcaagggagtgggcaggtgcagaggaatcagatggtgagagagaaagtaggggagagaaactgaagaaaccagactttttaacagcccactgttgtgggaattaatttactcctaccagactctgattatcctttttaatttaggtgaaggatgctaccccaacaggatagcattaatttattcatgaaaaatccacccctcggacccaaamacctcccactagtctccagcttccatcatggccacactggggaccaaatttcaacatgagttttgatggggacaaaccacatccagaccatagtagtaaccagcattgatttacctcctactcgcagtcatttggtggctgcaaaaatgtattaagcaagcctctgctctcaaaaaatactgtaatttagtgaaggttgggaagaaggtaaatttgtagaaaactataaagtagagtatcacagttgctagaggggatgtacaaataaaatggtattggaattatagagcagagagaacgtatttgccagtgtgtgtgcatgagcatgtatttgagcatcctatgcttggttaggggtagatcataaaagacttcaaggtagattttgtattgtgaactggatctcgcaaaacggttggaattttgacaagttaacgatggtagagagattattacacatagatagaacatcatctgtaaaggtgagaaaagagcatatttggagagagtaaatagttcagttgagtgagatgattttactgagtaaaatgggtgaactgggaaagtaagattgaggccaggagggtagtataagataaagacagtgaggtctccaatgaagcaagaggacagaaggccttcagggactagactttaatctgaagccagtggacatccagtgaaggttttcaggaggggtatggcattatttgagctctgcattaaactaaacctgtcagcagtgcatgggaatgcaatttggaaaaaggcatgaaagaaagttagagttcaaagatactgactgaaagtatcaggaaaaatccaagcagtaaggagaaaagagacaagattagcaaaacaagagctggtccccagttaataacagctggaaaccagtggtagagagaatattaatattgttgttactggctctcaatgtcctctttctcattttgaattttatctcttcaggtgattgagtgtaacttgagagcttctcgatccttcccctytgtttccaagactcttggggttgacttcattgatgtggccaccaaggtgwtgattggagagaatgttgatgagaaacatcttccaacattggaccatcccataattcctgctgactatgttgcaattaaggtaacattttcaaaaatttattagtcattttatgagttctrgtgaaattaaaagaacaatttgtcatcaaaaatcttgttacttttaaaaccttctaactaaagggttggactagggatttacatttcctttcaataatgtactgcagttgtactataggcaactttatgtgaactgttgtacatttcaaaaaaatttttaaaaccatctagaattgtataacttcaaaatcaattagctgagtgaattataagctttttgtgcagctgacacatgatggtgctagtttagctggtaaatagaaayccaggacacaccttgttaggataaagcttgaattgtgccaactcttacatgacttttgtaaaaagggttagcctgtggrgttgattaaattcctaccacattgaccacctttgcttagtatatattttcttcagtggcatgatttttccatttgaaaaattgagacagctgttgctgtatatggtgctgtgcggttgttgaaattgatgacacctttataaagagtgacmaggaaaatttaaagtttgttcactaatttccaatacatatgtatattttaaataataccttaataataaagccattgtgatctcctagctgcatcagtatgatggtgcacagaattatgacctttaactacttggctggacaggcatgaggattagtgatatataaacgtatttgaattacgtagatgaagagcacaatgaaattaatatatttatgtaacattaatattgatatatttatgtaaaattgacaaatttctgatgttttcaaaaggtttccgttcctatatgtactagtgacttcaaccataattgtgttacagctcagacttggacttttgacttttatgatgggaactttaagttgaagttgtgaattaaaaatcttgtttaagctgataatgtaggatgccttgaattttatagtgcattgagatggaatgtgactttttatgttgggaggagaggtggcattttattcatggagactgtgacaaacatatattgttaaatcttttagtagaaaaatagagaaattttttttgagaccaacgattagtagccactgaaaaatatttttttccactggagattctatatatggattttaagttcatgtttctttattcatagttataggagtatgcttatttcttttagtaaattgatatatgaatttttaactaaaaataatattgatggatagatatgctttttttttttttttttttttgagacggagtcttgctctgtcaccctggctggagtgcagtgccatgatctcagctcactgcaacctctgccttccgggttcaagcaattctccccctcagccccccaagtagcccccaggtagctgggattataagcacatgccaccacgcccagctaatttttgcatttttagtagagatggggttttgccatgttggcaaagttggtcttaaactcctgacctcaggtgatccacctgcctcggcctcccaaagtgctgggattacaggtagatatgcattttttaaatgcactgtatcttctagcttactcattccctagttagctttgtatataaatcttagtttttttcaaattacttagtaattgtcaatcttaatagccctagtgaggctaattggtatcaacagatggggaaatagggaagctgaaatgcagaaatatgtaacttgaccaagatgatccagtgaaatgactcccaagctagaattcccatcataatttagaatgggtgccagaatcaatggagcaattgataaaattcctccatgtaccagataagtggacacatagcgagaaacaagaacttagtttttcatgaattgcatcagtaaaataaatgaaaaggaggcactcctatactctagttcatatgaaagttctgcacaaaggtgtttccaagcagaatgtttttcaaagcttttaagaggtgtcaacaacagtttaatgcctcagaaactggcttacagacagccatttctggcaaggtggcttgttgcaagttcaaatgatcagaacaagaagaggaatgtttccaaagcctatcaaagagaaaaaaatgtgtttgaactctgtctggagagaccaatgcccagtggactttgaaatcattccaataggaatatgcatgggccagattagaaacactggtccagactggtctcaggcgccctatttacagaattaatttgtgattatttaacctaaagttttggccaagagctcaagaaattcttggaatggagttttaaagccatctttcaagtcggatgcttggacccaagagattttttacatgtctactgtagcctaagtgaactctgtgagagatgatttgctaatatatttaycctctcttattcattttctacttttccctcacataatttttctccctgttttttttttttccaacaggctcccatgttttcctggccccggttgagggatgctgaccccattctgagatgtgagatggcttccactggagaggtaactagttaataatccatggaagctttcattaaatctactttgaaatctatggttttatgatttgaatacagtaaaayaaagggaataaaaacatctgctatcagagtaagactcaaagagcttatgaattttgaatttaaaaaatattttacttytattttgaatagggtctaaattcttatttatattttaacatgggaatataatacatgtgttactaattcattttcacatgagaacatcttccaggtatttatctagacatccaagtaaatatcttctgtgtcttactttttatttaaaggttctcgggtctctctgtaacaacacctcattccctgccttgctgccatgaaattagatcatttgatttttactagtaatatggagaatgacagcattataaagatcatagacctaaacattgtggaatctgcagatacatgcaaaattttaggactacttttaacctcctggggattatctaaaaactataatggaatcggccactggatgtccctcttcacttgtgttggggctgtgtcagctgaaggtttctttaggattgtgaaatgtgtttcttgtaaagagctgtcagattctagaaagttctctccatgtcagtgtcaggacattttatgaatcacctagcccttgacagacttactagatacaaacttcagattctcatcagtgcatatccgagtggcaatatcagactgtgagccatcattgtttcctcttggtattaaggaaaacctaaaaggataaaatacttaattgcaacaaagtacgtgatgttttatatggttgcctggttacaagcaagatctgtgatgagaagccaagtgagacaagaaggcaggcagtcaggaataaatggctgtcctgtttgtatttggactcttagaaaggggactctttgcctctttgttgcttcttttaatttaagggcaaaaaaaaccttacttttaaatgaaggcactatgtacgtttcatctccagtcggtttaaggagacagtcttcaggttcttcttgatcccatggtcgctactactagtaatgctgattttagatggcccagggttcagatcagagagagatctattttccttcatactgttttatttttctttcttccttttttttttgaaacggagttttgctcgctcttgttgcccaggctggagtgcaatggcatgatctcagctcattgcagcctccacttcctgggttcaagcgattctcctgcctcaacctcctgagtagctgggattacaagcatgcaccaccacgcccggctaattttgtatttttagtagagatggcgtttctccatgtgggtcaggctggtctcgaactcctgacctcaggtgatccgcccgctacagacatgagccaccgcagccggcccatgctgttttctttagcatggcaaatttgttttcagtgsttatgttcattctgcatccatacatatgttatgggagttattgaaatataaaaataagaaagaatgagaaattcagctcccctttgttatatctgtttctcaagtataaagagaatttttcttccattatttgaaagagtcgttaattccaagtgtcatacagtataatattacgaggtctgttttattactgacatcagaattctagcttagtaaaatcttaattatgcttcaaagagacattttcagtgtccaaatggcttgttgtaggattaaataaacattcagctactgatataagtaaggggcattttatgttcctagtggtaaagtggggatattagtcctaatctttaatggcacatttaactactttctatggttctgtagaaaatttttaaaacctcgtctgtgttgttgcatytgcactatgatgggattacccaattcttttcaatagaatttgagactyattaacttaggttgaccttatttaagttagttgcccagtacttgactgagtaaaatgttcactgtggagagaaaagcagcaaccacatgtactggtgaccagctgaaggttatagtcataagaacttttcttgcacagaaattgtaatttgcttaagaaatgaatttagccatcagtggttttttttttcttttttttcttttttattattattatactttaagttttagggtacatgtgcacaatgtgcaggttagttacatatgtatacatgtgccatgctggtgtgctgcagccattaactcatcatttagcattaggtatatctcctaatgctatccctcccccctccccccactccacaacagtccccagagtgtgatattccccttcctgtgtccatgtgttcccattgttcaattcccacctatgagtgagaacatgcggtgtttggttttttgtccttgcaatagtttactgagaatgacgatttccaatatcatccatgtccctacaaaggacatgaactcatcattttttatggctgcatagtattccatggtatatatgtgccacattttcttaatccagtctatcattgttggacatttgggttggttccaagtctttgctattgtgaatagtgccgtaataaacatacgtgtgcatgtgtctttatagcagcatgatttatagtcctttgggtatatacccagtaatgggatggctgggtcaaatggtatttctagttctagatccctgaggaatggccacactgacttccacaatggttgaactagtttacagtcccaccaacagtgtcaaagtgttcctatttctccacatcctctccagcacctgttgtttcctgactttttaatgattgccattctaactggtgtgagatggtatctcattgtggtttagatttgcatttctctgatggccagtgatgatgagcattttttcatgtgtcttttggctgcataaatgtcttcttttgagaagtgtctgttcatatcctttgctcactttttgatggggttgtttgtttttttcttgtaaatttgtttgagttcattgtagattctggatattagccctttgtcagatgagtaggttgtgaaaattttctcccattttgtaggttgcctgttcactctgatggtagtttcttttgctgtgcagaagctctttagtttaattagatcccatttgtcaattttggcttttgttgccattgcttttggtgttttggacatgaagtccttgcccatgcctatgtcctgaatggtaatgcctaggttttcttctagggtttttatggttttaggtctaacgtttaagtctttaatccatcttgaattaatttttgtataaggtgtaaggaagggatccagttgcagctttctacgtatggttagccagttttcccagcaccatttattaaatagggaatcctttccccattgcttgtttttctcaggtttgtcaaagatcagatagttgtagatatgcggcgttatttctgagggctctgttcygttctattgatctatatctctgttttggtaccagtaccacgctgttttggttactgtagtcttatagtgtagtttgaagtcaggtagggtgatgcctccagctttgttcttttgacttaggattgacttggcaatgcgggctcttttttggttccatatgaactttaaagtagttttttccaattctgtgaagaaaatcactggtagcttgatggggatggcattgaatctataaattaccttgggcagtatggccattttcacaatattgattcttcctacccatgagcatggaatgttcttccatttgcttgtatcctcttttatttcattgagctgtggtttgtagttctccttgaagaggtccttcatgtcccttgtaagttggattcctaagtattttattctctttgaagcaattgtgaatgggagttccctcatgatttggctctctgtttgtctgttattgctgtataagaatgcttgtgatttttgtacattgattttgtatcctgagactttgctgaagttgcttatcagcttaaggagattttgggctgagacagtggggttttctagatatacaatcatgtcgtctgcaaacagggacaatttgacttcctcttttcctaactgaatactctttatttccttctcctgcctaattgccctgtatttactctaatggtggttctgtacctgtgccaaatgatgatatacatggcagaattgactcctatcaggttcaaatataccacttgttctataattatgttggctatttgacttgtagttatattgtagcacaattaccgtaaacctaaatggaacttctgtatactctaacattactatatatgttagtttgtttggaattgttttttccccatatggctgtggtattcaggactagtagcaggatattttgtttcactttatgaaaatgatgtttttaaaaaacaggttcctttgaggttttcatggagttattaaatttctcagaaggctgtctcataagctctatgaaatggctccaaaccaattcagcagttacgcatttctgctactgaccggtaaattcatgcacggctgcatagtatatatgacacatactgttatttaaacagtaagtcatattaacattcggaaacttaccacattatggaccagaagctgtgatttgtatccaaataactctcagtagaatccagttatgttgctccattgagtgttgttggatagaaaaagaattgcttattcattcattatgcttaattaaaaacataagatacatctgccctggccagcyttttaatccctggattcagattgcacaggctttgggcaacattaataaaatctacagaaggagtctatgagtaaagtactttccatttgtgcgtgcatgtgtgtgtgtgtgtgtgtgtgtgtgtgtgtattttaattttaatttttggtaggagtggttgactattctttgcatcctctattttaattttttatttatttctaaacaggtggcttgctttggtgaaggtattcatacagccttcctaaaggcaatgctttccacaggatttaagataccccagaaaggcatcctgataggcatccaggtaagtggtttgtggctgtgtgcttgcccatggtcatacatggtgagtggggaggggcaggrtagaatgttaattgtggtatagaggaagggagatttgttttacgtttccgtttatggcaacttccaggaagaagggacatttgttctctatttgcttcctgattttgccttctgttgtatcagcccgtgcaaaaataaaatacagacagaaagaaaatgtttctagtgaagggatatttgttctaaatgggatgcagggtactttaaaaaatgaatctcttattctttggttttgtcttttctatatgttttactcttagctctccatccttagttcctgaacataggcattatatgaggttggatctcacttcctctgtttctcttgatatttctctgtctcttgattttcccccttgccaattcatccatgtctatagtacctactcttctatctatagctaccacctgtaaatttacatcctcagccatcccatatttccaacaatctgctggatacctccacttgaatatctcaaatccaacgtttctcaaactgaagtcatatctgttctctcctgaccatctccccttccttcctttcattcattcagtccttcacatttcaatcacttctaaatgccaaggattcaaagttgaatacattgatgttatttgattaaatttytcaacttaacactccagattgaaagtttttgaagggtagtgacttaatgggcctaatacagtcagtttatttcatagtatactgtagaagttcttgaaatattattcattggtaagccttctaggtcaaagtagggtgaaatgaatatctttatgcaataaaaaatgcactgtcaatttattgatgtaagttaaatataaatcttagggcaaaatgataggaaacttctattactatttggaatgctttttattactattcagaactacttttattactattactaattgcaagagtgtacaaactgtcctgtttataaatttcctgaaaaaatactagaggcttcccaactggtcattcatttttatttgagattagtaattcttgggtcctatgaaaaacaacaaatggtcttatataatatccctgctgtgcttttaataagctcaaactctgcatggctacataaaaatcaataaaaatataattagaacagtaccaggtattctcaagccagtgggtgattattttagattccatctcattagggtgtcttaatattagcaaattagactctggagactttacaggtagtggctttggagaagtttctgcaaagagtaacttgggattttgstttataaaggtaccagaaggacgacggtgaatagttagagcagaggctaacaagatgacttgcaattgtgaagcttaatggcagtttagagacaaatcacaccatatgatagactcatcatrttataaatgggtattaagtattattaagtcccaagtaggagaatatttgcccaacttccagttatggcttaaagtttaatgtgagacttgggggcattcagaggagaccatgcccttagtccacatcttcacatctaatcataatagtgctaacattttaaaatgccactttaagaaggcagtgatgtataaaattgtgccttgtttggttctagtgctgcagggaaatgtgaagcaaaaattaatttgatccctatgaagtatttgcgtaattttggcattagtggacagaattttgctttgtaggggaaaaaagggtttgttagaaaaaataatgttttcttaaagtagtgagagctggctattgaaaatctacctttcaatactttccttttaaaagaaataaatgttctagcagctacatgagttgttgcgaagaactttctgcacatgagagcatacggacacagatttaaaaatatattaaaaagtacttaaagraacttaataaaattatacttaagaaaatatttacagccatggcaaaattgatcagctaatgcatagtttcttcattactatatgtaggattttcattcatggtgtttttaaaaatgcttagtctgataaactgaaaaagcgtgacagaatatactaaatggagagttaatagctataaaacttacttgactacttcttagttagtatggggccaaatctaatctcaactttttaccacagcttcatagcaattgcagataaagtaattagggttccatattttaggatacattgtacttttaaaaaacattttatttaaygtgatcctacttggtcagaagaactcatataaacacttttggatatattaagttagaactgaaaaatagcacaaaaaagactgctaatatataaatgggggttagggatagtaaatccaatggaaggcatctagttgaaggtgagttattatgaagttccaagagaacttgttatatggcagtctttctaacttttaaatttcttctctctttcccaccctactcctttacacatacagactctctgtttctggtcttccaaagttaaatccaataggtcaaagtatctgggaagtttgaaatattcataacatcaatcttataactaggacttaggataaaagaatcaagatgtagattttgtcaaaggattcttctcaatctattacattccctgtgtctcyaccaaggcatttctaacataagaaaggcataacacaggtttatatggcaacaaaaatcatctttgattttcctgtaatatttctagccacctttcatcgcattaggatttatttttagttgctgtgagtaggcaatctgccttgttttgaagttttctggaagaccctttaacattaaatgatttactctagagtagatcaagagcactcactgtgttttcctctctgattgggctattcagtgatgcytgtggagtggcaagtaccaatctgacatctgcgcttcagcatcgctcagaaacacaaagcaagcattttatttgaaaagacaactccaagtgacatgaataaccttttatctttaatatggaatcattaggaacaaccatagagttgtcaatccagaggtccccgtagaatccacaggcatcacatagtattaacttggctttcttttctgtagccaggagttggataaatgtgaaaatgatcattggaggaaatatatatatttttcacttttaaaggactgtcttctttataaacatttccaagaaaataaatcagcttgtacttttcacctttcrtaacaaatggtttcttacacaggtattttcaatcagcttttaaatctgaggctactcagatgcaagctgacagctgtaatttctttttgtagagaggctgttttatgtgtcacaagtgttcaatacatgtttgatagaagtttataatgtgcctatggaagccaacacccagaccagaaggtagagtggtttcctggctgggaactgtcgatactgtcatgttggatatttatcttttccacctgggggacaacactgaaacagctccataatgaggttctgcctggtgtctgcaggtcttagaggacttgctgacttattttactttaaaatggcaaagaaaaaaattacattctagtactcctcccttaatgtttttcgtggtgattttagccaaggttaatgcaatcttgacttcatattacacaatgagtgaacgatagtcttcctatcccctattcccccctttctcaagcttaagtatgcatcaaaatcacctggagggtttgtaaaacaacaaattgctaggatccactcccagagttcctgattcaatagatctggggtggggttcaarttttcatatttttaataaattcccaggtaatgctgatgctgctctgccagggaccacagtttgagaaccactctacttgagcgatggtactttagaaacctggttaaaagttatgttagcacttattattgtcaaacatattatcagggaatttttgctaggggaaagtataaaagattgaggaaagttgagtgcatgattaatgtatcaattagcaagtgttggagatcattatgctgagccttctaatgtgatttggtacttactgaagtctattctgtgtttagcagagggtcacaatgtaatgttccatattaggggtatttaacaacatttggaagttcattttggacatttcatatatatttgttatataccaaggaatcttaaaacatgaaaaaaaatttatatgccatcaaatttagccctttgccttttctgaggagaatgaaacttgaattgtcttattcttctgtctaaccaattgtcctgatgtcactaagagttattctctaattttttacttgtttttttcttttacgtctaaccatgagcttcttgcatctaagctcatttctttctgtttggtcctaagtggaaatgaaaagctactttcctgggcatggttaaaattcatgttctataaggcagtcatgaataaccactgagcctgcctcagctgaaattcatccagttacatttatctattctatttaccaatagtttcctcttataaaactgcagttctgggattgagggggccagaatctgaaagaattttatatttgaacatagtctttggggtcttttcttaggatttagatctgtgctcagaaatactctgcaagtaaatattagggggtgttatgggctaaacattatcaaaattgtgcaaggatcacatgtgttttattgtcacagttcctagtttctgactctgaaataagatcatttgattttttccagccatcactaatatggtttataaacaggttacaagacatttgctgaagtaactagctcatgtcatctgtttaaaacctttttacaagggaaaccaacaagaatgttcctatttaaagaagaatggatatgtttttaacagtgtgtgattttaaatacgccagctcagttactcagacactcatgttaatgaagtcaaggtcagggtttgatctttgggtaggtcacctagtgttgttttctttcattctgaccactatcttgcaaacactagctcttgatcacaggaagtatgttcagaaatagggaactcctgatggcaatggtcaggaatccagggaaggtaggggctggacactagacaggtccacctggggtcctaggaaagacacagcaatggactgcaggaaaatatctgaacagtgagatggagcattagggaagcctgtgtggaaatgaaatgcgtataaatgagggggcagtcagtttgggttgtaagtgtaatcgtgggtagaggaacccatgcttggaaactaggatgtaagggcaggaatctagtttttaggggggctgaaaaaacaattattgtaattataataatatttattaagaactattaataggcaagtaactgtgctaaattatrgtagtaacacttaagtagtgcttacttctaaattagtttattgaacactcatactaatgtaagaactgttactattcctgttcaacagatgaggaaactgcatcttagagttgttaagtaagatattcaaggtaacacagtttaataaggtgtggagcctcaaaaaaaaaagttgaaatactactattgtcatcactgtttttgagtgaagaaatgaaggcaaagacattaactttttgaagctcataccactagtgaatggtgaaagccaggatttgaaatgcagctaactgactttagagctcattctttagctacaactttttattgcctcagagtaaatgaaaaaagagttccaaagattgagttattgcagggactagtgcataagctactaggaaaatggcctagttattgaagagcagtacaaaattagaacttagaaataagagcaagttgagcctgggtgcagtggctcatgcctgtaatcccagcactttgggaggccgaggtgggtggatcacctgaggtcgggagtttgagaccagcctgaccaacatggagaaaccctgtctctactaaaaatacaaaattagctgggcatggtggtggatgcctgtaatcccagctactcgggaggctgaggcaggagaatcgcttgaacccagaaggcattgcagtgagccaagatcgtrccattgcactccagcctgggcaacaagagcaaaaaaccccatctcaaaaaaaaaamccaaaaaaaaaaaaaagaaataagagcaggttgaataggcaaaacagctagcctgactcggtacyggctcctaacccgcatatcttttaagtcctycctgaccaggaaaaggatccttgtagaaccgaagtggatctgaacttacaaagaccaagtggattaaatagagaataaaaggagataagaacaaggtgaaaagcagggatcaagattatgtggatggaatttcattgacattgggatatagctaaaactcacactcaccatagaaggataaaaggataaaacttgtcattttttaatataaagcatccggcaacatgtaacattgtcttttaagatgttgtaaggaaataccatattgcataaatgaagagcatgtatatctagaaagtgaattttgtgaaattccttttcagcaatcattccggccaagattccttggtgtggctgaacaattacacaatgaaggtttcaaggtatgttcattagttttaagttgttttctgtcagcatggaatctgtccacaaatcaaaatattgcagaatattggaaaagaaatagcccaaaatatgtccttttgatatgaaaggtttaactaacttggtagtttcaaaacttagagtcaaatcattaaaaagactggtattaacttttaacaaaattaccacaaattcaatagaagttgccagctaaaaactgagaaagtttagcttaagcacaattgagacaaagtcccaacacatttccatatgtttttcctttttttgttttcatatgaggttatagattctagctgtgacagttacaggcaaaacttctttgcagtgaatacctccacacaaagcctggttgagtaaaacaaaattattcccaaggcttatgatgggcctgtggccatggggattttttgacctgctaacaaggaattagccatgaataattgagaaattattaaatttatgagaaattgtcattgaattattaaattcaaattaaacatataattattaaaatggaaatgcaaataaaattgaggttcttaagttttttaaatcactgcaaatatataaaaaatgtttaaagtgcccatgcctctggactgtgagtccaagtctctatccatggcactatactacttctcatgttcagcaatttcttcttctttatgttttaaattacatgttccataaaaataagaaatcactgtgatacggtaattgattttttcattttaaatgcagctgtttgccacggaagccacatcagactggctcaacgccaacaatgtccctgccamcccagtggcatggccgtctcaagaaggacagaatcccagcctctcttccatcagaaagtaagaactaggcatactgttttctgaaataatttagagrattaactttgagaaccagtatatgaatatttcaccttacttgattgcaagtcttttaaaacaaatttaaaaatgaatacatttgtggatgattgtcaagtttcactctccatcactatggaatacataacgtcatgtgtacatggtgatatgaaacgtgtttcaaaatacttcttagtaaggatactttccttgacggaaacaagtgagagcatgaagaatgtaatgcagcactttatatttcatgtcaaacttatattgtgtatagataagtacatcgagtataagatgaccagctatatttcactaaggttgtgcataataaatcaatttgttgagcacttactacatacaggaacctatgttgagtactatgatgatgtcatccattggattacctaattggtcattccttgaccaggttttcatgccttagaccatgtcatcattagattttgtacgacattttatttcagcagattgtgtgaatcttcaggaataccattgcatcaacccttaaagatctatgtggcataagtacataggagataattctctgctgttttaagatagtgcagcctacagaatggctgtgccattctatgcaatatgttatttgttagcgttcttgagaaaccaacacataaattattatcactttaataaaataatggcattgtgttcaaaccttagcaggcctccaaggatgtaatagctccgtgtttggggcattgtaaaacaataattagcactactaaggaggcaatagagttaatgtgggagtgggaacatgggggtgaaagggcattcaatggtggagggatcacctctttttaaaaaataagtatctatcaaattaccaattcttaatgagtgaacagatagcattttaaagagaaaacaaacatctgcattccattagacttgcactagaattccttcaagaacacaatataatccctatataagtgtaatttaaacatctacttagcaatagaggagggcagatggcagtcaactcagcatggcattgacttgaatggctaagagagcaatttatgttagtattttataaactaactataaaatatgccttgttgtctataagtttttgtttrtttttccagattgattagagatggcagcattgacctagtgattaaccttcccaacaacaacactaaatttgtccatgataattatgtgattcggaggacagctgttgatagtggaatccctctcctcactaattttcaggtatagtcttttccttggatatagactggatgggagttttatttctgtgcctcccttaagagtgtaatcagtagatgcacatctctcttttcccctctttgtaactttcagaatagagaggaatttttaataatctaaaataatgatgctaacatggtaggtcatggcttaaatgggacagttggtgatcaagcaattgagataatcaaaggccatgaatggccatggctctctccttacaattatcctttgaataaaaagtgacagcatgacatggaataaagatacaaacttttatttcattgtttctaaatgaaagccaccatataaaagcaacaggttaatgatggtccagatgtagcacaagtgcttgttcaattcacagaaaatgattgcatgaggcatgttcagtttcacttggacatgacccatcgaatttatcacagggagaaacagagtggagactcattaactttctgcctatcatatttattttttatgcagaatcagttttaatccctatgggaggagaaataagcgtattcacagtgacatctgagatataaaagaaagtccccatggtgaggtctgagacatgggagaaagtctccattacataaaaaacttttatgccttttatcccatacccctttgaaaactggggrcagacacttgtgacttttgtcttcattcattaaaaattcacttttatctcatggagggtgctgattcctaccattatattttcaggtgaccaaactttttgctgaagctgtgcagaaatctcgcaaggtggactccaagagtcttttccactacaggcagtacagtgctggaaaagcagcatagagatgcagacaccccagccccattattaaatcaacctgagccacatgttatctaaaggaactgattcacaactttctcagagatgaatattgataactaaacttcatttcagtttactttgttatgccttaatattctgtgtcttttgcaattaaattgtcagtcacttcttcaaaaccttacagtccttcctaagttactcttcatgagatttcatccatttactaatactgtatttttggtggactaggcttgcctatgtgcttatgtgtagctttttactttttatggtgctgattaatggtgatcaaggtaggaaaagttgctgttctattttctgaactcyttctatactttaagatactctatttttaaaacactatctgcaaactcaggacactttaacagggcagaatactctaaaaacttgataaaatkaaatatagatttaatttatgaaccttccatcatgatgtttgtgtattgcttctttttggatcctcattctcacccatttggctaatccaggaatattgttatcccttcccattatattgaagttgagaaatgtgacagaggcatttagagtatggacttttcttttytttttctttttctttttttctttttgagatggagtcacactctccaggctggagtgcagtggcacaatctcggctcactgcaatttscgtctcccaagttcaagcgattctcctgctttagactatggatttctttaaggaatactggtttgcagttttgttttctggactatatcagcagatggtagacagtgtttatgtagatgtgttgttgtttttatcattggattttaacttggcccgagtgaaataatcagatttttgtcattcacactctcccccagttttggaataacttggaagtaaggttcattcccttaagacgatggattctgttgaactatggggtcccacactgcactattaattccacccactgtaagggcaaggacaccattccttctacatataagaaaaaagtctctccccaagggcagcctttgttacttttaaatattttctgttattacaagtgctctaattgtgaacttttaaataaaatactattaagaggtaatgcagttgaatctggttttattttatgttgctgtacaaaaatcagtttacttctatgataaaatagggttttgggccaggattgcattgcttatttattttttccatgcaaacccatatagggatgagaaaattaatgttaaaaataagttttagctgtcacatttttcattttttcttgtccctcccttgcttttaagtctcatcataacattatgtggttatatggctataaaccatctttgatctggatcctttctaatgtataactacaaccacaaactgattaaagattgccacaaatatatagtaaactttcaaacaaatgtcttgcataactcagaaaagtaacttaacccaatcagaggctgaccagcattgtctgatggaaatagtgccaatgagcacactgatgccatatccccaatttaccaccgaaactatggctttgtgaaggtcctaagataattatgctataacagcttttatttcttccttgttacctcacagtcaattgattaccactttgtatagctctagacgaatgcttaaagtaattcatcttctctccccctcacttccttgttcttcctgtggtcaagactttcattacttcttccctgtaatctttttttttttttttttttttttttgagacggagttttgctcttgtcacccaggctggagtgcagtggcgcgatctcagctcactgcaacctccatctcctgggttccagcgattctcctgcctcagcctcctgagtagctgagattacaggtgcccgccaacaagcctggctaatattttgtatttttagtagagacggggtttcgccatgttgggcaggctggtcccctataatcatataattatgtaatccctgatcactttgattcattcacctgaaaatatttaatgagtttcttccatgtttcatgtagaatatatcacaatctctcctactattattctagcatgtttctgttacatatcaccagcaccacaaccaccatcaccataataattaacattatggagtccatactatttttcaggcatttgtaagtactttacatgagttaacctagttaatccacaaaatatccctgtgagtaggtgctgttatctccatactataaataagaaaacttaggcataccaaagttaagtaacatgctcaaggtcacacgaaatggagtctcacttttctgtatcatattctggtgaaggtaggcatgtaaaaagaaatcatttctcacagtaaagaaaataatttgcctgcagagatcagggaagggcattttaaggagatggattcatgtgttgccttgaataagatcttgcagttgccaaggaagactagaaggtaaggacatttaggaaaatgacaatgacgttgttatgactggagctcagggtatgtgtggagggaaagggctagtagcagaagttgagactggactcttaatggtggatgtttaaactaggtagaagttttaaaactttttatttggaaataattttggatttaaattttaaaagtaaaaaaatccccagatctacctattggtaatattttacttcatttgctttattctactcttatcatctatttctctatctaaacacacttgacacacatacatattcacagaggaagataaaaattacatgttgactaaaagtgagcaggctgttagtgaccaatttagatatgtaactcaatgttttaaataaacaattgtttgctgaaactgtcaaaaactcaattagttaatcattgtattgtgagaatttaataaagggtcctaatttttatattaatgtgagccggctatttgtaagatatggtaaaatttgaagattaataataattaatttaacattgtgtctatataaactctgttttttgttgacaaaagggctttggaaaaccagaagacaggatagacctcatggtgctgaaaatggaattacattaatttttgttttggttgcctttctgttttccaacattccaaactttaaaaagacttaacaacagataaataacacatttaagatctttggttggaggagagaaatscaagaaagtagaaacatttgtgctcagatttggcaaggctttgtccttttggaacatatttattctttcatataaacatgttaacacatttttaaatgtccaaatctattatatatcacaagttyggacaacacagggtctatgtctgtagagctgaataacaaatctaagtagctttttccatactgagaattcaatggtgtgcaagaaggatgggctctattgaagagggagaaaaggagctcagccagcttgtgaaatgaagaggaataaagaatgatccatttatagatttaggattttawagctttggagaggtaagtataatattttaacttcacttctgtcaaactttcctcttaaacagaattcctattggaaacttaaaaacaactataacagtcatttatctcaacagctgcaggtacttgaacctcagcttccacagtgtccacagcctcttgaacaatgaaagtggaaattatcagagaaacaaaccatggctgaatgcagttgagtgctctgtaattacatgccagtgttgccatttggctgctggtgtagtctcctgtgggcacaggtgccataaatgctcacacacacccaatcaaatccacaaagacctttcattacatatcatttgagacacccttaacttaaaaaagactagctcaagtttagttctttccctttgttcttatatataaaaattccatttttcctaattaatattactgtgctatttcatgagaagctgttacaattggcgagtgtgaaggtaatgtggtaggaggaagaatgtctttcctccctgagtggctccctgggctctgtgaaaaattggtaataatcattcctacttcttttcttgtgcataacgtagggtgcaaaggtgccagaaagagaatttaagtacctacagctgttgagatcaatgcagctatggaaacaaagacttagcaagtcaaaattagcaccatttgtgtatgcttcttgttgcttaaagatcatttttgagtctttacaactttcattttataaaggacttacatccacaaagaaaaccattgattgttgaccaaaacaaacaaacaaaatagggttttccagcaggactaaaggtctactctctcctgaaacgaccagcctacctaattattttgctaaggtgttccctattagaatcacacacaccacagtgaggagcttttgttcagaagaagcaacaccagcagcctcacaaaaaagtgggaaagatgtgtatgtccccaaatgataattttgctcacaacactcagtattgttgggcagccatagtgaagacagacaaaatatgaccaacatttagaaaggagtgagaattcaacaagatcaaaatgtgttattaaaggacataaatcacttgaaaatgtgttttaataataaaggatacattctaatatccagggcccagacaactatgttttcctgtctgaaatttacaggcattcagtaatctctttagtgacctttcttctctctgcctatgcaaggcctcgaaggttgaaatgcggcaggatgttgaggactttgtcataaaagaaatatcctgctaagtgttttccataactcttcagaaatttcctcataggagactgcaaatgaaatgtatagggaataatataattagactgtaaaattcgctgaactccccattcaagaggaattacatgtggatcctttttaaaaaatgttttctaattaaactgaggacataatgttatattattttccaggttcaatacacttcctttcccactcataactaaaatatagagagagctggaggggaaaaatagtattattgtagttaaaaagtgagtaggagtttgtacagatttttctttcttttttttttttttttgctacggagttttgctctgtagcccaggctggagtgcgatcttggctcactgcaagctctgcctcccgggttcacgccattctcctgcctcagcctcccgagtagctgggactacaggggcccgccatcacacccggctaattttttttgtatttttagtagagacggggtttcaccgtgttagccagaatggtctcgatctcctgacctcgtgatccgcccgcctcagcctcccaaagtgctgggattacaggcgtgagccagcgcgctaggccctgtagagagtttaataactgtgaggcctaagcatttgatgtgaattaggctcacattttattcattgggttggaataagataaggcaacacggagttaactttctcaacattgaggaagcctccagggcaaaaaattatttgtgccaaatctatcattacgtgccttagaatcctgagcaaagccctgcttgcttcagaggtacctcactaactctagtgccctggttctgctgaaatctgtggatctgtggagccccagggacttcttaacgcaaatggatggtgcttggcagactgactcctcctggtatggtccctggcttatttaccttattggattttgctatgctaacctctggaaggctgatattctcaagaataaaagaaatgcaaaggttctttggttgttgtactcattgtactaatgttgatgtgatgaggtgggttttaatcaatggtggttttctttggtccattaaggttgtcactataaataattccacatcatttcagcatctctttacttcaacctgatacagctaagagacaatcatgactctctggtacgtaattcagatctatagaaggtaaggmcatatttattttattgactgttgtgttcccagagcttaaatatagttgatgttcaaaactattgaatcttcaatattttgatactaaaaaatgattgtagggagatgtgtttggtcctttcttttagttccaagttcttatctcctctcttggctgcagggatctcaaaccactgtttgtgttaagccttcagcctcagccttgccctgtaggtactcaagaaactagcacagtttatgtgcctttatgaaggaaacactgataaacattaattgttccaaatatttaatctatttgatgctatgaatagatctgttatcttcaatcttagttattgttccagtcatttaatgaaggcttgtatatatctccatgcccatagtattaagtatgtacttatctctaaaaatgtattcatattttcacttattctttctccattatggtttgctcatgaccacttactgttccttttacttcttaatttcaatttatagaatatttcatatagtatattcatttaaatctatattttgatagaaaatagacaatttaggagtgtgtcatttcatgtatatctctatcacttttctaagcttctttgtgtcttaaccttcattcattaagttcacaaatatttactgagtagctttaataaaatacaacatttttagactttcaaagcttatagcctagtgatgaacagagagagaaaaaacctattacaatagagcttggttttaaggcattttagagattgaaagggaaatttagggggctatattaacaaatgacggggcagatcaaggaaggcatgcttccatgagaaagtaacatctaagctgaaacccaaaggataaataaaaatttgccaggccaagaagtgtagatgtgttctatacaatgacaacaatgtggatgaagacccaaggcaagaaaaacatcctgtgtttgaagaattgaaagaagctgagcataactggagcattgtgcatacagggttgatgatgagggtggggaaatcatagagccttataaaccatgttaaggagtttgaacactttgctaaggataagaagaagctgctgaagtgttttaagttagaaggtgacaatcacttttgcattttgggaaaattcaatttgactacagaatgaagaacgaattaaataaactaggattggaggcagagagactagttaggaagccattataatgatacaggaggaagaaagagaaggagggagagaaagagaggagaggatagag

SEQ ID NO: 93608 - DNA, 211964 bp, Homo sapiens
  misc_feature (1)...(211964): n = A,T,C or G
atcctttcattgtcatcgatatgctgcccagccacataaatgtccggctgagttcctgactcacatatctaatacctccttgactctacttggatattgaattcccatctcaaagttaacttatcctaaaatggaactattgatttcccttcacccaccccgataccacctactaatgcaatactcacccattgtcctcagctcagtaaatggcaccacctccattcacctgaatactcaggctaaaaatttagcattcctttcccttcctcttgtctcaagtattatcctatatatcctcaatccaactacatctcttcatcttgacagcttcctccttattccccatcactaggacttcactcagcgacttctgcaaaggtggcccacgtcacccttgtccttcttcatgccattcctctatctaggagctgagtgatgcgatcgtatcattcctttgctcaaagcctcccagatgacctctcttgtcacttggaggaatccaaattctttcccttggcctaccctgaccttggttagctctctatctcttcccatgttccttcttgctcagttggtttcagccagactggcttatttgcaggaccttgaacacacccagcttctccagcctcagggctttgcccttgctattttctctctctgacattctctgccctttgatttgatttgtgtcctccttcattttgttcaaatttctgttgcaatgtcaccaccttagtgaggtattgcctaagcaccttatctaagccagcaccccttcctgtccccggcaccctccatctcagttcctgtcgctttacctgcttcacttttcttcctacttcacatcactacctgaaataaaattatgtatatatgtgttttattttcttggtttattctgtctcctctgtactgtaagctccataaggacactgttttgttcaacaagaataagctccataagggtaggacactattttgttcaacaagaataatatctagcacactgtagatactaaataagtatgactttaataataataaacattattatggaagtaaaatataccaaatgaatgctgaaaataaagcctaattagtaacaagaatttctgcatagcttgaaaacaatactcagtttgaaggttttatttgacttactgcctttctataggaatctttgacattcaaggatattagtgactcatattaagtttgaaatgggtaatagttgtcattacaacagggactattactcagcccttattatagatgctttgcatggattagcttatttaattctcaaaacaactctatggggtatctatcacctcaatttatagatagggtgtggtggttttaaaccatgtccataaattctttgatagtcctccctttaaaaggtggattctaatttgcttccttttgagtatgagcttggcttagtggttcagttctaaagaatagaataagtgactatgtttggtgtctaagatgagatattcaaaggcattgtgacttcctccttgctctctctctcggatcacccaatgtgggtcttggtttttccatcttcaaagtgaggtgtgtggatcagataacatctccagttatccaacctgacatgtcgtaaatcatctgtgcatcaaatagtcttcttagcatggactataacatcagattcgttagctgctctgtgctagaaagagttgaagctttgacagttttgcttcattttgttggatttggggggccaagatcagaatgacatgagaacactcaagcaactttatggagagacccatgtggctaggagcttaggcctcctgccaacagccatatgagggtgccatcttggaggtggattctccagcccagccaacccttcaggtcaatgcagtcctagcaagcattttgactgcaatctcacaagagatcctgagccagaaccacccccagttaagttgctgtcaaatccacaacccacacaaactgtgaaattagaaaaaccttttgtttaaaaccattaagttttggggataattcatcatgcagtaataaataacacatacatttggaaatggaagggtagagaggttaaacaaagaggctgacaccagatatctagtagtgatgatgcaagaattggaacccaggccatctgcctctggagcccacatgttcagccaccacaggatacaggaggtcaagattatgtctcaagtaataccggaaggagaatattgccacatttcaatgccactgttaaggcagtggatacgatctttccttggacattacacttgctggtcttgctctattatattaaaaaggccgtgttccaggcagctactgcccttgcttctaagttccctttctgtctcagatttgttttggcgtaaacacctaccgtttcagtattccttccaccattcctttaggcttctgctcagacccgattcccatcatgtaattctggtaaaactgccaattgtcatattgttcccatagataggagtatgacttaagcctggccaatcatagtgtcctatcagttattgactatggtgattggaccagtaagacagcatatgagctacattggcccaatagagtccttccctgggatttagaaatactgtataaggcataagcccagrtgagtggccaggtgccatattctcagctgcatggaagaagcctgtcttcagcaggaaagataccagcatgcagaaagaaggagagagtaagagaggctattttgtatcctttcataccttgaatccggccaatcctgagagcaattccatccttttctagtctatatgagtcaggaaatactctgttgttttaagttagagctttctatcagttcatcttgagttacgaccaatatgaatagtctaccacagtttgtggaagatggcagctatcttccattctccatgagcaacactagttctctatcatctggagaacctagagcctcactgttaattggttgggctgaacttcctacagtgggtgaagacccttccccccttcatccctcaggaagcacctgccttttctggaagctagccatggtctgggggtaagctcaaaataaaattgtgttatgacggatgggtagctcagtcactcagtttaaaaccttagtcatctctgtatcctttccttagtcgcggcccctccccaagtcctcaatgcacacacatcctgttagtcatcaagtcctgttgatctgaatcgaatgcttcatggaagtaggtggagtaaccataatgaaagttagcctggttcttccttctgaacatctcgcaaatcccatttttcttcttcatttccactgctaacaccagggaccattgcaattggtctccctgcccctaacctcaaaccctgcagttgatttcccatatttcttctagaatttgttttctacagtgcacttttgatagtcacatgcttttgattgattcaaaagtcttcatcagtttctccactgttgacctactaaatagcaaacttcttagcttggctttcaagactatctccgaactgacccacattcaccatccagggtcctgtgacctccataaaccagtcctccaatcttctcatacccttcccatagcagaattgcttaccatctactctgacttcttctcctcacggaaaacactgtccttccttttctatgagtcttcaagatccatttcagtcctaaaacatttcctgagcatggtcatccacactaagtatcctcttctgtgaactctgtaaacaactgttgtctagactagggtttttcaaactgcactcacattctcagggagtacttggccagtacaagtcaagcttttggtgtttttgtaaaactactgattatatattcaaatttggcttagtatattatttccaagcccagtttccttcttgtcttcttccaaattacatcctcatgctatggtggtgcatttattcgtgagtacaaattaagactcattaaaatttgtttagctacctacagatagagaactgcttattattactgttattatttaaaaccatgaccaccgggaaaatatcaatatgaagagagaagttctataacaatttcaacagtttctaagccaaatatgctttctgatttattaattccttatcctcaccattttttccttatcttcatgcgggattttaactagaaattggtataaaatttgttatattggcatagttcgaaaaacaatcactgtgtacctactctctctcaggaacagtggaagatgcttgcgatacaaagataaacaagcccctatacgaagaacaagaatgttccagatggattcaatgtggaaggacattctaggcagggggaacagcaaatgcaaatccatgtgtcctggaatgagccagacatgcttcaggttccatggagttttttttttttttttttttttttggattaaaaaatttggtgacttttcaaagtttgacaacctcaggattaaacaatttatcgagcccctctgccatctcactctccatgagggcagtccaggttgagactcagatacaaatcacctttattgagttctgctgggatggacaggtcacttcatgtatacgtagatcctctccttaattctatttaaatcacttaggtgactatcaccatctcccatcagggttcggtgacctgcccacagcctcccaagtagaaaatgatccagggagcatgtgagttaatgatacatcacatctggagccaggcaggcatttcatgggtggggatgaagatcttccctccaatttcagaagtctgaccttgcaggttctgaagtaactatatacataaatatttataaggagaaccctttaagcagaggggtgaccatttatccatgagagatggcttaggaacggatttgggttttggagagcttctctagctcctccagctccgcagcctgtcacacgcaggatgaccttttagaacaactgagtgctccattacactcctcacttgcggattcaaactgtctctgggcagggtcccagttttgcctgtccagggacactgtgcacttgggttgactttggtaaatgtttgagtaagggatgagtgaataaattcggggagaggggttgttgagggaaggccacccctggctctaaagactttccagggtttatggggtggccacgcctgtcctggatccccatggtgcctctggatgggccatttcatccttcctccctgtggcctccacatcttacaacccagcctggagggaggggccgcgcagccccgaggggccaggtctcccaggcggcgtccactcccctcgagggtggaggaggtaggtggggaccccgggccggcggggctcggctggggccccttccctgaggtctgcagccgcagccctctacctggctccccggccgccccttcgcggccccagatcgggcgcacccggcgggcacctggcccgccgccccccgggggccccgccagctgctcccgaagccggcccggggtggcggggcgggcccgagcgctagtcgactctgggaccggtcccccggggcgcggccgggcagcagcccccgcctccccgccccgggggccgggccgggctcccggggggcggggactcgcccagtggcagcagcgtccgggccggcggcgggcgccgggcggcttcctgcaggcggcgccggggcgagccgttgccggctgcagccaccgccgccgggtcgccgggtcgcgggggccgcggcgctcgggccgcgtccgtgcctcccgggcgcgctgcgcggccgtcgctgctgcccgcgctcgtgccgccgccgccgccgccgccgctgctgccggttacgccagccccgccgccgcccgctctgattctgcgcataggcagcccccaagcctgtcattctgcaaaaacacagtttactcaacacaccacacacactcgcacacacacgcgcgcacacacacgcgcacaccggaccccgcgcgcacacgcacggagggcgcgagcgagcagacgcgcacaccggcgagccaagttccgcagcctggcatggcttctggggacctttacgaggtacggggacgcgggggcgcgggccggccccagtcagcgggcggcggcgggcggcggcggcgggcggcggggaccgggccggggccggggccgggcgcaatccggagttgccgagcccgcggcggcggcggcggcggccggagggtggcgggggccgggcgcgcctcccnnnnnnnnnnnnnnnnnnnnnnnnnnnnnnnnnnnnnnnnnnnnnnnnnnnnnnnnnnnnnnnnnnnnnnnnnnnnnnnnnnnnnnnnnnnnnnnnnnnnnnnnnnnnnnnnnnnnnnnnnnnnnnnnnnnnnnnnnnnnnnnnnnnnnnnnnnnnnnnnnnnnnnnnnnnnnnnnnnnnnnnnnnnnnnnnnnnnnnnnnnnnnnnnnnnnnnnnnnnnnnnnnnnnnnnnnnnnnnnnnnnnnnnnnnnnnnnnnnnnnnnnnnnnnnnnnnnnnnnnnnnnnnnnnnnnnnnnnnnnnnnnnnnnnnnnnnnnnnnnnnnnnnnnnnnnnnnnnnnnnnnnnnnnnnnnnnnnnnnnnnnnnnnnnnnnnnnnnnnnnnnnnnnnnnnnnnnnnnnnnnnnnnnnnnnnnnnnnnnnnnnnnnnnnnnnnnnnnnnnnnnnnnnnnnnnnnnnnnnnnnnnnnnnnnnnnnnnnnnnnnnnnnnnnnnnnnnnnnnnnnnnnnnnnnnnnnnnnnnnnnnnnnnnnnnnnnnnnnnnnnnnnnnnnnnnnnnnnnnnnnnnnnnnnnnnnnnnnnnnnnnnnnnnnnnnnnnnnnnnnnnnnnnnnnnnnnnnnnnnnnnnnnagaacgtggaagtctgaggtgttggggacataggacacagatgccagcccagcgcccagtactctcgtcaccctcagtggatacctggctccaggtcctaatgagtagtggccagcgttggatactctcatgtcttcccaaaagtggcgaaggaagacattagtctggcatctttcaaacaatggaggaacacccatggtctttggggagcaagggcttaggaacacaactgttactgctttgggttttccacaagtggacaacacaaggaacagccagccaccactccccagagggaatggcctcagaggtgttggccgccaagaccaggttcaggataaagaagttaagagaccagccatcttcaaccagagggccttctgggcctccgtgaaaccagccgcatgggttagcctggacctgcacttcccggaacataaattggttaacgccatctggttcttaaggctttggggctccattgagataagcacccagaaggggtagaattagccttttgcataagacattgtagggtgatccacccacgacagactgcagggggtgattcctaagaagctctttcctctaggccctcgtgggcagttgaagctttttcaggtggtgggtttgctgactggcgttagagaagaagaatggagaaaggagcacaggtctcctgtgtgaccatgttcttgtgaatgattctggagttggtgaggcccaggcctggactgccggccagcaggttcaggtggggtgggtgggagaccttagagctccttgaaagaatggtgtatgttgccctcttcactaccctgtggccgtcctcatctctatgctaagagacaaggtgaagttggatagagatcttgtgaagaacttcggcaaatgtggccaatggatcacccaagcgccttggtctgtttcaagatggtggaacaatttctgaaattgaaaattgaagcacagtaaaatagaaggtttgattgagtttccttatgtgtaaccagtactgtggggacattggctaaaagtagatattgtttaggggtgaaagtgatctggttggaatcatggttttctacgaattgaggttgagtcagcttagagctgttgaccttgcctgagtgaaaagttgtgtcttgaaggtgttaagaggatgtactaggagtcatcagtatttccccatttaaagtttagaacttatgaaccttctggggataatttcttgtttaatgttcatctgcaactgccctccttaacgctggtaattgtcgttgccagattagtctgttaagaggagagttttcacggtggccttggaactatcttagtatctcaagagtttttatagaatttcagttaaggaggacaataataataattacttctgtgatagtaggtaattgtactagatggaaaatggctttcccatggctgattatttgcatagtcattactaaaagggctaaattgcattacgagaatataacgaatgtcaacatttttatagcctgtgtctacattacataacatatactgagaaatttaatttattgttcaaatttagctttaagaacaattaagaagtgctaagtgtacattagcatatatatttctgactgtaaagttgttatgtgggtaaaaagtagcatattgatttaagaaaaatattggaatatccagtgtatgttgactggccttgaaaggaaaaaaagaaaacagatttcattctaaattatgagacctgtttattactttcattaaatattatactaaagtgtacataaaatggcttctcgcaatctctactcaagaaaccacgtttttagtgggccaagagttcttacgtttgtaattgatatatttcacctgtgtgtctgctgacattatctttgagcctttatggtgaagtgtgatttggattgtagagattcttcatcttttctttggcatttcagacaattaagttgtaaagagtgaacctccataaagcagttgttaggaataggtgctgatttttaaagacaccagaaaacgaaaactttgtttatgtaatagcactcttcaatcatagtgaagaaataagaaatcaagctcaggttccaaaatcttggatcttgatagatagttctggtttgtttctcctgtagtggagttctcatcatcttctggtgcattgtagccatcacttataggaaggtgattttaaattttgggttatgtcttagagtcaggtatctgtctggatcgaaagtgaaatttcttagccagatgccctggtctatattcggctaaacataggggccatggagtggcagcctgtgagccaggtctaggctgcatacgcattttgmcttggctcaatggtagataagaaaaacgatttgaacacttttagatggagcatatgatctctagcttgtccctgtccccttgctccctattaccaggcacccattcttcttaaatcattcactgggctccagtagactttagagtttgcaacctgattctagtcaatcttttgctaagatgtttgggtgtcaggaagaaataatcagtgggataggctctcagttttcttgtctctctctgggtttctacctgcttgtacgttcaattacttgttgactgaatcagtgagcagaagactggtttaagtatataaagtacccttgtgtgaccttygttgtccttctgttgagtgttaccctctattgtctttttctttcccaagctcatggcctcttggtggtggtaaaaccgtgtgtaggggtggctcagttctctctctgtagggaagtgtccacaactatccatttttttttggatcttttcggtttgtggttggttgaatccacagatgtggaacccatggatatggagggctgactctatctgcacctggcattctgcaaaatcacgcaccactaagaataacagagtttatgggaaaaacaggattgaggcagaccgctaaagagctgtggaactttttttgcaagttggtctagcctttgccgtgtccacattgagctttgcttccctcttgtctctgtggattgcacagggcatttgcttctaagagagacgattttattgaaattaagtctgatccagggtgtagccttcttcgtttatctgtataaggagaaatgttttcatagctgttcttgcagttttgccatgaggtcaacatagtggaaagcatagtggttcttgaagctagaaaatcagccactattcatgttaaagaaaggcacttgagtgcatttccagctttgttctgaggtcttcacacattgttaagtctttctctttccctgtgagagtgcttaccttgattgctgcaaagtataaacaagctaggaaaaactgcatatgaacccacacagacgtcattcctctatttacgaatcacacctgaggtcattcctgtcaaagaaatacatgtactagcagaactgatggtctgtggtacagcttcttgaatctctgtaccagtatttgaagaggcagctatcttcagagaaaatgttatcagttggattggattgattcttgggcacgtagaagacacctgatgaatatggaatgagtatatgattctcccacctcttgaaagttattttaaattattccctctgggcaggcatcagcttattttcaagtaggcttttatgtcaggtcattccttagtgcatrwgataatttcttcaggggcttaagctgtcctagtaaggagttgatacggctccttgcagcctggccaattgctaagaagtggttcaggcctggtgattattaaagatctttgtattggaggcatgcatttagattaccaagatttggatccttctgtttctctcagatggtgaaaagaagtgtgggtgtggttgaattcatagcaccatcattcatttgttatttcatatttatagaccaccaaatatatgagaggcacttggggaacaatgatgatcacgtcctccaggagcccagtgggagatatagttaagaaaacaagtattttacggtacagtggggaagtgttaatagggatgatggtgttctctaggagttgcttgagaatattatcttttctgtttttgaaagcatctctaaaaaatgaaagcaaaaaagaaataatatctaagagaactattgttatatatttagcatgtaattgatgttcaataaatactaatgtgatatctgaattaattaaaatgttagcttttgggggtagttacaaaagtaggactgggtttgttttctacacatgtttatgtaatttaaaaaaaccaaatcgggatactgggtacatattctttgtaacctattttattttcacttaaatatctatatatctatatatatctatatatagataatgtaggtaagcattttctcaaatgctaaaatattattttgtgttatgagttttaaatgacagtttaattttcccttgaatgtaccatgttttctataactaatcccctgttatcggacatctagatagtttccatttgtaaaccattataaatattgatgttatgaacatccataaacacaattatgtatttgtatgcatatcttactagtttcttcagcataaacaatttcatatacagtgaaattgctgtataaagttggccgttggacaatacttggattaggggcactgatcccctttgatgttgaaaattcacatataacttttgacttcccagaaacttaactactagtagcatactgttgactggaagtcttactgataacataaacagttgatgaacatatatttgtatgttatatgtagtatatactctattcttacaataaagtaagctaaagtggagaaaattttattaagaaaaatcataaggaatagaaaatatattttctgttcattaagtgaagtagataatcataaaagtcttccatcttcatggcattcccattgtgtagactgaggaggaggaggaggaaggggaggggttgtccttgtggtctcagggatagcagaagcagaaggaaatctgcctataaatgacctgcacaggccgggcactgtggctcatgcctgtaatcccagcactgtgggaggccaaggcaggtggatagcttgagcccaggaattctagaccagcctgggtgacatggagaaaccccatctctactaaaagaatacagaaaattattgggcatgatggtatgtgtttgtagttccagctactcaggaggctgaggttgggggattgcttgagtctggaaggcagaggttgcagttagctgagatcacaccactgcactccagcctgggtgacagagtgaggctctgtctcaaaagcaaaaaacaaaaaacaaacaaacaacaacaacaacaaaacaaaaaagcaagacaaacccctgcacaattcaaactcttttgttcaagggtcaactgtagtttgatgaatggtaacgtttttaatgctgttgatacatattcccagattgtccttcaaagttaacagtggattagattagaggaagaatagaagtagggcagccagttaatgtgctgtttcaataattgaaacaagatgatggtggcttgaactaagggagtggtaatggcgatggagtggaatggatgcaattgaaaggttgaaaaagaatcaacatttggtatatcagtcaagcttatgtttggtggcatataatggaaaatgtacaataacagtggtttaaaacaggtttattttacatgaaataaactttggagttaggcagtaccagggttgattgatatgatatgttctatgacattctgagagtaccaggtatgctggaaaaaaaaaggtaaggatagaagggtgaaagttgagtattnnnnnnnnnnnnnnnnnnnnnnnnnnnnnnnnnnnnnnnnnnnnnnnnnnnnnnnnnnnnnnnnnnnnnnnnnnnnnnnnnnnnnnnnnnnnnnnnnnnnnnnnnnnnnnnnnnnnnnnnnnnnnnnnnnnnnnnnnnnnnnnnnnnnnnnnnnnnnnnnnnnnnnnnnnnnnnnnnnnnnnnnnnnnnnnnnnnnnnnnnntgaagtgggagaatggattagtcatctccacttttctagttctatacactctctgcccctttggatgacttggataacaaaagattgtggtgtagactttggatctacatgtttagaagaggtgattttccataagccctgctgacatataacagatgtgtttcatgtcttcagtaattttaattggagaaaaaagtagaacatacgtaatggagtcatacaaaaattttgttcattaagaatttgttgcagccgcatttagtgaggagggctaaggtggaaagaagatgatggtgctattgataagttatgtgatggtcagttttatgtgtgaatttggctggctccagtctccagttactcagtcaaaatctaggtgttgctgtgaaggtcttttgtagatttgattacagttcataatcagttgacttaataagggagattatcctaaataatcttcatggtcctgactcaatcagttgaaaggcctcaaaactagaactgaggcttccctgaagagctagaaattccagatgtggacagcagctttagcctgggcccaagtattcccacttgctcttcctgatgatctagcctatggattttggacttgactagccagccccacaactatgtaagataattccttgcactaaatctcttaatgtatatattctagtgattctgcttctctggttgaatcctgactgatgcagttagggttgttgtccacaactccatcatttggtaatagtgtatggctagacaaagcttttaatcttttgaacttctataaaatgagatctcttctatttttgaaaactcttcttctgtttcagtctattacttcttcaaataaatgccttgatttcagtagctcacatcatctcacacatgtatgcatgtgtaatgaggggcaagcgtagagctctgggtcttagactagaactggtaactctaagaactcaaccaggcctgggtgttctgtcacactggagtgctcaggatggcaggcatggtggtgctggaccttgaggagaggcctatcctgggcctgaaatttatccttgtctggagtcagcccctggctctggtaggttggtgaatggtgggggttgtggagtagcacttcttggtcctgatccaccccttcttgtcccttccctcagttcattgtcatgcttctgtgttgtgcagttagccttagccagcgagtagaagctgctacctccaaaggtcacaccactccagtgaaaggtccattcattgaccaggactttataaagcgatgggttcctgagaaggcttgcagggccatttgtttattttatgtcccagtttctcttataaaggccaccgctgccaaattattcccacttgactccagtcattccatctctcccagaattttcatgttgatcaatcaccacattgatttataagtgacttacagaagtttcaacatggagacttgagggatacgtttgtgggactgggaccctgggctacacattgccatactacagattcctctattgagaggccactgccctcccctcaaattcttgatcagggaacttttctccttgattttcattaccttgtcttctagtccagtgttcttaaaattatgtcctaaggggccttactaacaagccatgggaacttatacaaatgccggatttgaattttatttgaaagtagtcatttgtttaatgatccatcagtcaaatttttattttatgtcagctgtggacctagaactatggtggtactagggctacagccatgaatgcctttaaaactatcactgaggctggatgcggtggctcatgcctatactcccagcactttgggaggccaagatgggcggatcacctgaggtcgggagttcgagaccagcctgaccaacatggagaaactctgtctctactaaaaacacaaaattagccgggtgtgtggtggcacatgcctgtaatcccagctgctcaggaggctgaggcaggagaatcgcttgaacctgggaggtggaggttgcagtgagccgagatcacgccattgcactccagcctgggcaacaagagcagaactctgtcccaaaaaaaaaaaaaaaaaaaaaaaaaaaaaatcactgggaatgtaataattaaaaaactcaacaatcgtatatggtttaatataccatatttttaacacattgaagttttccatatgttaaaaggtgcagccatgtcagttccttttttggtgagcatacctcagaatatggctttttccgctatttttgacatatattggaacttctggtaaatgcactatttcagcaacagtggttcttcagtgttcttagaaaaattcaggcctatccatgtctcctcacataaaattaaatgagcgaatacacttttacagcacagtcaccccagtcaaataccacttgaggttgaggaggctggtgaatgttctagacatggtgtaataatcagtatgtgataacagtggaatgtgtaacactttgtatcattatattgtattaaaggtagtgttgcggtttattgagaagactggctccttctgctctgactcaaatttgagagaaggaatggggacaatattgtgtgttagaggtttttctacatgaaacagacatttccttctctgatttcaaacttcaggatcaattagaatgaagaatatcctgagattccaagacaagatggtcaaaccacacccgataccagttataattactttcatagcaaatcaaagattgtgtttttatttacaaacaaccaaatgcagaaagaaattgactgccgagactgttacgggaaggcagctgacatctttgggcctcattaaaaaattttgctattagtgaaaacaggctttattattctcggaagttaatgtagtgataaggaagtatcataagctaaacttacaaaagaaatctacactgagaaattattttatgtatcaatttttatgtgttagggatcctggaaacatattgttagggaaatggttctattgctgagctccactgtgttctgctaaaccctaagctcggtgagggcagggaccatgtctgtattatccaaggttgtattccaagcttgtggcactttgctggacctgtagcttttcagtaaatattcattgaatgaatggttgaaaatgtttgaaacctatgcttccaggccaccttagccttcctgcaatgaacttcattgagtgcttcctgtatggcattagtccctctgttttctaagaactttctttcagattgtccttgaaattcaggtttccattttgccttccactagaccttgtatagatttattaggtaacaaaagtgccttaaagcaaattgaaacatttaagccattgtccctcatcacaggttaggactggattgagagtggccattctctgttaaggtgtgcatgtgatagaggccctttcacactgagcacgcacaaagaccgccctgtggtttgcatttgcttctgccatttgcacctttgcctttctactctagcctcagtggctggcctagtttgagatatactgtccgttttagattgggttgcttggagaaggactctggaatggagaactgtgtccagagggtttgctgaagagtgctgttgggagacacacttgtaaggaaatgtggaaagcaggctaggacagatggcgaagctgctctgcattgaggttacaactaagatctcagctgattctatgggcagctctggagctgtaatggcccttcagaaatgtcccatattgaggcaagggaactgggcccttatatcccagcgtcggccagtcattgctggtaggctgttccatgggaaggggtatagacttgggcggagtagttacctgtggcagagggcagttccctttgagggacacatctgtgagcttttggcagcacagcagcgatattcctagcagctgtggggatgggcacatcgaccctgaaaaggagatactcctgggtggatacgtgatactcctgggtggagtatcacgttatccatgacaccatcccttcttgccctttactggtaggtgagtctytgtactctggatccccagaacacacctgtcaccttggttgtacttttggttgttggtgcttcccttgaaaacatcacttgtcatttgcagcttcttgttgcagcctgggtgtgagaactgatagactggccatgtgttaggagcatgcttatggtttctttgactccccattgcaacacacagcacaggatcatgtataggtaaatatttcagaggctgtgacttcttttgggtcgccacctcttgttcttgaaatattttcctagaatggccctccactctcagttgcctttgtgtcctcatctcctgctgcctgttccttaaacattgcagtttctcatggttttgtcccagggttcttctgttctttcattgtactatagtgattgtatggatgattgccaagtcttggacatttgcctggatttttctcctgagctctggaactatctatctaacttcacttgggctctttaaactcaaaatatcaaaagttgaagttaggatcttccttctggattcctagcctcagtagcacccccatccacctgttcccaaggtagaagtgcagcctcctttgttttgcgcagatgccatgtgtgttctattgaatcagcatcctgcatatttcttgactccatcctttttccttaatactctcaccactttaattcaggagaaaactgccattgcttgggtctttctagtacctctcagctgatrtttctgcatctagcccttcctacttccatttttctctggactatactcatgagtctttcaacaatgtccattttattatgtctctttcctgattaaatgcctttaagtgatatataagctttttgtggcttgactccttctcacctcctcctatttctctggttacagcatgtattcaatccagagaaatctgttttcagttccttgaatgttctgtgctctctcctttaatcatatccttccaaatgactgggacactgtccgttaccaatccttgtcacatttttgcttgtttaattcctactcacttcagatctcagcttatgtgttattcttggcaagcttcctcagcttatcaggagatttccaccctttctttgggctcctgtggaacccttttcttctcttgttatagcactcagctgaatatgtagtatcttattttctaaatctcccacttacattgtaagctttgtgagggcagtgattgtctgtcttgtttcatctgtagcacctagcacagtgcaagactcaaaaaccaatctgtttaatgaaataattaatttattcaatctttcatttatatgaaagttggaatcrtctcagatatctctatagtctctttggtctgatgcttaaagccattttcagtctctcagttttccttaattcttgaatgtgtttcctatgtctttatggatcaaataatgggacattgttttcctataagccaaactcaccgaaagcatccatctttgtgttatcaataaatgtaatcttgtatttagaggattgctgaatcttggaaatggcagaactcttggatgttggatgagagttttgaagtcgtctgtttagtctttcactgagatctctaacaggcgatgaaaagtgagggcctcatatactctgttgaaggagacaaatgcttgagatgctaaaactggtgatttgccttcactgaaatctaagtgtgttggacatgagacagagactgtatcttcccggactgttctggagagtctccttgaaaatcttgacatcattatcgctttcttatgcaagatttagcagaggacggcagggaggctcagcacagccttgagtcttgtttagctctcctggtgatcaagagtggagctgagacctacccccctgactgactgatattatagggagcaccttatatctaaacttttcctagaaatccaaactcgtctgtgaactgttggaagtcagatcaagtaatagaatccaaagcacctgtaactttaagaaggaaggataaaatttgaatgtcttgatatttacattgctaatttgcttgtctgtattgccacctgaaaccacattcactttgaggaatatggtatatatgagagctgtgaagcagactttggtgagatcttgtatttaatagaaagaggaagggagccacacaatagctgcctttaggatgcaaaaatatatggactttcttcaaactgtaaaccctttttttctcttaattgctgtatattttggtgttgtgtagacaaaggttgtttttgcaccttgattatcacacatggcagagatggcaaagtctttgctatcttaggtatttctttattttattaccacccccttggcatttgtgtagccacgtctatggtattggctttttgggaagctggtgtaagtcctgttaggttattgacttaatgaattgctgtgtaatctcttggagtaacctaatctctgatcctaggtgttgcataaaaaggttgttgaaatgatacttcttatttttcttgaatatgcttcataataattgtaaaaaacagttataatagcgtttgctattattttattttgttttagattttggggtacatgtgctagtttgttacataagtattacatgtatagtggtgggggctgcgtttctagtgtagccatcatattgtacccagtaggtaatttttcaaccctcatccccctcacatcttctttccttttggagtccccagtgtctgttttcaccacctttatgtccatgtgtaccctttgtttatgtctcatctacaagtgagaacatacagtatttgattttctgcttctttattagttcatttaggataatggccttcagctctatccatgttgctgcaaaagatatgatttcattctttttttaatggctgcatgatattccatggacattttctttatccagtcaacaactggtagacacttaaattggtttcatgactttgctcttgtaatagtgcagtgatgaacatagaagtgcaggtgtctttttttttttgctggagtctcactctgttgcccaggctggagtgcagtggtgtgatcttggctcactgcaacctcagcctcccaggttcaaatgattcttctgcctcagcctcctgagtagctgggattacaggtgcccaccaccatgcccagctaatttttgtatttttagtagagatggggtttcaccatgtcggccaggctggtcttgaactcctgacctcgtgatccaccccctcggccttccaaagtgctgggattacaggcgtgagccaccgcacctggccccgcaggtgtctctttaatataatgatttcttttcctttgggtagatacccagtaatgggattgctgggttgaacagtagttctatttttagctgtttgagatacctctatactgttttccatagaggttgaactaatttacattcccagcaatagtgtatgagtgttcccttttctccacaaccaagccaactctgttgtttttttttgactttttaataaaagccattctgactggtttaagatgatatctcactgtgattttaatttgaattctctgatgattagtgatgttgagcattttttaatatatatttttggccacttgtatgtcttcttttgagagatgtctggtcatgtcctttgcccagtttttaatggttgaaaacaaacaaacaaaacagtcatagttgtttgtttttttcttgttgagttgagttctttgtagattctgggtattagtcctttratgagggcataataaaaacagtaataatagcatttaatatgtgccagacactatggtaaattctccacgtgtatggtatcatgtaatcctttctatgagatgggtactagaattatctccatcttatgattcataaattaattcacagacaccagacggttgaaccaacatttaagccagtcatcctaggtgcctctaatcatctcttgataaattataaaatgcctatgcttttccttctaaattctgtccttttgttggtagatgatacttctatcatagcactgtcttgcacctgtgctttccacagaatcccaggtataggtcaatgagtgttacactaagaacaagaaaaggaaaaagaaaatcttcctggttttccatgcttatggcacaaaaacaggtgtctgttgtattgttcaagagagggattgcacagggcagctttggtgtgtaaaggagttcttgtgaatgagttaatcaggatgggaaagcatctctttgaatctgaatggatgtttgtcaatactactttaagccatgctgactcacaaaaagtgatgactgcacatcttagtaattgtgatggtggaaaccatttaagtcttggtcttcttcgtgttggttggcttttactcaactttagcagtgagaagactgattttgagagcagttggtaacatttcttggtcagtctaattttgtccttttagcatatttatgagcctcagtgcatttttttcatgtgctttttttcctttttctttcatttggcatggtgcttgcattccttcacggttggaattggcaggataatgtttctgaaacttttcctttactaccatgtactgtacttaagttttgtacctggtggactgtgatgccttggttatttgggtttgtgctcaggatgcctagacttcctatgggtaaggcagataatcccagattctagcaaatatgtctgcatgcttggcattaaaaaatattaccagagcatgcacattactaatctttactaaaattaagataatatgttcaagtaagtaaaaccatttacttcaatacataaagaaatgcaaaggactagaaagagatatataaaactatttttcaccacctgatgacaggcagtaaaacactgatggtaatttaccatgatagttttctgtgaggaactcaamgggaatagagaggaaaactgagatatgagataatacacacacacagaggagagagaggagagagaggagagagagaacgaacatattttatatctgtcctaggtgtttcacattgaattttctaggtgacctgacacttctgttgattttaaccaagagaggtcagaatgtcttagatgctgtcaagtctaatttctcacccagtgtatgtatccttatgatcacccagtacctcctaggaaacttcctaaggaagggagtgctttgctttgaagggcagtctcttccattttggcatggaagtactggctgttggaagtgctgtagtataaattgaaccaaagtcttcttgtgtagtttctacctgaggaacaatgaattctgtccccaagacctctcagttccatttcctggctggcttcatttcccctgctgccattcaaggcactcatttctttcttgtggaagaaacaatagtctcttaactagactcccggcatatcctctttgtcatctattcttgtaatgtatttaaagcgactgtttggaaaggtaattctgagcatgtcactttcttcttcttcgtcttttttttttaaattgtactttaggttctgggttacatgtgcagaatatgcagttttgttacataggtatgcacgtgccatggtggtttgctgcacccatcaacccgtcacctacattaggtatttttcctaatgttatccctcccctagccccccaccccccacaggccctggtgtgtgatgttcccttccctgttttcatgtgttcttattgttcaactcccacttctgagtgagaacatgcggtgtttggttttctgatcttgtgatagtttgctgagaatgatggtttccggcttcacccgtgtccctacaagggacatgaactcatccttttttatggctgcatagtattccatggtgtatatgtgccacattttcttaatccagtctatcattgatggacatttgggttggttccaagtctttgctattgtagaatgatttataatcctttgggtatatgcccagtaatgggattgctgggtcaaatgttatttctagttctggatccttgaggaattgccacactgtcttccacaatggttggactgatttacactcccatcgacagtgtaaaagcgttcctatttttccacaacctctccagcatctcttgtttcctgacttctgaatgatcaacattctaactggcgtgagatggtatctcattgtggttttgatttgcatttctctaatgaccagtgatgatgagcattttttcatatgtctgttggctgcataaatgtcttcttttgagaagtgtctgttcatatcctttgcccattttttgttgaggttgtttgcttttttcttgtaaatttgtttaagttctttgtagattctggatattagccctttgtcagatggatagattgcaaaaattttctcccattgtgtaggttgcctgttcactgtgatgatagtttcttttgctgcgcagaagctctttagtttaattagattccatttgtcaattttggcttttattgccattgcttttggtgttttagacatgaagtctttgccaaagcctatgtcctgaatggtattgcccaggttttcttctaggatttttatggtcctaggtcttacatttaagtctttgatccatcttgagttgatttttgtataaggtgtaaggaaggggttcagcttcagttttctgcatatggctagccaattttcccaacaccatttattaaataggaaatcttttccccattgcttttgtgtgtcgggttggtcaaagatcggatgacggtagatgtgtggtgttatttctgaggcctattttctgttccattggtctatatctctgttttggtaccagtactatgctgttttgtttactgtagccttgtagtaaagtttgaagtcaggtagcatgatgcctccagctttgttcttcttgctccagattgtcttggctatgcgggctcttttttggttctatatgaagtttaaagtagttttttccagttctttgaaaaaagtcagtggtagcttgatggggatagcattgaatctataaattacttcgggcagtaaggccattttcatgatactgattcttcctatccatgagcatggagtgtttttccatttgtttgtgtcctctcatttcctcgagcagtggtctgtagttctctttgaagaggtccttcacatcccttgtaagttgtactcctaggtattttattctcttagtagcaattgtgaatgggagttcactcatgatttggctctctgtttgtctgttattggtgtgtagaaatacttgtgatttttgcacagtgattttatatcctgagactttgctgaagttgcttatcagcttaaggagattttgggctgagacgatggggtttttctaaacatacaatcatgtcatctgcaaacagaaacaatttcacttcccctcttcctatttgaatacgctttatgaacatgtccctttctcccaaagtcttcagtagcctcccatcactcttggacaaaagtcctgtatactaatgatcttgcccttgcctacctttccaggcttggctaacaccactccccgttttcttccctgtgtaccaaacttactgactcttttttgttcatgcagctatcctttgcttcatgacctttgctcatgctgtctcttctggccctgcctggtgtcctcttacccttttgagccctaaaaacatccttgtttcactaaggatgcctccctgacccccagaccaggatagacctccttgtgatatattcttggggcagcccagcttctctccagcactgatcattgtaatcagtcaattgtttctgtgctatttaaggactatgtacttgaagacagagtcacatctgtcttggtcactgctgcatccccagcacctagagcataagaggtgtttgtggaggtctttcaagtattccagaaagctctgggctactagaaatgcagacatttttccttcaggttaaacatcactatctttttttcctgctcttaccctgatatgtttattaaccatttccccttctggttttctctcatggatgttctctaaacaacttaagatcccactttaagtgtgttactgggaagaattctcggttcatcagcaaagttcacttctcataatttggacactacttttagttaatttagtctcatgaaaaaccagagcctaaattgcagaataaatattttttaaaaataatatgaatgaaaaaaatagtcttagaacttctggataatgggttaaagtggtactcagaggaacattcataactttaaacatgtctattaaaaacaaagaagagtaaattcagcattcatttcaagaagttagaaagagaacaacaaaatgaaaggaaaccataaagaaggaataacttaaatggaagcaaaaatattaagaaagtagaaaagaaaaatagcaggataggtgtattaatggttgtattagaattttttgatgtcaaaagtacttatatatatttactactttttattgtggtaaaatatatacagtataacatagtattttccattttaatcatttcaaatgtacatttcaatggcatttagtactttcacaatgttgtctagttccagaacattttcaatgttcattttttatgtagcggaaaccgcatgcctattaagtgtcacttgctgttttcccagccccgggcactcattcatctgttttctgtttctgtggcttttgcctattttgtatatttcatacaaatggaattgtataacatatggccttttctatttggctttttaaaactcagcctaatgtttctgtggytcagccatgttgtagcttgtaatcagccatgttttagcatgcattacatataygtagcatgtaatctgactcattaaatcagagttctaatatactcctttttatggctgaataatatttcgtggtattttgaatataccacatgttgtttatgcattcatccgttggtggacataggttgtttccacttttccattattgtggatctgcatattggcttaccagtatctgtttgagtccttgattcagttcttttggctgtgtaggtaggggtggttgctgagttccatggtaattctatttttaactttttgagaaacttccaaaccattttccattttacacccatagcagcaatgtatgaggattttagtttgcgtccttgccaacacttgttattttctgttttttgattatagccatcctagtagttgtgaaatggtatctcattgcagttttgattgcatttccctaagtgactaatgttgttgaacaccttttgatatgcttattagccatctgtatgtgttctttggagaaatacttattcaacttctttgcctagtttcaaattgaggtgtttgtttttttgttgttgaattgttgagtttcagatacatgatttgaaaatattttctcctgtcctgttggttatcttttcactctcttttaacaacgtcctttgatgcacacaaattgtagttttaaagaattctactgtatctgtgttttctttcrttgccttagctcttggtgtcatgtttaaggcagaacttccagtactgtgttaaacagaagtggagaaaatggtcatcattgtcttattcctgattttaggtaaaaagctatcaktcttttacctgaatatggtgttagctgtgcgttttcttaattatcttttatgatgttaagagagtttcattttattactagtttttcaaaattttatttttaatcataatagggtattgaatttttcaaatgccttttctctgtcaattgggatgactgtgtgttttttttccatcattctactcatgtgacatattacatttattgattttcatgtttcgagccacccttgcattcctgggataaatccctcttggtcatggtgtgtgatccttttaacatactgctgaatttggtttcctagtattttgttgagaattttttgcatctatattgtcagggatattggcctgtagttttttttttttttttttttttctccttatgtctttggctttgggatcagtttagtgctggcctgataaaatgagcttgaaagtataccctcccttttagctttttagaagattttaagaagaattggtgctaattctttatatgtttggtagaattcatcagtgaaggcttggtcttggccttttcttcgtttggggggcttttgattactgattcaatctccttacatgttacagatctattcagattttctattcatttttgagtctgttttgcttgtttgtgtttcccatttcatgtaggttatacagtttgttggtgtacaattatttatagcattttaaaataattctttttatttctgtaaagcctgtagtaatttctcttttttcatttctcattgagccttcttcatttttctttattaattttgttggtctttccaaagaatagactttggtttctttgattttctctattgtttttgtattctctactttatgctaatctttattatttacttctttctacaagcttttggtttatttgctcttttttaaatttactcaagatatgcagttaggttattgatgtctttttttttcttttttaatgtaggtgtttacacctgtaaatgtcccctgagcactgctttcactgcatttcataaatattgcagtattagtatgttttgttttcttttgtctcaagatatttcctaagttaccttgtgatttttttctttgacacattggttgttttaatacagtgccatttattttctacatatttgtgagttttacagttttccttctattattaatttctagtttatcccatgttggtgagaaaaggtactttgtatgatttccttttttttctcagattttaaaccgtttattaaagcctgtcttgtggcccaacatgtagtctattcaggagaacataccatgtgtacctgagaagaatgtatgctctgytgttgttgggtgggatgttctgtatgtatctgttaggtctaataggtttacagtgttcttcaagtcatctattttcttactgttctgtctagttgttctgtctattgttaaatatgggatattgaagtctccaaccattgtggaacggtctgtctctccctcctattttgtcagttttttgcttcatatattttgggggctctgttgttagatgcacatatgtttatagttgctatgtcttcttgatggattgaacaatattagtatttaaaaaaatcattttgttatttggttgggttataggaatcttgaagtcagttagaacttctccaacttttcatacgaacagttcccagtaacggatgtagggccttttctagcatgttcttttctttggttttctgatgtgatgtgtattgtgtaatgatttatgttaaatttcactctgccacttttagcctattgaagtaattttgaaaatctgtttggatcctctttcctttttatgggggcttattatttctgggctttaccacaggtaacatagagaagtgttttggacaaagtgagtatcggtcatgaaatagggtaagttaagacatcacaaagcttgctgttcttactgagattgagccatttttttgaacaaatacctcttgatttattaacatctacaggtcagaataagttgattccaacactttttttccagttttctcattgcatttgtggaggagagagaatttttggagatccttagtctgctattcttactgacattagccttatgttgttgatagtagtatagaatagtattcgaaatgatgtggacaattttgtcaaatgcttttaagatattgtacatctgggccgggcgcggtggctcacacctgtaatccagcactttgggaggccgaagcaggtggatcatgaggtcaggagatcaagaccatcctggctaacacggtgaaacctcgtctctactaaaaatacaaaaaaattagccaggcatggtggcaggtgcctgtaatcccagctacttgggaggctgaggcaggagaatggcgtgaacctgggaggcggagcttgcagtgagccgagttggtgccactgcactccagcctgggtgacagagcaagactctgtctgcaaaaaaaaaaaaaaaaaaaaaaaagatattgtgcatctgtatcattttcctcatgtacagccttgcatatcctgttataggaggaaatgagattggtgtgaagggcttgcttatagtagtttcatgttgttattgataaatcacttcacattattgtatacacctaaaatctgacctttaaaaaatgcattttagaatttttacgaaaaattcacagaaatcttttagaagtttgtagaatggtaatatcagagtgctgctgttctgcatgcaaggcttatttttcatgattaaaaaaaattctggtcacagttttacaactttctttataagattgttttcaggtccttagattatatgaagtttgggactggaggtttgcaatcagatacagtcataggtgttcatgtgtcatcttctctactatcttaactcattttcttctcttcattatatgctttcttaataagtatattttaaaaaccagattataaagcagatacatgttcactatcaaaaatttaaaaaatatagaaaatacagaaaacacattttactcataatttgttaatttagcagtgttcaccattaacattgatgtatatccttctagtctgtctttgcacttacatgggagtcttcaaatgtgtatgtattaactacatatatacaattattggccatacaatttttgcaactgtttttaacaatataagtatttccttacttcatttaatagtgttctataacataattttaatatgctgtaccatatattttatcactttgttttagtatattagattttatacttggttttttttgaaattttcagtattttaaacaggggtataagctttctctacaaatctttgtatatattgctgttattttcttatgataaatttctagatgtggaatgtcaatgagtatgcccttggtaaagacttctgataatactgtcaaattactctccagaaatcatgtgcttgccatccaggaaggatattgctagcaataacagacatgtttatttcatgaggctctcagcactactcgtattatttaaaaaatgcaacttgagaggtgtttttcatttcttattgataatagaaagatttttaaaaccattaatgggtttaattcttgtctgtcacatacattaacaaaaatacttatttttcattctgaatagctcttcattttgcctattgtggattttttaaaggagagtaatttaaacatttatggcagattaatgtatatttttgtgcttctttctcatctcactgttctcctcccttcctccttccttccttcttttcttcctacattccttccttggagtgaggggaaggctatcctcatgacaaaatatgtaagcatttattcttagtcttttatggcataatttttgcccattttagtggaaatttaatatagctgaaatttgttttgctgtattatgtgaagtagggatatggtctctgtgattgttgatctttcgtttcagtccacttattaaatgagtcattattttccctctgayttgaaatgtccgatttgtcattgatgaaattgtaacatattaatatgagtttgtttccaggcattctactctgttctacaatttccattattgtgcttttagaacacattttattatttggtaattcaagtccatttctttccaaaattttttgtttatttctgttgataaagttttcagatgaggtacttcttttaattgtactaaacttatacgtaactttggataaagttgatacctctgtgatactgagtcttatgattaaagaacataatatttctccccaaaagactttcttttgtatgtgttaggaaagttttctagttttcttgatacagatcctaagtttgttagacagtttagagttttgttgcctttgtgaagagggttttataattcagttccttttggaatttaagatagtcacatcatgcttaaattatatcatcttacctgtctttctgtcagttataattttatataagatagtcacatcatgcttaaattatatcatcttacctgtctttctgtcagttataattttatatatatttctactcttattttattagctagaattytcagaaatgctaaattatagtgtaatagctagtattcatgtttcttgtttctcattcaataaaactgctttttgtttcaccatgaattaaagaagtggctattgatataaagtagatattatttttcctgttaaagtttctacagctagtttactgttttttcttcttgacaaagaatggatattmcattttattacattcatttttgatacttactggagtgatcgtatactcttccccattatcactagrtataatttagtaacagatttttttaaaaatttccatatttaatagcacacacacttgatgataatacatttttttttattttagtattatgctaagtttcagccagcagctgtgagtgtttagaattttagtattgagtatctctttttttgtatgtgctaatttaatcaagtttttaatgtcaaattaatgctggtttcatgagattaattgattaatttttttcctgtttttaggaatagcttatgtaacatgtcaactaagctttctctggaatgctttatgaaagaaataagttggttatgatactttgtgtgtctgtatttttttgggacaatttagacagcatgttcagtgacttgatttttttcatattttcacttctttaataattcttggtagtttatattagtaagaacatcattttattcttattttaacatttatctgaaaatgtacaaaatgtattttcagaatatctcttccatatatttggttatacccttcatctctttcctaaggttgtagatttgtactttctcttttcttcatattttttgtgttgccagaagcttgtctcttaaatagatttttttttctgtaaaatcaatttttagctttattttcccattgcagtcttttcttgctctgtttcagtgtttctctgacttatcattcattccttcatctgtttactttttttctacttttaattatgaactagataatatgcaaacaaaaatatatatgtataatttaataatcatattgagtgtactcgacacatagttttaaaaaaggacatctttctagtcctctgtgtgcccccttctcagtgtactccttccgtctccccaagaggttaactcttcttctgaatttctgcttattttcttgactttaaaaaataattttacatgccgggcacggtgactcacgcctgtaatcctagcactttgggaggccaaggcggacggattgcctgagcttaggmggtcgagaccagcctgggcaacacggtaaaaccccgtccctattaaaaaaaaaacaaaaaattagccgggcgtggcagcgtgcgcctgtagtcccagctattcgggaggccgaggcaggagaatggcttgaatctgggaggcggaagttgcagtgagtcgagatcgtgccattgcactccagcctaggcgacagagggagactctgtctccaaaaaaaaaaaaagttttgtaatatatacgtatgcatccctaaaatatatgttgtttgatttttcctgggtttaaaatttatgaaatcagaatcccattatatgaattcttctgcatcttgctttttttactctacattatgcttttaagatttatccatgttaatatcattataagaatatacaaatgtacgttaaaatataaatacacaaaatattaaaatatataatatataatatacagatacaaaaattacagtatataatatataaataaaagatggatggaagtgtatggaatttatttatacattccattatcaatagacttttgggatcatttcgatttcttgttttgtttcatgctttgatattacagacggctgctatgaatatttttttgtagctccttcctagtatatccgtgccaaagattattgaagataaattcttagctgtggtattcctgaatcctagtgtatattcatcttttctagattataacagattcaccaaattatttccaaaacatctattcttttcaggcttaatttgtttttaattttctagctagttgaattgagtgcttaacttacttattttcacgtttgatgtttgaaaattgacagagaaactgcagaagtttcattatgttgtcttctaattgatatgtatttttctaagtaaaatgtactttcagttgctaatttgctcttttactgaagaattaacgtgggagggtgtttttaaattgctgtataatcaaattaatattattgtttgtttttttgttgcatataacttcaagtttttatgcattatgaccagaggttatgacatatacgtaacttcttttgcagtgttactgaatttttgtgacctaataatgtatgaccaatattttgatgtttgagaaaaatacaaagcctctggacagcacaaaagttgatatttattttatataaataaatatgtattaataattaagatatagatatatacctattaaataaagcttattaagtactatatcaagtaaattctgtagatcgttattggctttgccataagatgagagttagtctgaagtcttaggttctccttctagatgtatttgttaggtttccatgcaaatatttattgcaaatattgatatgtttcaaattatttatgacatcatatgttatattttctgttgatcattctttccttttttcctttccttgggattatttgtgctatttcttttttctttaagtgttctagtagttatatatatgcttcttatttttgtaatggctgttcttaaatcctttacaaacatatttgaagctatttttttctaccaatgtctagaattaattaattgttacaacccaccccccttgaaaaaggcaagctccttagacactttatttcttctctactagtccccttcccgtaacttttaatttaattatttaaactgtatatacagatttttgttactattgtggttttgtatcatacctacttccttaagcattttatctttaacatttcctcaagtataatagttaaataatgaacaattatttagatttaaatataawtttacttatatcttcacttataatatatttttatatattccattgttttctttttcttggacttctgtttcaagatgctgaagtatttcttatagtagctctttcagaaagggactgtgcatgggcatttttctgatttcctgaacatatgtaattatgttgaatatatgtaattatatgttcaagaaatgaagatataatatagttacctaatttgaaataatatttctttctatagaaataaatctttttggtgatataatctattcacagatttcttaatgctaaccttctgtgtcttagagtaagtcctacttggtgataaggcatttttttttttaatatttagctaaattcagtcagtttctatgccttttctccttcctatcctggcctcttcatgtatcttactactcttacctttattttttgtgctttgctcattctgaccttcctattgaccttgagtatactgtgtttcatcttatgaagtgttgaaaatactcttcagatttgccccaaataatatcctcctgctacacttattttttatttttaattgaaataataattatgtttattatggggtacagtatgatgtcttgatctctatatacatattacagaaagattccatcaagctaattaacatatctgttacctcaccaatttatcttttttttgtggtatgaacattaaagatctattttagcagttttggagtatataatacattgttattaacagtggtcacagtgcagtgctgtggatcactaaaacatataccttcagtctaactgaagctttgcacctgttgatcaacctccttccttcccccatcctcccccacccattctctgataaccccctttctcctctctgtttccgtgggatcaacttttttagattccacatataaataagatcgcatagcatttgtctttcagcgcctggcttattagcataatgttctccagttccatccgtattgttgcaaatgacagaatttccttctttttaaagtctatatagtattccattgtttatgtgtatgtatcaaataaattttctttgtttttgtcacttctgatttctgttattttccttgtgtatttttcttcctttacttttatgcatttatttattgccaaaattataaatgtgcactttaatgaattataaagtaaatacctgtttcattatcaagtcttcaccttatagaacgctgccagcaccccagagctcccatatacataaaggttgttcttaatattctcttccttgcttctataaacctatctgtttgtagaactaaactgaggctcttatctttattattttcttcattctactttttctgtgcttgttttattaaaaaaattcttgacatggttgtttagttcattagatttcagcctgccattgctcctaaatatataaattaaaactgtacattttaatttaagcatgcctttaagtatgtcatacgagttttaatatataatcttttatgattactgagtttaaaacacttctagtttccatttttgtttcgacgtatatttcttaattttcaaacatgaagattttctgtcatctttattttattgtactttcaattttatcattaaagaacatactctgatatttaactttaagatgtatcagaattgccttatcacctagtgtgggactactttttgtaaatgtttcatgcatgcagctgttgggcacagcattctatgtgtgttttaggtcaagattatatattttatattaattgtgtattcagatatttaaccttgctgcgtttttggtctgattgttctatcatttattgagaggcatgtgtgaaaaatctctgttccgattatggawatgtctatttctccttgtaatgtcaatttttacattttgtattttggtatagttttgccaatttttacattatatattttatgatattaagtgcatacacaattataacttttctgtgttcctaggaaattgatccttttgccattataaaaaattccactttctaactctagttaaactttttgttttaaaaaatatctgatattagtacagctacatcatattcttttaataaaatttgcagagcatttctttttttgtcattttgttttcaccttttctgtatgcatatgttttacatgtatctttgtaaatggcatacagttaggtttaaaaaattctatctgataacctttatgttttaattggaatatttagaccagttatatttaatataattatacatatatttgagcttaaaactaccattgcactgtgtgctttctttttgtcccacctattctatgttcctatttctctactttcatgccttactttttattgactgagaacattattccattttttctgttattttttcttttcttttagtggttactctagaaattacaatatgtatacttgagttaaattctaattttaattggcattttgggccaggygtggtggctcacacctgtaatcccagcactttgggaggccgaggtgggtggatcatgaggtcaggagattgagaccatcctggctaacacggtgaaaccccgtctctactaaaaatacaaacattagccgggcgtggtggcacgtgcctgtagtcccagctacttgggaggctgaggcaggagaattacttgaacccaggaagcagaggttgcagtgagccgagatcatgccactgcattccagcgtggtctacagagggagactccgtctcccaaaaaataaaaaaattgcaatttgcactattcccagacaattcagagaccttagacatcttgaatccagtttatccacatttgtcttaagtgctgttgtttttgagtgttttatttctgtatattttaagccccattggaaattgttattattcttttgactttctccagtttttcatttttgtgtctttacttccctctccatgtccagccttctacctgaaattattttctaaaaaacactcttttttattacctttagtaaaattttcctcatttttatttgcctaaaaaagctttatttcacatttagttttgaaggatgttttttcatgaagtaaagaattatcggactgcagttatttccttagtggattgaagatgacattccattgtcttctggctgccatggtgtttgtggggctacatgaatttgtgaagttaatattttccatcagtttaggggaatgctcagccatttcctctttctccttattctccctggttctgctggtgttcccctcatatgcagttattctccatcactgtatcctctttgtctcctaagcagtttttctctttccttcttatttcagtttacataatccactaatttttaaatctggtttctagtgtctagtttgtcttaaaactctttctctgaggccttaattttgggcattatattttttacttctagaaatctgctctgcagttttttagttttcattttttttttgcttttgaaatggagtctcactctttgacacccaagctggagtgcagtggtgtgatcttggctcactgcaatccctgcctcccggattcaagcgattttctgcgttcaggtgattctcctgcctcagcctcacaagaagctgaaattacaggtgcgcaccaccacacctggctaatttttgtattttttggtagatacggggtttcaccatgttggccaggctggtctcaaactccagaccacaagtgatccgcctacctcggcctcccgaagtgctgggattacaggggtgatctactgcactggccagttttcgtttgtatgttgaaatttcattgttgacttttagttcattggacataataagcatccttattttaaggtgtgtgtttgacatttcaacatctggagtccccctagaccctgggctatttttgccagttctcatcttcttgtcacacctgtctgttttattttgattgtatacttgacattgcatttggaagaaatatttgtagaactgaactgaggcctagtgtggttttactttctatagattggattttcatctgcttttatcagacagtggagaaatataggatcatcttaaaccacttacaaagatggagattcttttctggggagttcagatgaatcaaaactaggaaatggtctttatgagtttgggttacttaccatttacccttactcctagagtgcagccttttggggtcccagtgggattcccagtattcccaacttttgtcagctgactcttctggtttagaaaatgtcctccagtggctctgattctggattcatttcctggctttctgttttctcccagatcttggctgtctaatcgtttaatttcttctcttcctctattttacttttttaagaatgagacaaaatctttagtggttgtgtctaatcttttccctagtttttgatggcataataggattttgtatatttttctgtagatttaaaagtattgtatgtcttattttaaaaaattaaaacttagctttgacattgacaagaattagacatcaagtctaaattttacatttatctttgcttatcatgaattattttatggcacatctgccccatttttgaatttattgtttcagttcactttgtagtcagtggtataattctatttttttttgtgggcaggaaaaatatatgggtggtatactttctgggctttagcagatctgaaaatagaaaatgtatttttttcttttgtttttctacatacaatatttagcttggctggttgtgaagattttgttgcacattatttctttgaaaaccatggtgtggaggagaagtctgatgctaacatgatttaaaaaatgaataattccttctggttcttgtaagatttcttctttaccttttaaatacatagttttctgaagtatatatccaggtatagagttttcattaacataacttggtacctaatcttttaatctgcagtaaagtccttcaggattatatgattgattattactttattaactcatgttgcatggcttaatatattttagtttttctggagatactttttactatttctgtcattttgcctatcattttttttcatccttaattctcagacaattgttttaactcgtcttttaattaacacattcggttttctgcagtgaccattgctaactccatttattttgcaaagtagttttgttgtttttgtaaaacctgacactttctaatataaatgagcagaaaaatccatttcattttaaagttgtgtagtcctcttattcttaaacccttatttccatttcgtgggtgtggtattctcaatatcattaagaatacgtgttgtgtagtttataaagtctgattttgtttttagtactaggaaatgaataatctgattctttttcagtttaatctctttaatttcacctatgcaaataccttattattgttattatttagttttatcgtctctataaaggcatgctatttgcccagtgttgggagttgaactgagattctacccataaaagtactggtttcctgttcacatctttcggcctggggaggaagggagctgggagaagtttgtacttcctgttgacatgaccagaagcttacattgtctgctgaaggttcctccctatgttcatggtgacagcctaatatcagtgagtgcagggtccattctctaacccacttggctgtcgtcactggcagctagcaatagagtaactcttcttttatttggccaacactaagggatgataatgatacccaccttttatagtttgagaattagttgagacaatgcttgttaagctttagtatagttacttgcatatagtgagtgctcaatagatgttggctttcagcatcacctccattaactcatgcttttactaatagttttctagtcttgtagccttttgagccatcctctcaatcacataatgatgtaataaatgacagctgattagaatgcgatcctatcccagaatgcaggtgctcctaagcactgaaattcctccatttctttcatttacttgtgaaatgtagagtcactggctctgggcatggctgtagcccatggactgggggactgtggttgatgatatgtgatgggtatttggggcctgcttgatgaaggccattctattccatactaggaagtttggactttattcagaggtaaaagggagcctttgaatattttcaagtaggaggctggtggccagacttgtttttgataggtgttgtacataatataatactaataacaatagctaatatttatggatacttattatatgccattttctaagtgttttatctgcattatctcttctaatcctaaagcatcttttacaaatatgaagactgaaacattgaaagactgaaaaactaagttacaaagctagtacagcatggaggaggcaggatctgaacccaggcgacctaattccatggtgttatgctacatgtcatccaggaagccagattacttccttctcatccaggaagttatgtctccccaaaatttatatgttgaaatcctacccaaaggggatggtattagaaggtgggcccacatagatgggattagtacccttatagagaggctagagggaccttgatcgtgccttgtgccatgcaaggacatagctagaagcactgtttgggaggaaagagccctcaccagaccctgaatccactggggccttgatcttggacttcccagcctctagaactgtgagtaataaattcctattgtttacatatcacacagtctatggtattttgttatagcagcctgaatagtctaagacacatggacactggttagtgcaggtgagaaacacttgaggtgttgatgttggggatagtgatgagtggaccaagttcaggagatatttagaagccaggtctgatggccagtgaatagggagagagagagggaatggaggggaattccaagtttcggatattgtcaggatctctagtatgttctgtttcccttcattggccacagtgtggctgtttgacttactaagaacatgggctgtgaagtcatcaggctagggttcaaactgtttctcttgttactggtgtggcagtgggggaatgggctttgccttttagaatcctggtgttagcttatatgaactgggaggagtagaaatggtctaacaaacaggattgataggaagactacatgggttaattcattttaagagctcagtattcatacagccctgcatccgtaaagttgctccagagaagccattttcactaatatttgcagtagcagacagaggcgagactgtgacactgcacagtgaacaaggtgccacttggtgacaactcaaccccagctccttttcgtactttttagaaaagctagagattgttcagtgcctggcatatagtaggcacccagtgaatattggcagaatgactactctgccacaagctggcatttcagttgcattctccagcatcctgtgactgcatagacacgtgcttttatagcgtgcatagccttggccgcttccaccttctatgccttgtctaccttgttcactgtctgaaaagtcttttgggatgccttgagcacaaaagaaatgattagaaaccaaataattttccattaggtgctcatattttatgaccacctgatggccccttatttagatcatttcatttttcgtaaatgaagtttagtggggggatctgtgtgcagtgaaagcctcatgccagaataaatggctgcagttattctcactattgcattaaatacctattaaaagtaataactgaaattaagctctccttccctgagaaattcagcttagtatatttagtgtctccaaagtaaaataggctcagagaacttttctttgaaaattttcagagracttttctttgaaaaattctgtgcaaaaatgcagttggggtattcctcgatgtggtttggtaattggagaatcaaaggaaaaatctgtctacatatttgctgtatagttggggaaaagttctagtatgtggagggctgatgttcttctatttgtcactgctgtttgggagagtttgagaggcagtgtggtgtgtgtgtgtgtatgtgagcaatgtgcaggttctgggaccacactgataagttcacagcctaggtctgcaatgaccagtgtcagcattggcaagctttccaacttctctgtgcctcagtttattcatctgcaaaatgggggcaataatagtacctgtttcttagggctgttgtgaaaatgaaatgagtcagtatttgtaaaaaccagtgcctggtatacagtcagtgcttagccagtgttttgttgtgatttacacctgcaaggattgtgtggccgacacttctttcttccttttaaatgctactctccattttgtgatgttgctttttacactttctttttgtagaggcagctttgcgtcattttctagagcttagaattggcagttagatatatgatctatctatctggagtcagtcccatcgttattagttgtgtcatctcagacaatttctgcacctcttggaatcttagtttctccatttgtaaagggagttgagtaagagtagtgcctgcctcattgggttgtattgggattgggttattataaaaaacttctgatacttattacagtccttttttcccctagaaaggtgaaactaagttttattttcacaaccaaccccggagaatgccattttcattgaatattggtcaacactgcatgtgactatgaaaattttcagccttcagtaaattttaggtgaaaaatggattatcatttcaaatgtatttttctttggtagtagaggttaaatttttctctaggttttattggccatttgaatgcccttctttgtgaaccttctctttttttttgtcaataaaagttgtattgagatgtgattcacatactgtacaatttatccctttaaaatatgcaattcggtagtttttagtgcattcacagagttgtgcagccattatcgtaatcagttttggaacagtggtcatcattccccttctccttcaaaaaaaacacctctatccattagctgtcactgcatgccaccccaccctcctcatcccttagctccaagcaaccactaatctactttccgtctctatggatttgtgtattctggatgtttcatgtagatggaatcatgcgatgtgtgatcatacaatagaagactggtttcttctatttaacataatgttttcaaggttcatccatgttgtcgcttgtatcagtacttcattcctttttttttttttttttttttgtagatgagggtcttgcaatgttgcccaggctggtctcaaactcctgggctcaagagatcctcccacctcagcctcccaggtagccagagctaccggtacagtacatgccacagcccccattccctttttttttttttttttttttttgcgattaatactcccttgtatggatagattacattttgcttatccacttttcagttgatggacatttggattgttttcacattttggctatcatgaattatgctgctgtgaacatctgtgtacaagtttttgcgtgcagatcggctttcatttctcttaggtttatacctaggaactgcagagtcttaggttactggtttaactctttgaagaactgccaggctgttttccagtgtacctatcattttttaattgggggtataattgcttttcttatatatttgtatgctttttatgttaggaatttcagatccatgtcaaatctgctgaaaatatgtaacttctttgcttttaaagaattgttcttacagtttttagtctttcgtcgtttctgtcataacctttaaacttacaggtgttctgtcatccagagattgaataaatgtttgtttcattatgggatatggacaagcatggatactcggagctttaggaaatcatgtatgcaagattcatttagcttttttggtatataaccagtatattattatataatatattatatatattgtataacatatagtactatatattatatagtactatatgttatacaatatatattagtatatattatatgaggaactaaattcttttttttttttttttttgagacggaatctcactgtcacccaggctggagtgcagtggcgcgatctcggctcactgcaagctccgcctcccaggttcaagccattctcctgcctcagcctcctgagtagctgggactacaggcgccaaccactgcacccggctaattttttgtatttttagtagagacggggtttcgccctgttagccagaatggtcttgatctcctgacctcgtgatccacctgcctcggcctcacaaagtgctgggattacaggcttgagccaccgcgcctagccgaggaactaaattctttctattccatattatcagtcagttgacccagacccacttaattattattattttcttaacttcttttcccacggatggcgatgaccactacagtatatattagataccattgatgctagtatctcatgacagtttattaacatacctgagcatgtttttcacctctatattctttcccatggtgtgtctgttcattcttgttccagcaacatagmctttattataaagattttagtattgataatgattgtctcttttcattgcttttatactggaagacttttttttcctgtcctcccattgggatagggaatggaatagcatcagtcctaaaatttaatttggggagattgtgacactgtactcttgggtcttcctccgtagaataagacacatggctcagttttcccatatctctttttctgtctctcagaacagtcttgcagttgtctttatataggtcacatatatttctttttaaaacagttcttaggtactctctactgtttgaggctactgtgtaaagaatgtattaaaatcatgttttataagatgctgtttctgaaatataggaaaatgattttcatatattcatcttatacctagccactttattatctgctttttatcaaatgcttatctttaccacaattctgttgtcttttaacatattaaatcataccatctttaaagactttttttgtcttgtcctttggatatttataatctcattccttttatttttcttaatttctccagtgcttttcctgggtaccctaattcattttcaatacccctctttccctctctacccccttccctattttgtccttctcttcagtttttaactccttgacacacatctgttaattttttaagcttacttatggtctcccagcagaaagtaagttctctaagaggaaggactttcatctgtcttcaccactgtgttttttgatacagcagtacctagtgttaatgcttcagtaaacatttggtgagtgaattatctgcaaattattttgggactccagattgtactgaaccaagattaatgtcacttttaaagtggcttgatgttcccttcctctcttagtctttgttttaccctttctgatgagaagtgtttttttttgttatttttttgttttgagacagagtcttgctctgttacccaggctggagtgcagtggcacgatcttggttcacggcaacctctgccttctgggttcaagtgattctcccacctcagcctcccaagctgctgggattacaggtgcctgccaccatgcctggcttttttttttgtttttgtctttttgatagagacagggtttcaccatgttggccaggctgatctctgacctcaagtgatctgcccgcctcggccttccaaagtgctgggattacaggtgtgagccacctcacccagccctggtgaaaatattctattctttgttggagataatggggataggttagctgttgagtagccacagttgattctcgttacttgtggttctcattacctttattacattctataaagttgccctcgaacaccggattagcaaatgctgaatcgttgcttctggtgggaatacaggattagttaggttcctgctggagtgcagtggcacagtctcagctcactacagcctcaacctcctgggctcaagtgatcctgccgcctcagcctcccaagtagctgggactacagttgtaagcctctggtcacaatgtttctgtcaaccatttaatatataacctaattttatggtgtgtttctctttaaagacacattattaaatatatattgtggatcattaacattgaactcatggccagcagtactgtagctcatgcttgaatgaagctcacagatgtaacacacacattctgtccttaggcacatgacagtcttcttgcatttagggacaccagggagcagaaaggacacgtctctgccctatgagagctcaaacaagaaggcagagagtcaccttgcttcacctcagctggacacttgcaattgatgacatgaattttccactgctttgtgcttgtgcccaaaagactggacaagctccaaaaggataattttggggttacaaatactttatagacagtaggtgaattagcaggtatgaaatacatgaatgaggtcaagtgtagttttctctggcaccatggcagcaacttttccaagcagtggcgtgacctctgcatcacgctttggcctgaaatgacttgatgccatctgacrctttggcgattgtgagttccttctgggttttagcgttgcccaccgtgttcaggctttttggagctgtgctgcttgtatggactgtagtcatattctgctctttccacgtttggtttgctcccgttgaagcctggctcacctctttgcacagtcgtgctttcttacgttctttcttctcttccttgcgatggtctgcatttgtatagtcagaatttcactctgcgactcttctgaagttcatttgaactttattcctagcgcttctggacaatagatgtarcctttgtttttttgttttttatttatttatttttgagacaagtctcactcttgtccaggctggagtgcagtggcatgatcttggcccactgcagcctcgacttcctgggctcaagtgatcctcctgcctcagcctcccgagtacctgggactactgttgtgtaccactrtgcctggctaatttttgtattttttgtagagatggggttttgccatgttgcctgggctagtcttgacctcctggcctcaaacaatcctcctgccttggcctcccaaaatgctgggatttttgtgcaccaccgtgcctggccagtctttgtttttttttttttttttaattttctcctttattagattgaacattcacatgttattttatgtgcattatatttaataagtaactttcaaatatccaaagtagttttcccagcatcttcttttgtatttttattaacatataatagttgtatgtattttaatagatgtagatataccttttgaatctcaaaatatgttttagttttctaaagttagggctttcacatctaagtcacctgggggctcctataagatctggtcttcctggcctctctcagatctattgattcaacaattgcaaaggatgatgtgttgaaaaggctccgcaggtgattctgatctacagggaggtgggagccagggaacactcattttgagagctgtggcaggactgtcaataattaaaaagaagaaccttcaagaccaccagcaccaccactcttggggcacttttactagacgtcaagctctctactaagctctgggtgtgttataatcttacaacaaccgtttgatgaaaacgcatacttcgatgaacccaaattcacagatgaggaaacagaagctcacagtggtaaataacttttccaaagtcacacaggtcctcagtgatagattggaacccagatggctgcctggtaaccacaggtggttcaacctggagccccaccagaatcccctggcgggcttgttcaaacagattgctgggcttcacctgctgagtttctgattcagtaggtccctggtggggcctgagaatctgcatttctgagaagtctccccccagccaggtgatgctggcgtccttgtaccctctctcctttgtgggactgagtgtatggctttttcttcacaattaacaacgctctacattctgaagtctattgcacattgtccgtttggttgccatcaccttcactgcccaggcattaataatttggtttttgtcacctttgcgcattaaatccacagacgcaccggcccttaatgtttctttttcccctttaagagacagctcaacatcagggtgagtgcaaccttcagtttctatgatttcaagaatacggccctggataactgttcaactctgaatgttcttgctctaatttcatctatcctgcattctagatggactgccccctctggtagttagttgatctgtttggcttataagatttttatcccccagtcaataatagaagcgtaggtgagaagatacttacaaggaatacaatgattttgacactgtttttctttttaaatttttaatttttgtggcgacatagtaggtgcatatatttatggggtatacgagatgttttgatgcaggcatgcaatgtgtaatcattacatcatggacaatggggaatccattccctcaagcatttatcctttgtgttataaacaatccattgacactcttagttattttaaaatgtacaattacgttattattgrctayagtcaccctgttgtgctttcaaatagtaggtcttattcattcattctattttttttgtactcattaactatccccatctcccctccaaccccccactacccttcacagtctgtgatagccattcttctattctctattgacactgtttttaatgagccagaggcagtgaactttctcaagtgtgtaacaggaggctttcttagggacagttgctggtgcagttaaactgcctagttgaggtgtgccttgcctcgcacaatagattaatgcatccccaagttggataatatcgtcatgcatgaaagcagcctgctagtctaagggagtcctatagcaaaccatctttataaagtgaacagtgacacccaatttataaatctaaattttygccattttcttaaaatgaaatatagtttcaaactggggtactaatgtctgaaaaggttttatgcctctacagttaatttaccctgagacagtaatttctagtaactctagtcatttctaaatagtctgagtcagttttcctagaatttaggacaggacctcaaaaaaatacagttcaagctctttccccatgtttcagggaatcttagaattcccctggtagtttcctggtcttagggaatcttttacaagtgtgtttaggcttgaagtggtttgtgcaattgctgaatgtgttgttgttatgcagtcgtgtgttgactttttctcaatgcagttcttcctcatgcacttgcatctttatggttatacatttacttccaggtatcatttcactctcctaaatgtgtttttccacctcagagaagccacagaagtagcaaacactaacccaaaccaaaaggaacaatttgatcgatgcactcataaccatcatcacaaaacttttcctgcccactgattcagcctgttgttttaaaatgagataatatttaactggcatattggtcatgactcatcgatagttaacaatcattttgtttcctgacaatacacatttgagttcagttcgtattgaagcgcttgacaaaaaaatcacattgcttaggactagactttctgtgcacatttcacaatttttaaaacattaaccttttttcaaatttcaagtgtcatctccattcactgtggaaaatgtgaagtattcaaaaggcacaaatatacccaacacagaaattatgcatacatccatcactcagagacactaacctatatcataggtagattaacatatcaaattatatatatatatacacaccatatatatatatataaaccatatatttatataaaccatatatatatatatatatatatatatatatatatatagtatatggtttgtagatattacatttatacccaggtrtgtacatatggggtcatatgtcttagtatgctgtaacatgtgttttccatttagcaattattcaaatattttcctgggtcagatatttttctacaccaaaattcttaatgtctggttagtattttcttatattatagaacccagaggtactgtgatttccttaaccagtcttcggaattttagaatatttctgattttttgatatgattagaagtgctgcagcaggccgggcgtggtggctcacgcctgtaatcccggcactttgggaggcagaggcgggcggatcaggaggtcaggagattgaaaccatcctggctaacacggtgaaaccctgtctctactaaaaatacaaaaaattagctgggtgtggtggcgggtgcctgtagtcccagctactcgggaggctgaggcaggagaatggcgtgaaccagggaggcagagcttgcagtgagcggagatcgtgccactgccctccagcctgagcgacagtgtggactcagtcacaaaaaaaaaaaaaaaaaaaagtgctgcagcaaacttctgtatttatgtgtttacacacttgtatggtatattaaaatcctagaaaaaagcgtttctgcatccagtgttgtacacatttgggattttgattcttacttcgaaattacctccccaaccccttgcaaaaccacctcaagatgtacatctaggttttttatacttttgtttattattgtagttattacttttgtttattattgtagttattattacttctatatgtaagttatctggaatttattttatactaaatttattttggtgtaaagataggggtaaaatgtcttagctaagttcttttctgtgtaactaattattaataattggtgtctaacaccgattattgactaatccatttacttcccatttatatgaaatctcacatttaccaacaattaagatcattgatctattaatatttctggacttttgatttttttcagttatctaatgtcttattcttccttagataccatacctctgtattggaatgccttattttatttatttatttatagtaaagccttccttgtattcttgtgtttcgaagttttattgactacactagcccagttatcttacatatgaatttatggagtcaatttttaagtaaaataaaatcttagtagctgggatcagaatggtatttattagtagacttggaaagaatagactcatttataataggccaattggcttatctctctaatttacctaggtctaattaggtcctccaataatttrttattttgatttgtgtggattttacatattgttacatttttccctaggtattttgttctgttcaattttgcttttgttgttattatgaatatacctttccctgttaaatatataaaatgtcaaataaatatatagatatcaaatatttatcaaaatggcaaatattttgatataaaatatcaaatatttttcaaaatatatgtgtgtgtgtatatatatatatatwtwttttttttttttgagacagagtcttgctctgtcactcaggctggaatgcagtagaatgatcaagcttactgcagccttgaactcttgggctcaagcaagcctcccctctcagcctcctgagcagctagkactacaggcattcaccgctacacacaactaatttttaagtattttgtaaagacagggtcttgctatgttgcccaggctggtctcggactcctaggctcaagcattcctcctgccccagcctcccaaatatattttttgcttgttaattttatagggtaaactattggttattgaatacttattttatagcctgctatgtttgtgactctcttttagttattaaagtctgcttgtcttagttgatattttaacttcaattgtatcctaagcaaacagtggtcattttctctgtctgtcctggtaattgaagctcttatttcttttacttgctttgtttggtaggctagcatttttttactggtgttacatattaattgtgatgggagtcttacccatggttttaatgggaatgtcattattacatcaccataagtatgatgttggctgttagtttgagactaggattgttcttttggtcttagttgactattttttaaaaacaggaaatgacttatcagatgcctttgaaaaattaatgaaatcatgtgtttttttttttactaatttatacgatgataatgctaatttataacttctttttctgggaccaatctctgctgatggaagtatattttctgctgttatactagtggatttaaaaatattttatttaattttttaaaatgaatattcctaagtgacactggactgtggttttagtgtgtactgtgcattattagatttttctgtcaaggtcattaaatgttataaaatgagtggaaaagtgttcctttttttactgtcgtctgaaacattttataatgcttcagagatcattcttaacagccttttcaaattcacctatagcttttggttaatttgatgttgtttatttttattgtcagttgtgttcatttgtatttacccaaaaaattccttgtttcattgaggattttcaaatttattgttctaaataatttcctctcatttttgaattactgccattttttgttatatattcttttattcttgttaacaaattcccttgttaaatattcctcattgtgtgtgtttgtgttttctcattttctttaaatagactagacagaggtttgtggatggtagaatttgttttgggtaaggtttttcagagaattgagttggaccactatttggtttttaatgaataaatttccacttttaattatgttaatgcttcatttctgtttttcttagtttttattttgttgttctctttttaacttctcaagttggaccactggtgcgtttagttttatcctttcttatttaatgacaacatcatttaataattttcttatgattgtagttttggccatatcactattatgaattattatgtgtgttattatcattattgctattttctaactaatttgtaattccatttctttaccccttgacccagtagttatttaagagcatgtttcctaaatgactaagggtatagtagactttattttagagcagttttaggtttacagaaaaattcagcagaaagtacagagttcccatgtattacctccccctgctcccatagtctccactgttttaacatcttctatgggtgttgtacgtttgataaaattggagaaacaaatattcatacactatcattaagttacatccataatttaagttagggtctactttttgcattgtacagtactgttggtgttgtcagatgttctttgtgatttctttgtaactctgtgatgagcattttgtatttttctctatctcaggtacttaggataagtttctgaggataagtatctcaaatgtttgcttgggataagtttctagaagcaaaatgagcaggtcaaagggtaaggatgttttctaggcttttgatagatttggccagattctttattggccctgtgaaccattagggaagctatgccatttcttggctgtaggtattcagagttgttttccacaggatgtcaggtctctctgcagataaactgtgaagtgccgagtatgggctctggttctccactgatttctgtttttcctgagggggactcttaggtgagggagcaaggaagcccttccaattcaccttacatggattcaagatgtccagactccttggtaattaaaggctaagattcaggtttcctccattctccaaacacagcctcttagagtccctactgccacataggagaaattkacatttgctgagtaaccaggatggacatgtcacatactttgtcatcttaaaatatatgtgtgcattaaataggatgtggatgaggaaaccaaggctgtgagaggggaggtgagggctgaagtccaaggtcagcggctggttgaggatttaagcacaagtctatttggctcccaagcacctgctttttcccttcagctgaagggcaggctttgttggtgggtgactgcccaagttccagaagtgaaatcctaatgatatttcccctcgtaaatcatgggggcatctcattgaaacagcaaatgtctaccttcccatctgataccctgctcccttccctgatacaggaggctcccctgggagccctttgatttcccagtttattaattttttagaaagaaagagagccaaaccccatcacactccctttgcaactctaaaagctcaaactaataacttattgagctcatgctctatgccaggtgtgctatgtgtattccctcacggaatcctccctgatgtggagttagtascatctgcattttactgataagggaagtaaggcttacaacagctaagtgacttgtccagagtcacagcactgagaagctgtggagccaggagggtggacgctagactgccttcatctacagtattactcttgaccacgtgaggccacagtttatggagcataatgggtctgacggttctcggattctggtatattttccaaactccggaaagttcctctgcagaaattcctgttttgtaatagcarcatctcctaatttmtgatgttagggtggcctttgcttgtggcttaatctctgtttgttccaaatcctagaytcttgtccacccagcccccagaaagccatatattctggatatctctccttgggctctgtccacctgttggttgtagctcctctttccaggtgaaccatgatattttcacctcctttgctgatgtgtcactggttggcaaggattgattagtttgtctctctaaccaagcatctcagtccccttccctgtgcacagtggcggctcttgggcacacgttgcaaagtaggattgtgttgagcttgtaaaatagggattaaaatttacacttccttcaaaggattattgtgaggattaaataagatgatgcatagaatgttctcagcatagggccttatgtacagtaaggcatgcttccatcattttgcagctcattctcctgtgtttcctgcatctgttcttcccacaaacctggttttttaccctggcttttgacaaagtggattatatattttggaaacaaatcctttgtaagaaatatgtatcataaatatcttctcacaatctgtgtctttttttattcttttaattgtgtctttcgataagcagacattcgtcattttaatggagtctagtttatctgtcttttcctttatgttcagtactttttggagtcctggtttaagaagagattttctatctgaaggtcatgaaggcactttgccatgttaccttctggaagatttattgttttgtatattgtgtttagagaggtgatggatctggaattgatttttttttctttttttgagatggagttttgctctcattgcccaggctgtagtacaatggcacgatcttggctcatcacaaccttcacctccccagttcaagtgattctcctgcctcagcctcctgagtagctgggattacaggcatgcgccaccacgcctggctaattttktatttttattagagatggggtttctccatgttggtcaggctggtctcgaactcccgacytcaggtgrtccgcccacctcgccctaccaaaatgctggggttacaggtgtgagccaccgtgcccggcctggaattgatttttttaatacatggtgtgaggtgtaggagtcaagattaaatttttttttttttttaagttgggaatttaccatttctcggaaaggccattctttccttactacattgtcctctttctaataaattattgaccatttatgtgtgtttctgtttctttgacttggtaaagaaaagtgtaaattacaattttaccacttctcagaccttaggaaactttgactgcattacaccattttttcccttttgtgttaatgttgtcatgcattttaattcttaatttattttgaaggccacatgtcattattactaattatttagcacaacaaatgttcatttaaatcaactcacatattctttctgttgcccctcatcctttcttgcatttcagctttcaatatgggatagatttccttcttcctgaggaattccctctggttttgtcacatttgtgtgctgcactagcttctgagagttgattgtgcacatcttgttccatctctacattcagtgatgtcacactggcagctgacatcagccacagcgggagtatttacaccacagaaatcagcaaacactgacagagctttcccgctttgttaaacatttatcagtacaccactggttggtgacaaattcactcccttgttgtgtgttcattttataaggatatttccatagggcaaataattctgagtggcatttgttgtattttagctcttctgttggttttattgaggacccagctgtcagttttattgttgttcctcctgcttccttttctaaagataatgtgactttttttcttatctgggtacttttcagaatttatctttgtctttgcttttatgaagttttattatggtgtttctaggtaccatttaatttattctgcttgggattttgtgactcgatgttcttttaaggaaattcttggtaattgtttttttcacagagtgcttttactctgttctttctttattcctcttctaggacaccagtcagacagacacagactttcccaccaggtctccatgcctcttatgttctttttcatatttatctgcggttttctccttgttgctgtctggatgttgtcttctaacctatcattcattttactaattctatttgtgttttatatgctgttaaacttatctattgagttcttaattccagttactatgtttttttggttttagattaatttcgctttgctaaaattgtccacatggttatctatttcacagttattttaaaggttatatttgacaattctagtatttatatcttctgtggatttattttgacacttggtcctgcttcttggtgtgcctggtaatttacggttgaatttcaggccatgggtggttgtttccttctacaaagagtattcactcagcccatctcctgagaaaatttatcctgtcctccagtaggcaaagaagaggcagatcactttcagttcaatcagagacggaagccggttttcagtctttgtaaggttcagctatctctgattatccctctcttcctaagtgaaagacttgagtatttacttttgcctgggcaggtcctgagttccaaaattcatttcctcagcactttgaaccttctgaaaagtaagctcagctctcctgcttctttctgctcaacacttgagcctattatccttctttgactaagaatcattgagcactttgaaggaaaaacacgtgcatagtgtcttagttctctgtttctcttctgtcctagcttttccatcctcaagtcttgtttgccttgataggctcttgctacaacttttgtcttctcagctctgtaaaactgttgaaagctctccttagctgccacgtgctgcttgcctttctgtttatgtttctgccaggcttttcagcatctacccctatactgctcaagagctggcaaataacccaagggagaagaccagaatgctaagtgtcaggttacctccatgaagtccttcctccggatttttggcacttcaagttctggctgccaaggcagctcttgaatgtcttagaacagatgaagtaacttaccagcttttctcctcctcttggcagggacattggtttcctaaaagttgctcagttttggccggaagtggaggtctaaagtttttggttttgttttcctgaattatctgtgttgattttggaatcagagtttggcaagccacaaaatagattgatagattcctatatttttctataatgtaaaatgagttgagcagcttttacattatcttttgaaagtttgaagtaacttttttttttaagatggaatctcactctgtcgcccaggctggagtgcagtggtgcgatcttggctcactgcaagctccacctcccgggttcacgccattctcctgcctcagcctccccagtagctgggastgcaggcccccgccaccacgcctggctagttttttgtatttttttagtagagacggggtttcactgtttagccacgatggtctcgatctcctgagctcgtgatccgcctgcctcggcctcccaaagtgctgggattacgggcgtgagccactgcgcscagcctgaaatagtttattaataaaatcatttggacatagtactctctctcccttcatagttgttctttggcaactttttctaatttctgattattagcttagtcagatttttctccctcctctctaataattttgataatatatttttgggtgggttgttttaatgcaatcattaatttcttctgtatttgccaagtttatttgttgtggagaatacataatattttaagatctctttgtgtttatrgcctctttttcacagataatgtttttaagttttttatttctctctctgggtttgttttttaatcagtgcttttaaagaactgattttttttttttttggatccagtctactgtttttattttttatttctgttaattattttgtgcttttaaaattaatcattttatcctacttggaacaagatgatatttgtgggtgtgttttttgctttttgtactttgtgctttacatatttttcttctttttaactttttttaaartatatttttattatattttaagttctagggtacatgtgcaggtttgttacatatgtatacatgtgccatgttggtgtgctgcacccattaacttgtcatttacattaggtatatatcctaatgttgtccctccsccatccccccaccccacaacaggccccggtgtgtgatgttccccttcctctgtccaagtgttctctttgttcaattcccacctctgagtgagaacatgtggtgtttggttttctgtccttgggatagtttgctgagaatgatggtttccagcttcatccatgtccctacaaaggacatgaactcatccttttaatggttgcatagtattccatggtgtmtatgtgccacattttcttaatccagtctatcattgatggacatttgggttggttccaagtctttgctattgtgaatagtgccacaataaacatatgtgtgcatgtgtctttatagcacatgcacatgtatgctttttttwaaattttttwaaaaaaattttcatataaggctatttttccccctgaactcagcttcagctgaattcttaagttttggtatgtgttggagttgttgtccttattttgtaggtagctgataatttggattaccttccttagccaagagttagttattggggtgtctgagactttatcttttagcaatttttttttgctaagataaataatttgcgtaatcttttagctgttgattttgcttttcattgttttctggacagactaaatagggggttaatttctgggttttggtatttattgagtatttctagtggactaggacttgttaaaatttttcggtaaatattccaggcatatatgaaaagaccatgttttgcatttgttattgtgaaaagttgtgactaccataggcaggtgaccaactgctttatgcattttcaataacttttatatgttttcaacaattttaaaaatgattaactgccctaaataagacattgctaggtattcagttgtgttctgttgttttttaaatcataaattaaaataagaataccagaggaaaattggaaactaaaagtataaataataaaacacacacacaacaatctcccataatcattccccactcttaatattttggtcaagtttctttagctctgttttgctatatatattttatttaggtacagttagaaccacagtgtatatccagtttacagcttaagctttaaccttatattttgactgtatttttctatcctcaatgttctcgatggtaatattcaaccatgtacagaaagaatgtaaaattagccccttctatgacttttctttttttgatggattgatttatatcagggtgagctaatttggtatccatgcccaaactgggtccctttgacctctcatgacagaactgggaataagaagaatgagagacaagggcagctcaaggacagggatcaactgttaagttgggggtagagatgaggatgaggttgttgttggtggtggttgtggtgttgggccagatggtgggtgaggggtgctggtaataatgcattgggttgtttttctaatagttatcttgtttattcttcacaagaattcttcagaaatatttcttattaaccctgtcttccatttgtgcaaaccaaggctctgagtgttgagtgaatagctctacatcacccacctgagttttttttttttttttttttttttttttttttttaatggagttttgctctgtcgcccaggctggakggcagtggcgcgatccgcctcccaggttcacgccattctcctgcctcagcctcccaagtagctggtactacaggcgcctgccaccaagcctggctaatatttttatatttttagtagagatggggtttcaccgtgttagtcaggatggtctcgacctgctgacctcgtgatctgcctgtctcggcctcccaaagtgctgggattacaggcgtgagccagcgcgcccggyccacccacctgagttttaaaggcagagccagggcacagacctacacctctggccccaagcctatgctcttttctttatattattattattattattattattattattattattattattattwaatcttcccagaatcacctgtgagtgtgaactggctccatggctgaactggtgttctctgtgtgtaacattctggtcactggggtggaggctggagtcacagagttcactgtgccctgcttttgaagagctcatggtttagtggagaaaatgaacaaatatagaatggattcaagaatcctgcctgagaattcaggaaaggttttgtggtactggtgtctaatgagtcttcagatgtgaataagggcttccaggtgggcagaggtaggaagggttccaatcagaaggaccagaggaagccataaataggtgtgtgcaggaaatggagatgagacttggcagggtgtatgtggctgcaaggcaaagaaactagggcacttactcagtggttctagaggggtctgtgaagatagcttttggttgtggctgtgactcttttgtctggtacttgcttctctggcctcagaagttgggaaggggacgaagctcaatcctgatgctagaagggacactccagaggggaagctgccaccccattcccaccagctactattcaccaccactaccactattcacgacaacattggtaacaacaatccctggcatttattaagcacgtaataggcccaggccttgtgtctagatttattaagcacgtgataggtccmggccttgtgtctagtcctttgcatgcgatatcttcttaaatccttcccctaaccctatgaggtataggtatttttattctccttttaataatgagaattctgaggcttggagaggttaaatacctaccccaggcctccctcccgagaaactgccaggctgggatttgaacccagactcttcagatgctagatgctgagatcctcactatggggtggttcatgcaaataaggaacatcgacaggtggtgggcctttccctaattttcttgaaattttgttttgttttattttggcctttctatcttttgttttattttgttttgctgattttcttttgagtacagagagagatttctatgccgtaagaaaactgacagcacacagatgatgataaatggcagccaaccctcagctctggggacacaacagggagtactggggattgtggcaaacccaggagaggtagtggcttttgaaatccagccagttgttaccatattggaatatagtcctagggctgctgatttgcagttctattaatttttttttaaagagaagagaagctgggaatctggactttaagtgaagtctgcaagttgttaaagtctgctcagttttttaagcaagctcagccaacaataatgggttatgataaaagcacagtgtcctagtgagtggtctctatgttgtgccatattgctggagaacctcctgcagcctcactggtgtccctccccctgccccacaccctcacacctgcaaaagggggccttctaagctacctggtagtgttctttcctggattgtctagttgttaagggaagatcccgcctgggctgtctgagccaggaattattcccagtctgtcttgggcacttggcttcctttgccctacattcttggggttacttttcctgtcttcagtactgatttagaacagtcagaagattccagaatacttgagaggatgcaaggaaaattgcttagaattcacactttagaaatctggctgtaagaagagaacaagaggtcactactggagtcggtgccaaatggaacatttcgagcttgtctaaagaagcctttttcttcccacagcacaattcactactgaattcatagcgcttgggattataaagtcagatctccctgggtcagcaggataggataatttggtatcaatttattatgttctcagcctgtgcttttgctcagacagagttggattttagtcccccatcatttgcggattgtcatgggaatggggagtaattgcccttattttcacgcaggtacagcccagcattttgtgcaggtacctgttggagcccaggggagaaggaaggtctcgggaacagagctagtcttctgaggtttgcttcctttccatccactctttacattccaaggacctgtgtgtggataatacagagacaagtgcgagctttaccttctgcctgcagcagccttgctgattgatagcaggagggggtatcctgacagtcacagggctgtgtagttgggtcgcggccacgtgttacttcttgtgggtgaaccagtggtgtcactggtaccccctgcccttccctgtcttctgggtcaagagggacaacataagtggaaggtcgctggagaaacccttccaagctgtcctggtcatagggaggattgaattgactccaaatttctccagaggcatcacagagcaatgctatcattgtggtattttgctaccaaaagctaaatctagggcagaaatcacctcttgctccaggttgataacttgcgmactgtcatctctttgtggtagtagtaataacaacaataattataacagctgacgtttactcactgtgttcctacagtacacagccatcatttgaagtgttttaatcctcacaccaactccatgaagggggtactgtttttatattctttttagggatgaggaattgaaggcacagaaaggtctggtggctttctcaaggccacacagctagtaagtgtcaggctgggattakgtactgcgggcactcttgattccagtctactggactgcttgttgctgtgggtatttgagtatttatgtgtttcttttggctcctgtttgcatggtcactggctgtcatagggaatggtgatcggcttttccagttgctcaggtgacacaaaagaggttggctggtgtcatggacagcacatgggatttggagttagaaggtctcagttaaaaaccctcaggcccctgcattctagctgggggaccctcgggcagkttgcttgaacctctcaccttgattggtttgttgaacttgcagggtgctagcagcacctgcccccagcgtgggggagtggttttgcagattaaagtgttgtgaatgcacttcctcgatggagggcctctagcaccatggtttcgtcatcctgtatctgtcactcaccctgtaggtcaggggtttttcacatttgtggcatcagagagacccttaggtttctgtttacagaggcatcccaggcctaggggagacaggtggctcagtggcactggttcctactgctaggcttgcagagctcactgcaggaggactgtgggtggggatccaggactgtccacttccttctcctgggggacatgctgccagctgtcacagagataacattaccgttctgttcctctgtcaactggaagagagcttgaccagaaaattcctttgctgtgttgacccatgccactaaaaccttagtttggtggagacccctatatggcctttgactgtaggtcttacagagctggaatattacctatcacatgggcaagttgcttaacctcctagagcctcagtttcttcacctgtattttgaagacaatgacattttcttgtaaggttgttgggaggattaaataaaatgatggaaataaagtaccttctatagggtgctcctacatgctaatttctttttttccttcttttggtcatcaccttgttgctttctcaggtcaggaggtctgaacagggcttcctgcagaaaggatatcttcatggtgtcagtgtaaagctggtgttaaaggatgcaatgtgtgaaggggaaagaaatctctgctttccagagctgtgctatggttaatagagttgcttagggaatggggaggtgaaaataaaggcaaagaggagcaggcctagggagcaggatgtcagcagtacacatgtgctaaccagacccagcgtgtgttccccagggctcctgccttttctgcgtctctggacttagaatcacactgatctgatctcagtcttttgctgcttctgtgtagctttgatgagttgctctaacttctctgtgcttcagtttctttattttccaaacaggaataatgatacctaattcctgggggttttgaacatattaaatgggtgaataaatgaatgaatgagtatcaggtgtctatatgactcactccagtagggaggttcccttttccctttgcagaagcagcagaagaggcaggaggaatagtacagtcccaccaccaccgcaaccactaagtgatctctttaccacttactgggtgccaagcctgtgttcaggcactttatcagcaccatttcttctggggagaccaggatgttgctttcagttcttacttatcttcatccttaattgattttgaaggggttaaattaaaaaaaatactaaaacaatttgaactgatatatattatagaaaatcttgatggactgagatgaaaggggcaaaaaaacccccaaaaaacaaacaaacaaacaaacaaaaaacagagaaaataatcttacttgcattaagatgacaacaaattaagatagagctcacaatgtctggggtttctgggggctaatgccaatcccgcttcactgggatgtaggtgagacctgtggctacacaagttttaagaaacatctctcctgacccattcatacaccccagttccaggttgaagtgctgctacttctgttagagctgatgaatcactgcagacagctgtggggctttttgtctgtggttccttgagatttagactgcaaataaagactttcacactttgtgacttcttttgaattctctctattttataaaacgaagagattttaagaacttaagaagataacactttctggtttgagggctccctcacaatgtctgcgcttaccatttaaggttttacttctgggagcagaagtattgggttttgctgtgtaattgtttcctgttttattgagggcttaacatggaacctggaggtttgcctaccatgaagttgatgttcaatacatgtaagtggaaacaaaaatgacgacatgctaccaaaggaaggttttgtgatttagaccatcaatgagtccgtccgtcggtccatccctccatacagccatccacccacctacccacccacccaccctcttacccatccatacatttattcatctttgtactcacctatcgattcatccacccattcatctacccatccacctatctgtccttcatttattcatccatccatccatccatccatccattctttttccatccttcacccatctacccactcacccattcatatatccactcatttatccactcaaccacccagtctttcattttacatctgtctatttgtcagtccatccatctgcccatctatccatcaatccatctatccatccacccactcactcacccacctaccctgtcacccatccatacatctcttcatccatgcactcacctacccattcatccaccctttctacccatccacctatctatcctccatccatccatccatccattcatccattcattctccatccatcctccacctatctacccactcacccatttatatatccactcattcatcccaacccacctactctttcattcatccatctattcattcgttagtgtatccatctattcatccatccatccatccatccatccatccatccatgcatccatcctccatccatcctccacccttctacccactcaaccatttatatatccactcgttcatcccctaacccacccactgttttattcatccatccatccatttgtcagtccatccatccatcccatccatccattaattctgtcaagtgaatattctggaatgtgtttaatcaatccttgttgttggacattaggtagtgttaaagtgtttcctgttgatgttgatgcttctttagtgacatcttagtggttaagagtctgggctaggtaggcacactgcctgggtttgcattctgaccccacctcgtattgtgtgaccttggatgattcttgatctctgtatatctcagttttctcatctgtaaaagtagagattacattaggatctgtttcttattttttaaagggttaaaatacacaatccatttgaagcatagaactgtgcctagtaagtgcacatggttcccataacgtggtgatgttgaaaccttgcacattgttctggttatttccttaggctgttttctgaaagtggaattactaaccaaaacatgtaactctttcaaaggtttttcatgggcgttgccaaattgtccttcaggaatgttgtaaattagtccaacattaacagctcccccgtatgagaatgcccattttacctgaacatctgccaatgctgggcgattatttaatttttgccaattttgtgaaaattgccaattcatttttttcaatacttttattactggtgaatttaaatatcttttatttgtttactggtgaatttaaatatctgttgtttgtttaaatatcttttgttttatttattttatttagatatcatctattaccctcacacacttctttttcgtgaccttttccattaatatgttcatctgtttcttagatcatagaattcatttcagtattaaaaataactttaccacctatgctgcaaatattttccccataatgtttttttaaaacctagattatgacactttttgatatatgaaaatttaaaatgtttaataaaagcttttatgtttttctgtaagcytagaccttgtctgtctctaaatcacaagtgtgtgtgtgcattttttttttacatttaattcttgaggtaaattggattcatgttggttaatgatataaggtaggcattttataatttccctttacttaaccagttgtcccaatcccactttattgaatctagaatctaaaataccattttattatatataaaattcttatacacacatcttatatagtacatgttatatatatattatgtatatatatgtttctgggctttttatgcaatttggttttttgtctatgcttacttactaccttattgtagctttattttttaataattggcagtagaagtcttgaattctttttttgtttgtttgtttcagaaatttctgggctattcctgtttgttatttacttaaaataaacttgtcaagtttaaaaaatccagatggggttttgattgaaattgctttaagttgaaaaaattaacatgtttatagtaatgaaacttcccatccacaaatatagaagtgtctctatttggtaaaacctctttttttttttttagtgtatcacagttaagttttgtggattgcttcatttaatcctgcacatttctcattaaatatatttctaagcattttctattttcgttgcctttataaatagactttttttctactatattttctcactggttattactgattgttgattagatctgtatttgggaactacacatctttctgaatatttaaattcattctaaagtatttcagttcattcacttgggctgtgaagatatatgactgtgtatgcaaataatattttagagattcttttgtatagatcacttctcatttttatttcctgccttattgcattggctagaagttctaaactgatattaaaaataatggttttgaatgtcaggcttgaatttttaatgctgaaattttgtgtactacagaacttggatgggtgggtggtcatagttgtacttttgaattaggccttttaaatggttctcaaatacatatgtctgttcatatgtctggctgtttctatactcacttcacaacctcctccaccgtagaagtgaaaataaagaatgagaatatatctcagtaggatcatgggctacatgatggaagttttagtggggaaaacaagtggcaagtttcatccactctggtttttggtgcatcttcctggacgtgctcattccacagagcaaggttagcaaggaacactgaactgacaaacttgtccatgtggttgtcaatcctgcccgatttagtcagcctctttttctgagttagagacctgtaagtagcttttctgtcttctgtaatttctctctgcacccgtcccctcctctggcacccaccaccctccacagccacatggggaagaccctagcaaagacagtgacattgcccccaagtcgtttcatcctgggcatcaatgtacgtgactcagctttgtgctccacagacttgggctgctttgttggtatagcccagatcagcatttcaggtaattgggctgtaattggcctgccgtggacagcaggtccccagtgtgaggcttctgtttttggggagtttccctgattggcagggagtaaggcagtgacctctctgtctctctgagagcagcgcttctatgactcattctggctcccacctcccacacctgagctctgagctggtgcgtcttgttccatgggctggtgtgggtggcggtgtggatggcagagcaggatgccagcacactcctgggaggcagtgctagggtctctctggtgtgctgggtgctatcctgggactgctggtgcccggctgctgtgtgaatctgccccgctggggcttagctcctgatcttttgtcctatgacacctccaaatttctccctccttcccactgacatttctttctttagctcttgcatctccccattctattcttttttagattgtgataaaatacatataacataaaatttaccatcttaaccatttttaagtgtgcatttccgaggtattaagtacatttacattgatgtgcagtaatcaccactgtccacccacagaactcttttcatcttgcaaaactgaatctctgtccccattaaacactaatcccacattctccccttctcccccagtccttggtaaccacgattccactttctgtctctatgaaataaaatactctagggacctcagataagtggaatcatacagtcttttcatgaytggcttatttcattcagcgtgacgtcctcagcgttcatccatattgaagtatatgtcagaatttacttccctttaaaggctgactatactccattgtgtgtgtataccacgttttgtttatccattcatccaytgatggaaaatcgggttgcttccacctttttcaccttgtgaaatactcctctgatcttttacagctgaagacaatagtggtcaaagcatgtagcgctttttttacaaagttgttcctatgaattttcacaagaattagaaatttgccactatcatcatctccattttatagatgaggaaactgaagcttggcgaagttaaataatttgcccaaagttacctttaaaaaatagcttaactgagatatgttcacataccatatgactcaccaattgaaagtgtacaagtcagtgatttttagtgtatttacagagttgtgcaacatcaccacagttaattgtagcatatttttatcacctgaaaaagaaacggtataccctttagttatcacccgcctattcttgtgtccccaccttagccctggcaactgcaaatctgctttctatccctatggatttgcctattctggaatttcatatgaatagactggcacaatgtatagtctcttgtgtctggcttttttcacttagcataatattttctaattctcctagttgtagcatgtagcattagtactcatttctttttgtttcctaaaattcctttttttaaaaaaaaaatagacatgggattactgggtatatacccaaggaattataaatcattctaccataaagacagatgcgcatgtatgtttattgcagcactattcaaaatagtaaagacttgtaaccaacccgaatgcccaccagtgatagactggataaagaaaatgtggcacatatacaccatggaatactatgcagccataaaaaaggatgggttcatgtcctttgcagggacatggatgaagctggaaaccatcattctcagcaaactaacacagaaacagaaaaccaaacactgcatgttctcactcatagtgggagttgaacagtgagaacacatggacacagggaggggaacatcacacatggggcctgtcggggggctgggggctaggggagggatagctttaggagaaatgcccaatgtagatgacaggttgatgggtgcagcaaaccaccatggcacatgtatacctatgtaacaaacctgcacgttctgcacatgtaacccagaacttaaagtataaaacaacaacaacaacaacaaccagtccctaaatgcattagaaaaaagaatctctcccatgaggctgggcattctttagagaaatggttctcaaagtgtggttcccagacctggggacttggaaatgcagattctcagccttaccccagacctactgaatcggaaactctggatgtgcagcccagccatctgtgtcttaacaaagccttcacctgatcctgatgcacaccaaagtttgagaaccagtgctttggagaaacttgccaagaaagagacaaagagaaaaccaccaccactagcagcagcagcaacagcagcaacaacagtccaggcaacagctggtatgaagagccatgctcacggtacctagagcaaggtacagtttaatacagtggctgaagagctcacgctctgcaattctcacagccctgggtttgaaccccagctttggtacttgctggctgccacttcccttaacccctgaatctgcaaaatagggataatgattcctcccttttaaggttgttccaaggactcggtgagaccttacctgtaaggcacttagcacagagcagcacattaagtaaaagccactataccagaaaggaaactcaagcaaatccatcctctgcaaaagtgttaacatctctgtgagttcaacatcctgtggaacagcagtcyacatggggtacttacacactggtaggtacaagcagacttggtctgggggcatggatagatttgtgaggctcaatttcaagatcctcagttttcctacaggctgtcctgaaactgatctgcctgcaaagggggcatgaagcaaattctctttccttgtcttctctttccacaggagcccttctcccacgtaacaaaagaaaggcagagtctcagccatcccaaatctgaatacgatgcatcatgtaatataaatttccagggctccaacagaggataaatggaaatactgaggttgtgaacaatgattagataataaatccatgtgcaagtgaacagttcaaatgactgggtaacaagtccttatccaagtcaagtggttcgtacataattgaaggaagccctaattgggctgtaagttgatagatcattaaaaataatttttgatgattaaaaaaatagagatgacgtctcactatgttggccagtctcatcttgaactcctagactcaagtgatcctcccactttggcctcctaaagtgctggggtgacaggtgtgagccactatacccagccttattttctgagattactttttgaactcagacatctgagtccacagtcccagtgttcagccacattgctgtcctgtctcctccttcaaacattgtatacaagttcatgtttacctgttgatatcttcccagcttcccctcatattcaagagactgggggttcagctttgtacctctcttgctcactgtcatgttgcacataagggcttcgtaaattaaaaattagtaacttgaaaawaagtgcttagtctgttgaatgctgtgtgttggacagtgttgcaaactaaactcacgcaaggagtcacttgtgttagtattctgtgcatgatggttacgtatcgtgttttgccgttagaaacgagaacagacaaatgagaacatgttcgttaaagggctctgaaacwgtgtgaattatmaatgtattgatggtggggatgtgtcaccatttgcagttagrttcaggagctgatgaacaacccacgagatggaggtttgcacacagtggccttgggcctgtggccagctgtgacagctgggagttccacagtctcaaggtcactggcctatgtcataaaaggctggttactgaggacaagctgggaaggtgacccttagtccagcggatggagccacctggggtgaggagtaattacytgcttgaggcccctgagctactaagtgcagacccgagtctctgtgattcctaagtgcctgccttgccctgctctctctagccttggatgtggacaggctgtgttggaggctggttagggaccaaaacattctctgaaagtaggagctgtttgcagctccctgactgcaggtttcttttgaagaggcaatgcaaatggaaggggtggtctgaaagcagtgccatggcttcagagtactctgtcgagagtccagtgattattgctatgtggtccctgagaaaaaaaggtctatgcacaaaacttcccggagcttttctagaatagacaccagagctctagttggagcctgggggccattccctgggggtctgggctgcctctgagaattccctcccttccctctagccagatcactggagccttatagtatcaaacatggggatggtattaatcactcacattcagtgagtgcccattcagtgccaggcacgtaactaagtgctttgcatcatttagctcattaatttttgacaatgtcgtggttattattaacttcattttacagatgaggaaactgatgcatagagaaggggaaaacttgtaaaactctttaaggatgtcactcagactgtactttatttttctcagaaaaaaatttaatttatgtaaagactcattgtaacatggagtagagacaatatgaattttctttgtggcttactggcaaatacagtagcttgggcatgatctattcttggttgccatgtttctcacttttgtggttcatctcactttgtttatctaattggaatctctttttctgccattattttgtgttcttctgagaagttctcacccttgagggtggacagaggtaagcaagaggcatggctgggagaaacaactaagtatcaaggaagaagttaaggttgggagataaatgtggcttttgtgatgatttgacgcagggcaccttcatggaattgatgaaggaaacagaggaggaarctcagtgctcagggatcactgggaagcctttgaatggaggggcatcaacagcatcatagcctgggaggaccaaggattgtcagtcattggaccatatcgtggtggcaggtccattatgacttctagctttaaattgaaracaccgtagcagcaggttacaaaattaggaaccagttctagagggaatgtgtaatagtatgtggcagtgatccattcaacacctgcatttcctagaatgcattcctaagcttaagcaggtatatctgtgctcccagggcccaacatggtgtctttcacatagtgggtgcttatgcagtaaacccccttgaatgagtaagttcaagccccatgcctttaattgtcaaataggctgactccctaggagaaaggcttctccttagctgccttcccaaacctgcttccctattctgagtttctctccagttgctttccacctagatgtcctctaattacagctactctagatccacaccatgtctggtttccaaatcttccatcaccctcaatgcattagtctttagtgttgttgtcctcatggctcatggatctgtcttaactatctcaacctcgtgcctatggaaagtgttcctcaaaaacttcatggtacagacacaaagatgattaygaccccgaagtcctactccatgtagcgtggctaccrtggttctaacttgaaatctccttgcctttccccggcccccaaccaggaatatgcaacaagatttatatattggccaaataaagtctctgggtaactctattgaaatacggagctttgcatgatgggattccctaatatagtccatcagaagataactgatatgagatgcccatccaagtatctaaaggaagtatggggtcttggtattactaaattccttgactgtaactttttatagattttctaatctgttaccttaattcctggcaatgattagttagcaaagccagtttcccattcagaataatttctgaaaggccttgtgggtcttgccatgaggagtagacttaatcctgttggggagtcattgcagagttttaagagggcaaaaagacaatacaatttatattttagaaagctcatcctggcttctgagtggagatgagattggaggaaggagattgaaggcagaaaatgagttgggagccattgcaatagttctggttaaaggcaatcactgggtctgtgatctgttagaagagcttcttctaacatcctgacagttgcatcactgcattactttatctttagagcacctatgggcagcttcctttgtggtgacaactgctttacttgagtttattgagaaagcacttgmgaagaggcacatccaagatacttcatttcctcttgctcaggcatttctccatcttggcatagtgatgatgtccccagggcaaggggacttaaaaactgcagcttcctactgcgtataaagagaggacacagatgtcttcaaggaagcctccataaacctgtccagggaaccttggagaatgtccagaattttcaacatttttggaatgttagtatagggcaaagccgttgcaagcccaaatggcaagatgaaactattcacagtgcttctacaagatatataaaatgatttccaactcattccatccctgaccgctccccagcctgctgcaactatggcccctttgagattcttggggttacttgaaatgcacacagtggagattctgcagtaatatttaagagctttttttgaccactgattttgtgaatccaacttctttgtctcctcctaactctatacttctcccagggaactgcctcaaccttgcccacaagagacatcagctgttcagggttgtggggtagaaatggctgtagaaagaacgttatcagtagatataggctacattggcttgttgctataacagtcactcttttctgtggatctttgagtctgttttgatcaatggctttatcacatcttttgggacactaaatagataatgatacttcacgacacaattcaaaataattaaaaaataatagatgtgtgtttatgtgtgtgtgtattttccattcatcaactttcccaacttgacccttgtttagagaggttataaccaatccaaagaaaatgtgcagaccttaagagaggttagtgttgtttttggtaacaattggaataaaaggaaattcttacatcacagtctgccaattcaaagtcatcttcaaatctcatgtaatgcccggattcttaggcttccttgtaaatgttttcatacattaatctacttagttatttcaggtattttaaaattgtattcattctttggtaggtaaaacatgctcatggtacaaaattcaaaaggagcaaaagggtaaataggtaaagtagttcccttcagacatctcccagacataactagagttagttaccagttttgtgaacttccttccaaagatattctgtgcatattcaagcttatatgtttatagagaaacctttttttcttgtttgggacactgtgtttttttccgtattgcaacctgtggcaatcagaaggctctttccaacacgatgactaaaagggcctccaaacttgagtgtaactttttatgcaagggacataccatatgtcaccgaacccaagataagaggtcccactragacagaaaactgtgcagcccattaaactatgatactctctcagttgtagaatgtatcctgatttcagagatgttaaaatgtggaaaaagtgttttcatcatcagtgaaatgtggtacttcatgttctcattattcagtgtcatccacacactgtcatcattatggawttcgtcaataaaaatgatgactctcataatttgcattatgactgtctatttaattctggagagaaaagtggctgtgaatacagagccttgcactatccttggccagaaaatttctatcctgtttcaatctgtgctgactttccttgcggcctagtgcatctctgtcaccctggatccccttcaccatcagcttggggatcttttgcctttttttttttttaactgtgctgcatctcttatgtgttgggtttcatgtatgctctttgttgatttatatccttgttatggtggagcacatcctcaagtagattcttcagagagttagatggaaagttaacctttagagatttcgcatttctgaaaatgtcttcatcctgctttcccatctgattgatgatttggctaagtatagaattctaggttgagaatcatttttgttaagattttgaaagattgcttccagtgttcaatgttgctgttgagaaatctgaagccattctgattcctggttcttccactgtaaaactattttgctctccagaagatttcacagtcttatctttgaaatcccattctgaatttttatagggatatgtgctgggttaggcctatttytggtcattgtgtggggttcctggtgggctctttgaatctggaaacacatattctttgttgtgggaatttttcagaattatgttattgattttctcctttttagttatctgttctcacttttttgaacttttgttattcagatgttggatttcttggtcctctaaatttcttgcatttcctctcctgtactccttctgattgtgttactgtcttatatttcagaagattcctcaatttcatcttctaatccttctgcttttgcgctgatgtttttagttttcaagagcttcactttttggttttgttaatattccttttttatttcatcctgttcttattttgcatgtcaattgttttctcttgtctctggaaggatacttatttaatagctttatggaagtataatttatgtacaacaatttgtacatatttaaagcataacatttgataagctttgacatattttacctgggaagttgtcacctctgtcagtctaatgaacatatctatcattttccagatgtttcctcttgcctccttgtaatctatctactctttccactccttcctaccctcattaaccatactgatctgttttctgccagtgcagattagtttacattttcacaattttatataaatgtgatcatacaatgtgtgctcccttttgtctggcttctttaagtataattactctgagattcatccatgttcttgtgtgtatcagtaattcattcttttttatatctaagtaatagctcattgcttagatacaccccwacatatttatccatcacttattgccagtattttgttgaggatttttgcatcaatgttcatcaagggtattggtctaaaattcttttttttggttgtgtctctgcccggctttggtatcaggatgatgctggcctcataaaatgagttagggaggattccctctttttctattgattggaatagtttcagaaggaatggtaccagttcctccttgtacctctggtagaattcggctgtgaatccatctggtcctggactctttttggttggcaagctattgattattgccacaatttcagctcctgttattggtctattcagagattcaacttcttcctggtttagtcttgggagagtgtatgtgtcgaggaatttatccatttcttctagattttctagtttatttgcgtagaggtgtttgtagcattctctratggcagtttgtatttctgtgggatcggtggtgatatcccctttatcattttttattgcatctgtttgattcttctctctttttttctttattagtcttgctagcggtctatcaattttgttgatcctttcaaaaaactagatcctggattcattaattttttgaagggttttttgtgtctctatttccttcagttctgctctgatcttagttatttcttgccttctgctagcttttgaatgtgtttgctcttgcttttctagttcttttaattgtgatgttagggtgtcagttttggatctttcctgctttctcttgtgggcatttagtgctataaatttccctctacccactgctttgaatgcgtcccagagattctggtatgttgtgtctttgttctcgttggtttcaaagaacatctttatttctgccttcatttcgttatgcacccagtagtcatttaggagcaggttgttcagtttccatgtagttgagyggytttgagtgagtttcttaatcctgagttctagtttgattgcactgtggtctgagagatagtttgttataatttctgttcttttatatttgccgaggagagctttacttccaactatgtggtcaattttggaataggtgtggtgtggtgctgaaaaaaatgtatattctgttgatttgggctggagatttctgtagatgtgtattaggtctgcttggtgcagagctgagttcaattcctgggtatccttgttgactttctgtctcgttgatctgtctaatgttgacagtggggtgttaaagtctcccattattactgtgtgggagtctmagtctctttgtaggtcactcaggacttgctttaggaatctgggtgctcctgtattggatgcgtatatatttaggatagttagctcttcttgttgaattgatccctttaccattatgtaatggccttctttgtctcttttgatctttgttggtttaaagtctgttttatcagagactaggattgcaacccctgcctttttttgttttccatttgcttggtagatcttcctccatccttttattttgagcctatgtgtgtctctgcacgtgaaatgggtttcctgaatacaacacactgaagggtcttaactctttatccaatttgccagtgtgtgtcttttaattggagcatttagtccatttacatttaaagttaatattgttatgtgtgaatttgaacctgtcattatgatgttagctggttattttctcgttagttgatgcagtttcttcctagtctcgatggtctttacattttggcatgattttgcagtggctggtaccggttgttcctttccatgtttagcgcttccttcaggagctcttttagggcaggcctggtggtgacaaaatctctcagcatttgcttgtctgtaaagtattttatttctccttcacttatgaagcttagtttggctggatatgaaattctgggttgaaaattcttttctttaagaatgttgaatattggcccccactctcttctggcttgtagagtttctgccgagagatccgctcgctgttagtctgatgggcttccctttgtgggtaacccgacctttctctctggctgcccttaacattttttccttcatttcaactttggtgaatctgacaattatgtgtcttggagttgctcttcttgaggagtatctttgtggcattctctgtatttcctgaatctgaatgttggcctgccttgctagattgggcaagttctcctggatgatatcctgcagagtgttttccaacttggttccattctccccrtcactttcaggtacaccaatcagacgtagatttgatcttttcaaatagtcccatatttcttggaggctttgttcgtttctttttattcttttttctctaaacttcccttctcgcttcatttcattcatttcatcttccatcactgataccctttcttccagttgatcgcatcggctcctgaggcttctgcattcttcaygtagttctcgagctttggctttcagctccatcagctcctttaagcacttctctgtattggttattctagttatacattcktctaaatttttttcaaagtttttaacttctttgcctttggtttgaatttcctcctgtagctygtagtttgatcgtctgaagccttcttctctcagctcgtcaaagtcattccccrtccagctttgttccattgctggtgaggaactgccatcctttggaggaggagaggtgctctgctttttagagtttccagtttttctgctctgtttttttcccacctttgtggtttttatctacttttggtctttgatgatggtgatgtacagatgggtttttggtatgcatgtcctttctgtttgttagttttccttctaacagacaggaccctcagctgcaagtctgttggagtacctggccgtgtgaggtgttagtctgcccctgctggggggtgcctttcagttaggctgctcgggggttaggggtcagggacccacttgaggaggcagtctgcccattctcagatctcccgctgcgtgctgggagaaccactgttctcttcaaagctgtcagacagggacatttaagtctgcagaggttactgctgtctttttgttttgtctgtgccctgcccccagaggtggagcctacagaggcaggcaggcctccttgagctgtggtgggctccacccagttcgagcttcctggctgctttgtttacctaagcaagcctgggcaatggcaggcgcccctccccgagcctcgcttccaccttgcagtttgatctcagattgctgtgctagcaatcagcgagactccgtgggcgtaggaccttccgagccatgtgcgggatataatctcctggtgcgccgttttttaagcccctcggaaaagcgcagtattcgggtgggagtgacccgattttccaggtgccgtctgtcacccctttccttgactaggaaacggaactccctgaccccttgcgcttsccgagtgaggcaatgcctcgccctgctttggctcgggcacggtgcgtgcacccagtgacctgtgcccactgtctggcactccctagtgagatgaacccggtacctcagatggaaatgcagaaatcacccgtcttctgcgtcactcacgctgggagctgtagactggagctgttcctatttggccatcttggctcccagaacttttttttctttttgagatkgtcttgctctcttgcccaggcacagtcatggctcactgcagcctctaccacctgggctccagcaatcctcccacatcagtctcttgggtagctgggactataggcacataccagcatgcctagctaatttttaaattttttgtagaggcagcatctcattatgtgcccaggctggtcttgaactcctgggctcaagtgatcctcctgcctcagcctccaaagtgttgggattataggcatgagycaccatgcttagctgtttgtttgtttgttttgtgattgttgttgttgttgctattgatacttccttactttctggcactgcaggatgctccaggctcattttgtatattccatgtttcaaccctagagtcaaacrtttttctaagaagcccttgctccttttattggagaatgatattagaaccaagatctgaatgctaggtattattcatctctttctttgtgtttaagctaacaaatagttgcagtttaatgaggaaagatgccttggctgatctttcattcagtaaatatgtattgmatgtcaagctttgtacttgggattaaatttttaattgtttaaaacttgctctaaatagaacttcagttttaaaatacatagcaattagaaatttttttcagaattcaatgttattttagtaaaatgttatagtaaattacagtaggatttatacagttattgtttgttgtgccaaaatcagtgtctttgttttatgaagtctttcatttcattgttggttttaaaaacaaatgcttcttactgggagaaaacctatggatgaatattgatttgagttacaaaatgttcctcraatccctttgcaacatgtatgtggaaaattttaaatgtacgcaaaaatagaatcttatacggaactcctatgaacccattatcctgcctcaaccgtttgaactgatgagcaatcttatttcatcaaacttgacattattttctggattagcaaattatttttgaacttaaaatagatgtcactgtctttttgtgactcagacatacataatggaggaagcttaaataaattctaaggaacacttaacagttggcctttgtaagagcaggtgagtgactaagtgtcatcccacttcagaagatgaaaacttcatgccccaatgtcttagaagctgtgggttgaatggcaccartaatwtttgtaacaagtgagaatttgaaaaaaatggggattccctcatccgggtcgtagaattcagattccagtcctcttgaatagcgggcagcgtgcttgttgctaaagcgcgttactcacactgtggttggctggctttcaggagcaaaatatgccaagtgttttttcagttcagtccgggttagggtttctcaggtcagtcgtacagagtttcttgtggactgctggaacttctgcatgtagcttaggccacagcaactaagcacagttcttggacatgaaagtaagaatttgaaatatgtggactgagattcgtagactgtaggatgagatttgtagactcaattatccaatgaatgtttcctgagcacctactgtgggccaggagctatgctggggacacagcagtgaacaggacagatatagagccagctacatggggcttgcagtctaggggtagaagtggatcgtcaccatgaatcccacaaatcgctaattactgttgcaataagtgttgtaaagggatagaaaagagtgctcaaatatrcgggtctccaattttatctaagatgtcagggatgtcagggaagatgctccaaggaagtgacattaaactaggactgaagggatgaatagatgttggtgaggcaaagtgtgtgtgtgtatgtgtgtgtgtatgtgtatgtgtatgtgtatgtgtatgtgttgcacaggtgtatgggagttcagagtgttccagtgaaagggaacaatgcccaccaaggctctgtggtgggaaaggacagaacatgtccttggaaccgatagaaggtgactcagttgaagtgtggtccaggagtggggcaggcaggtggcatctagaccatgcttaactcagtagactgctcagaagtctggatttcattcttagttcagtgggaaaccaccaaagggtttgaggacacgatcttacagagttggctttacagtttaaaagattcccctggccaccctatgaagagcacattggccatgggtcaagactgtagacaagaagaccatgtgggaagctgccacaaaggtctgggtgagaggtttggtgacttggtgatgcagagaagtggatggatctgagatgtaattcacagtgttagtgtcatgactttcaaactttcttgactgtgaactatagaaagaaatctatgttgtatcatgggcctagtacacaaatgcatgtgtgtatatgtatgtgaaacaaagccttcataaaacaatattacaggcaatacacactgatatagttcatgccaggtcatgaagtgccacatgtgtgtcatgtgtgtgttatgtgcttgaggtgggtggagagtgttaggggtcttcatgaactatgacaaggagtcaggatcttcatgctgcagggagtagaagagctccagagttttacagattttttctttgagagagagaaccttaatggcatagaaaaaagagccacctgatagcaatgctaagacagaaataatttctctaggtccttctactccatttcttcctcctcctcctcttcctcttcccatcttcctctctctcttctcctttctttcctcttcctttctcctcctcctcttcctctttctcctcatcttcttcctctttctccccctcctcttcctctttcttctcctcttccttcccctcctcctctcctcttcctctttgtctcctcctcctcttcttctttctcttcttttttatctcctctttctttcttctcctttctcttcctcttctttttccttcctctcctcttttcctcctcttccttctttcttcctcttcatcttctttctcttcctcctcccctcttcctctttctcttcttgcttcttcctctttctctccttgcttcttcctctctctccctcctctttctcccccctttttctcctcttcctcttcttctccactccttctcctccttccccccatttctcctcttcttccttctcccttcctcttcctcctctttctcctgttcctcactctcctctgtttcttcttcttcagcaggaattggcagactttctaccaatgccagagagtaaatattttcaatttttcaggtcatttggtctctgtcaccactactcatgttctgcagttttgaaagtagctatagaagtatgtaaacgaatggcacagctgtgttatcaataaaactttatttactgtagcagctgttaggctggatgcagcttgtaggctatggtttgctgactttatcctaaggaacatgggggactatcctgtggaatcagtatctcattgggataagatcagtgtgctggggcatggggtcagtctcacctgggctgtggtggctcttgggtgaggctgacacttggagagtttgcatttggggaacctggagtttagaagccggaattagtgttcttacttagaaacatcccagcttgcacctcagattcagccacagacagaatgcaaactgtaaattgaatgttcatctcagctcctcagcgctgcaagcccaaagctggacttgatgccaagctagggtttacttaatacaacccttctgggcacagctccctgtgtaggagccatacataggtgaatgcagcctttgtgccaggaggaaaagctccgagaggagatgccttgagatggcttcttggggcggcttttcctctctccaggaattcctgggcctatagaccacacatctaagtgcacttggaagcaaatgggtagcccagggaggtgcctgtggtgggtacatagtccacagggactgtagaaagcgccctgccgagtgtggcagttcagaggcttcaccctgcagcagaaaagggttatggccccatggcccctctatgtcttctccttctgctctgcttgtggaaatcctccttgccctctaagggccaactcccgagtcttctcttctatggggactgaatcctccagccaagaataattttccctcctgtgaactcaaccctttgtatgttggaagcttagggcaccargtatgctcatgagtagggccgtagtctgtctcctggcatggattataaaattgaagagtgcatggactgtggttaatccatccttgaattccagctcctagccctgtacaaagaaggagcrcagtatcttggagagtcagtgtggtgttttgaaaagggcctggttttcggatgtctgtcagtttcttcctctgtaaccttgggcaactttgactttttggatcctcagttttctaatctgtaaaataggcctaagaaaactaggcttagttatgttctgacaattacagatacaatatacatgcagcttgtgtgcccattccgttgttgatgactttgccgttgttggctcgataaggtgtctcatccagaggagctgggaagtgtttgggagatcagggtgagttcctgggtaaattctcaggactcagcagtgtgtttgctttcattgactctaagacactacagattataagatgctctgttattttatgtacctctgaataatagaatcacctagtgagcrttcacrtgtcttggtgcccagccctgctccagatcaataacatcagtaatctggggggtggacattggttttttcattcacttatttattcattttattcattttcttcttttttttaaatcagtatttaaaaacctctttgggtgattctattttgcagccaatattaagaatcattgtacttttaaaagaaacacctctattatatgactcaatgcttccttatcactgggaatttttattttaatttgtttatagagcccttttagacattctctcagctcctgaggggtccataaccacttcttcctcaaagaagggtctcctgagaattttgtaacagctaacagacaccagaactgggtagtggctaggacctcttcgtcgctgtgcctggaatacagtccctgaatttgcagcccagcaggttcagtgagtttggggagaggtggacagggcaaaggaactgtggggactgcatggcaccaggagaaggatggggatggtcaccggggaggggacagagcagctgtatcttctgtcttccctgtggtcactgctcagcttcagtcctggagaagctgaagggtggtctagctgggccattgttaggcatgcttgatttcaatcctgattacagagatgataaaatgggaaactgtgcatattttagaatcagtggaatatggtggatcacgtgctagatataaacctgcttagaagaaagtggtcaccagcagcttggctttgcaaaggatgactgggctcctgcagacaaggcagaacccagagctcaagaagcagtttggagagtcatgatcgccactctcccaaatagtcactgatggaaggacttccccatctgatactattttgctgcccaaacctgctcatgccttggaaaagaagcttgtgaatcagggatgattttgaatccaggccccagcgtgtgtttgctacatgacttcaggcaaaccctttaatttttctgagcctcggttttcttaggtatcaaatgggaatgagtcaccacctcagaggactgttgggaggattaaataaattactgcaagtaaaatatctaacatgtgcagacagcaaacagctagcacatgacagtgattagtttcttagcactcttattctgtcattggttgttcttagtagcactgggatttttgtacttcttgttttggtcaagaagtgggggcactgagaaggaagcccctaactgctggggaggagctgacattttcctggggtcttggcggaaatgtgtttactgcacttagggtctctccaggatgagctcattattttctctctgtagccacttccttataatgaaatgatatgggttctttctggttattttagtctattcccttatttaagataagttaccccacttgtgactctaaagaaagcctttcagcaaccacacatgctcaatttctgaagcggacggctctcagggtatatttttaaaccagaaacaacattacaagtggtagcaggattcccaggccagcctactgaaatcttcactcactaatgctgctgaatgaaagtaataataagtggcattatcagctgctgcctacactcatttatacattggtccaagaggaaaatgcaccctgaatcccaggaagaaatgccaggagcatgttttcccagcagcaacatcttgtttcagaagccacgttgaagggattaatggggatggatactcctgagcaaaataccctcaacttttaaagagttgtcagcagagaacagtgtccttgctctgtagacgagcataccctcctttctagagyatttcctgttggagtcaaatgacactgatgacaaggtttgtcagaggcatttgtgagaataggttgtttttgctctacctggtcattggatactacatggtgactgttcacagtcatggcagggattgacatcaaatctgcggggcaaaacccagtgcctagtttttgtctctttgcttccttgatgttctggcatttagagtgccgatgactataggtgctttccaggattcagcacggaatccaggcatgtccacagagaggggagtcatgaggggaactggaagaagggccctctgagcaagtgttcccctcctggatctgtgtggatattgtgtagtttcagggcccgagagatggctcaaattcttatgttcccagtttcattctctacytgcccatttctgcctaaatattatttgctcgaccactaaaggctggtggctttacagtgtcaaggcatgggagaggggacactgttgggaaatgagccagccacagggaatatcaatgatagatttgaatcccttcccagatgatcagggtttgggtacagaggagggcctttggcctctctatgccaggggagggccagggttggacagcaggtagccaaggcaggtcccaacaatgtctttggtacccycttgggctgattctgttgtcatcatccctgtgtggacagacacgggctgtgaacaaggcacttcctgtcttcatgactacatagtgtgaagcttggtggcgacagcctccttgtttcctgccactgtgtctgggttcacagtagagaggacaagacataggggttcagaattggggtctgggtggccttgttttctcctgggcaacccaaggtacagatacttgtttgtctcaattctaagttgttggctaggccccatgtgatrgaagcaggaactgcctgcagagctgaaaattatctagtgattctcaaaatttagtgcacacaaatgacgaggggtcttgttaaaatgaacccctattcctccatgatgatgtagaaaattaaaatgatgaagatcatgatgatcctggcttgtgtcaagcccctaccctgtgctgagtgcactcacttaatacagcaacttgtgggtcattcgtgttcctagtcccatttacaaatggagaaacggaggcactgagcagttagaagacttgctcaaggcccacacagattcctgctcccagcctcttccggggcctgggaatcttcagttttacaggtacctctggggatcctcagactccagtttgagaaacattgcctttgcattcacgggggtcagtgactgtgtctttcttgctcagcactctatctctagggctttgcattggccaggcacgtaacaggtgttcagtacttgctgaaggaatgaatgagtaatgttcgcttccaaggagtccctggggaatctcaggagctgctgcccaattctctgggagcgttaagtcgtcaagcccagtattcatgccctagttctgacaactttggatttactgccaagaacaattctatctggtttcctggttctgctctctggatccctacattgttccctggctctaagtccttccctccttagtggcctccctgtgtctctagaccccaggcgctcccctgctcttgtcagtacctcttttagggactgggattctgtctccaacagcggtgtggctgctgggcaggatttccggatgctgccctctggcccattgttctgggttctccatcccactatccacgtgtctgttgggacaccacctaccatctactgctgtggccttgagtgtcaggttacacttgccagactggacttccagctccttcagctgcattctttttccatagtggccaattctagctcctgarcctggctgccatccagcttgccttgtcacggagcagtaaatcagctctgttttaatatagccaggtgatgcagatcttaggcatcagagtgggcaggcttgggttcaacttttggctcttagggtgagcactttaattctcacagcctcagtttccacacctgtaaattakgtatgatagtcctaacctccccttcagtrggttgatgtgaggattaaatgggattgtgcacataaggtaatagttcagttttaactattatgtgagtttgccatccatctttaaacaagtaatgaattttattttaagatgattttgacaatgaagattttagattaatattttayttcaaattggtccttcaattttgtgtgaagacaaaacaaaactcacttctcactccctatgcagcctggtatagcagaaagagcacgggctttggagacagtcttaggttttgttcttgccttggtcatgtggcctttggactctgatttaacccttctgaacctcagttgctacatctgtaaagtagagataatagcccctcctgggtttgtcaggatgattggtaactgcttgagaaagcacccagcgtgagacagcagatgcacactgaatgtgcctcacagcatccttgaccttgcaagtggagaaacttattagaaacagacatgcctgctcagtgtgccctacttttgcttccacgaaccatgtgggataactgttctaggaactttgtcacattttgcatgccagggaatttctagcatatgatggggagtcctcctggcttcagtatttgctttgcacacatgcaattagttaatcatttattttaattatttatttcctgtctgccttttacatatcctggccaacttcccaaggacaggggccttgtctgtccacttcactgctccatgcccctagcagatctcatgaatacttgttgcctcccagatcgtggaggagactggagaaggtgtctggttcagtctccagtttctctcaggggttttctcttcatggttcctaaagaggtaaagcagtcttcaccctagtgaaatctttggaagaggactgggggctgtcatttgccccagctcaggttacctctgtctccatccaccttccctggtggcagtggctgtgttcagtatgttgtctttgaagtttcttactttattgccaccaggatatccagccccctgtagccatgttgctatctttttgtaagaataataatgatgtaggaaagagaactggtgataattcaagatcgtcatagaggacatacaaggcagtctaggactctgggtagctcctgaaggtgaagctgctgggcctaaagttgaatagtaagaatggctagtcaccacactgtgtgtcagcagggctgtctccatccatccatccatccatccatccatccatccatccatctatcgatccagtccacccatccattcattcatccctccatccatttgtcaacccaatcattcacccatccatttatccatttaatcatccatctatccatccatccgtgcatccatccatccatccatccatccatccatccatcaattgaatcatccattcatctaatcatctatccactcatccatctgcccatccatccattatctatccattcatctgtctatccatctgtccattcaatcatccatccatccatccatccatccagtcatccatccatccatacatacattacatacatcatctatccattcatccatctattcagccattcattcagtcacccctccattatcatccatccagtcatctggtcatccagtcatccatctatcatccatccatcgatccatccattatccatccatcactatatctatccattcattcaattacccctctgttatccatccaatcatctattcatccagtcatccatgtatcatccatccatccatccacccatctagccattcatcatctatccattgatccatctgtctgtccattcattcagtcatctatccattatcatccatttagtcatctattcatccagtcatccatttatcatccatccatccctccatccacccacccattgttcatccagctatccgtccattcatccatccatgcatccatccatcgacctacccatccacccatctatccatccacccacccactcattcatctacccagccatccagtatgtcaggagctgtggtaagtcttggcatatagtgtgagcaaaaccagacatgtatcctgctcttgtgatacacattaatcaagtagtcctataaaggatgtataattatgatgtaagtacttggaaggaaatagcatatatgaggaatcttagtgtggggagccacagaggaggcttctctttgatgaagtgatatttgagctgagataagaatgaggagtgaacagtcactgaattccttttatgtaccaggccttgttacaattatttttacctgatttgcatggactgacttttcatccttataatgatcccatgaaggaggaatgattatcatccccatgaggaactgaggcataaagagatttagctctctgcccaagggcgtaaccacaggtcggcgacagagctgggttttgggcttaggaagtctggcttagaatctacttcttcttccatctaggggtgggtaggagttagaggaagagggatggggaatgaaaggactttccagggcacaagggccaggcactgaggtgaggtttggggccatggatgattccatagagtggctgcagggcagagagtgaggaggagatggaaggtgaaggggcaggaagtgcaggtagataccaaactgtgcagggcttatacaccattttaagggttttacatgttctcatttgagcaatggagggttttaaacagggagagggagttggggacacaatcagattttcattatgaaaaaaaaaattcctctggaggcaatgtgagagtggaggaaagggaggccggaggggtgcagagattttcctttggaggctgctatgagagctggtgtcccacagcagggcagtgccactggagaaccatgagtgtctgtaaatgtcttgcaaagacattcaggaggtaaaattgcaaatcttggaagtggaggtaaggatgagggccctctggttgtcagaatggctcctcgccttggataactggattagttggggtattrttggtggttatggtcttccagagccctcaatcattgttgactatggtgggatcatgactccgggtcccacaaggattcctgtatcctcaggccagtgccaaggacacagaactgtatcatgtgctgtggagcccacgtcagtgcctgagccagacacaacatttcttcctctttgctgacctgacccacatggccattgttagatccatggcttgggtcgaagttctgcttgtgtaccgtactgcagttacacttactttgatctcatctccagttgctcctccagatgagtaaggcatgtccgctcacttgcatgagcttagttaccctgtcagtgtctgttgatgtttctctctggggattctgtctctgatccttagtgactccacagctctggtcatggtctgaggctttgactacatcctacttggggggacagatggaaacaccttttaatcctgctcgagaaatctgcctggccactaaaggagctttgtaaatgctcacctttcatttgatctccaaaaatggagcttttggtgaaacacgttggtagtttatttttgggtaatttatcctgtcactgagcaaccctcaggagccttggagctagttggattgagcgtagaatgcagagatatttcttgtcagggttccaggatggcattgatgtaaggtatgctgggattttatggggtaggagcagagaaagttagggtcggggatagggtcattggctttattgaggtgaccataacttgtggcaaatttaggaagtcttacgtcttgcaggagacacaacaacagatatataaatagtgagtaaccagccaggtgggcagcagcctcttgatttattttaaatttttttatttttcccgtttatttttagttgacatatagtaattgtacatatttatgggatacacagtgatatttctatatgtgtatacaatgtatagcaatcaaataaggttaattagcatgtccttacctcaaacatttatcatttcttcgtgtggggaacattcaaaatcttctcttgcagctttttttttcttgatttattggtgttaggtagtaagaacctaaaaagtatctgatggtacaggtatcccccagcttgcagtttaggggataccaggatggaagcttagtgtcaagggtcaagctaaggggtctgggtcgtgagactgggacagtgcttaagttccagtattccagtttacatttgaatatataaatattccaaaccacctataaattagtagtgttaaaaaatttttaatgctcacaggttttgagggtcaggaatttagataggcaacgtgggaatggcttgtctttcctccacaatgttcggcacctctgctgggaagacctgaaggctggcagctgacccgtctggaagcacattcattctgacatctgctgtttgatcctggctcttgactggggcctgagctatgttgtcggttggcacacctgcatgtagtctctccrtgagggcttgcttgggcttcctcacagcatggctcctgagttccaagaatgggcatcccaggagagcagagtggaaatgaawgtcacttttatgatatagccatagaagtcacatagggtcacttccctatggccacgacagtctcaaatgtacacccagttcaaggggagggggcatagaccctaccagttgatgggaagcggagcaaggtcacattattagaagacaggagatcttaatgtgttcatctgtgcaaaatacccacacccagccataggatggtagagaagattgtgttgaggccggtcatcccccaccgaggaatctttgattagagctcatcaawggttcagagggacctttggtgctctgggctaagctttaatatcccaatggaacatcctgaacagtaacctatggctgtggtgacagtgcatctgaaaggccatttgatttaactaaaaaatgctaccagtcttctggaggtgtgtctacaaatggcatgtgacaatctgattgagtctcttgaatgattgcagacttctcccacaatgcactgttstcagagcctctcacagcttgttttgtaacttcatccagctacatatttatccgtgcatttatctttccagccacctagcgcttattaaatgcctgcagtgtagcagacattgcacagggcattatgagcaggaggagaggtagaaaaagccatagactgcagcagatcatgggccataccgtcaaggaacgcagtctctgaagggatattcttgtataagtaagcagggctgctgaggaccttggaacacctcttgtctgcagctgaaaacaatgagcgaagccacaacctggacctggagtgcatttgacttcggacatctgtgtgcctctcctccttcctcttgtcccttctgttgggtactagcaggaagtccacatttgctatcaaggaagctggtacccctttgggctgggctttactaagcttgcaacacccaggggatataaaattcagagccggtcatgcatcttacatacatcagatgaaaggaagcagatatcttatgtctgatggcattgggacacagtcctttttgttgactgcattgtctttaagccatgcatttcccattcatcccagagctgtacactgtagcttagggctgtgttacccataggcaccttttgggggccattgtggtttggtttycctttccaagcacctcgcagagacctatggagtccaccttctttctgcctccagccacccacttctcccacacggtggaaggagacgcccctgccccatcctgctgctgggtttgggctcatttttgcctcattcacatctgagagggttcagtttcttgctgtggtggtgaggaaacagggagatgtgaggcgcagccgacatggagagcagccagggaccagcaatgtygtgacattgacgaatagaccaggagagacttgtaagggtacacaaaggacascaggcagggatagtttgcactgggggtcttatgcatggtctccaggtgatccagtggctacgtttcagggactctctggacattattttaaaacatacgcaaatttaattgcattcagttaaatcacagtgagcagtggtttggagatatatatatatatatatatatatatayacacacagacacaaagacacatatatatacacacatgtatatacacatatatgtacacacatatatatacacatatatacacatatatacacatatatatacacacacatctatatacacacatctatacacacacatctatatacacacatatatatacacacatatatatacacacatatatacacacatatatayacatacatatatatatgtgtatacacatatatatacacacacatatatatgggtgtccttctcccctgtcggttggataatggataattcagggtcccgttgacgtctctattccgcagtgccatmctgagtgtggtcagccagggcattatgctcttgctaggtacatcagacaagggcccaggattgggagtacaggtggcaggagtgtcccttgaaacactatgcttcagatttactgagtatttattaagcgcctcttagggccaggtgtgttgccttttcaaacatttaatacttagaacaaccattggagacagactgttatccctacatttctgaagatgaaaggaaggctcagagaggtagaggaatttgctgtgggtcacacagcatgtagctcaaattaaaaatcagagctgtcaggatccaaaccttgagctctcttccactttgcatcctgcgtgttcagaggaggagaaagcttttgcgtatgggaaatgtcaactcttttattaacttcaagtgttaataaaaacaggackctctgttaagcactcaaagcagtccccacctttgccccctcccaggtgtgcatgcagccctccacaagctgtcaacgtctgcttccctgcctgggagattgggctgacttggagcttctgacacaaatggttcaagatacgtactttatattgttcacagaatctattgggcrgttgattttgttaacgtgaaaatgccccacttcttgttggccatctgctttgtccagaaagttgtcttcctggtaacagcgccgcttgaaacaaatcctcccacctggttttcacccaataacacagcctgcgtgcaagcactgtccagtttgccagtcgcgtagcacaacctttactttccattggtatgttttgccctgcatgtttgtgagttgcaaagggactattgtttccatatttacagcaagcagcagggctgcaaattagttttagtgacaaactgaagattaccagctgtagttcaggattcagatttgtactgttacaaaaatatgtattcatgaaactaaaatttcaaattacttccttcacatctcgaaataaatactgtgctgggtatatgatatgcagtgaagaactatttctgatttttaacaaaaccgaaaattagcatattcaaaacacttcttggtgacttagcttttaaaaaaatttaaacacagttctctgtgtgtatgtgtgtgtgtgtgtgtaagcagtattataacattaagggattttttcaagatgtacaatagatcaccttcaatcctatcgtgacaatacaactaaaatcattattgtcctctgtgtccttgttttcatacagttawcctgtttacacacatttttattttctattcactgaacaatatactgtagttatttactacttggttacatagtcttttcagttaaaatgtttgctggctttgcacacatgcacacaaacacacgcacatccacgtcagtgtcacaatcaacactttagtgcacatcatctttctgttttcttattcaattatgtccttagagtaaattctgtcgaattacttggttcaaagatawggacataacttggtaaatattgttatgtgactgctggaagggttgtaccaatttgtagtactgtgtacttcctctaaaaattaaataagccatggaagaacatttagcagtaagttctgctataatatgacttgagcattcttaaaaatcagcctgccaggccaggcatggtggctcacacctgtaatcccagtgctttgggaggccgaggcgggaggatcacgaggtcaggagttcgagaccagcctggccaacatggcgaaatccccgtctgtactaaaaatacaaaaattagccaggcgtggtggcacgtgcctgtaatcccagctactcaggaggctgaagcaggagaatcacttgaaacaggaaggcggaggttgcagtcagccgagatagcaccaccgcactccaggctgggcgaaagagtgaaactccatgttaaaaaaaaaaaaaaatcagcctgctgtccataatcatgtaattaaaaaatagggcttacggaaaaagtaggattggggtacaaaatcaaaaatgttgtcagtggctcagtgaaaaaagggatggtagtacagttttgcacatgcaagatggttaagaaatctataattcctacaataaatgtggcactttaccttaaaaaagactgaaagttggcctgtggaagtagatgtgagaagggctagtaattattgtggggttgtgaaataggtttttctgaaagttgtgcayaagtgtggtccagaacacactcgcttggtgaactgggggagctcatgggtgtttgaggaagtgtgtgtgtgtgtgtgtgtgtgtgtgtgtgtgtgtgkctrtttattcctgcatggctcagtttasttaggtgcagctttagctttctgcattcatctagtgcttctcrtggacgaaattgtgcacaagaaaatgcaaaatttgcgttatgctcaaattattccctgatatataaattgtgttggaacaaatttgtattttcttttttttttttttttgaaatggagtctcgctatgttgcctaggctggagtgcaatggcacgatcttggctcactgcaacctccactccccgggttcaagtgattctcttgcctcagtctcctgagtagctggggctacaggtgcacgccaccacacccagctaatttttgtatttgtagtggagacggggtttcgccatgttggccagggtggtcttgatctgttgacttcgtgatctgcccacctcggcctcccaaagtgctgggattataggcgtgagccaccaggcctggctaaatttgtattttcaaaacaggagaaggcagtcctgcctgtgcttttctatttgtatttcttcttgtctgactggcgccttacgcttctgttcaatttgcaaacaggagctctgctgccagaagaacatttttattttcggaatgtagataggtaattgcctcatgttgctttataataagcaattttttatatctttaaatattttctatgaggattgcagcaactttataataaagatttcatcattaccagattcctgtctgctctatytcgatgctttggaactgagaacaacctgaactacacaataagcttctagtactttctacatataagtacaaaaaaaaacaaccctgtgtgttttatttatttgttcatttttaaaaggaaatttgactaccagctgatatttattgattgcctcttgggtacagtgacgccctttgcagccaggtgggacaggttgagttttctccttgacagaaatcctttctgagcctcatcctcaaaatgggatggggttggcttcttaatagggagggctgtggctgtaccaagatgtattcgttcattctcataactgctagtaaagcctacccgagactgggtaatttctaaaagaaagaggtttaatggcctcacgtttccacatggctggggaggcctcacaatcatggcagaaggcaaggaggagcaaagtcacgtcttacatgggggtaggcaagagagcttgtgcagaggaactgccctttataagaccatcagatctcctgagacttattcactgtcacaagaagagtatgggaaaaacccacccccgtgattcagttatctccacctggccctgaccttgacacgtggggattattacaattcaaggtgagatttgggtggggacacagccaaaccatatgacaagataatggatttgacgtctccacttcctgttgagtaaatgtgagtttcctcctatccttccatcccagtcctggatttttccttagacctaccatcctctacaacctcctatggggcatgaagggggaaagggcatcatctttgccccacccctaaagagtgtgatcctctgagcctttcttgtagaaatagcatcctgcctttctttctggataaacttaaggtgatctacccttagtaacccaacaccctactggagagaaaaaaacttgtggtttaagaggcatcaatggtctcttactggaattttcccagtgtacagtgatgaaacacttgtgcccttgtattacaggccacttgaagcaccaacccttgacctgagccagggttcagataaactgtattcccctcacttatgaggctgcctctctggatgctggacttggccacacttttacaaacagacacagattctgttaaaaactaggaarggattatgacttaagcattggatctgaacactcagaaagacaccaccaaagcatctggagtttggtgatgccaacccaaagaagctgcatgttctgacccatttgatgctctgttcccaactggagcatttacagtcaccgaaccagaaggagccctctggaaggatcttgaacaaggatggtcttgttcaaggtttttcacatttatactttcttcttttcttttttttgagacaacatctctctctgtcgcctaggctggagtgcagtggtacgatcgtagcttactgcagctttgatttcccaggttcaagtgatcctcctgcattagcctcccaagtataggacagacacacgccagccccaggatgagttatgttaattttttttgtagagatggggatcttgctgtgttgaccaggctggtcttgaactcctggcctcaagcagtcctgtcatcttggcctcccaaagtgctgagattaccagtgtaagccactgtgcccagctctcacttatttttattgtctaaaaattttctttttttagcatgaaatgcaataccaggtagaaccataatggctatactgaatcctagggggcaggctctgggtgcagggagttggatgtggggtgttcactgcacccccatgctctgaggcgacatcctctgatgccttcatcaatctgtacggcttcccagaacatgggtggaaaatgtctgcttgcattcaagacttttattttatgggcaggcagacaagtctgtaggtgtgattgacctgagtcagttggccgtgtaactgaagagccaggtcttctgatatctacctctgttctcatgaatgagaccggcctatcttctgccttcccgtgatgaagattttccattgtgtactcttgccttgtagactgggaggcagcagtcccaaacctgcctctacttcctttgtttcttcctctttgtctatggtccctggactcaatctcattcttcttggcatttcttgtacacttgtggagcatttctggcacccttgataatcacttttgtgcaggaggaggggatgatttcccctggggctgcccctagcggcttggtggcaactcagtgataattgtttaccagaagccagcctcagtcatgaattccttccaaacattaacttatttgatccctgcaacgtgcaacaatgtgatcatgattcccagtgttcagatgggagaagtggggctcagagaggcaaaaatagtttgatcatggttttatagggtggaggcctagattcaagctgaggtttatcttgtttccgagagcttgagcccttcactgccagcattgagcggatgggtccagcattgccctcctgtttttgagctcacattcttgtgtgagggtggagggcaactcatttttcacaaacctgttgaagttctcgagaggttactggcctgtagccaagggacaactaatggatgtaattgatttatgcctcttaaaatgttttgcagaatttttagtagcttttgatgttggcatgtagtcacttggctggggattaggtgttattttgagggaaagatgcggagtagagaagagtgaacacttttccatcagtcttctacactggatgctaagttccatgagaacagggaccatgtctgtgatgttcagattacacccctctactgccttggagtgtccagcatacggtagatgctcaatatatgcttttctcccttaataaataaatgggataacttgaagaaagattttatgatgtttatggataaaaagaagagataaactatggaatggagaaattataatatgggggttggcaaactatggccacaggccaaatctggcccaccatttgtttttataaataaagttttattggaacacagccacatttgtttatgtattgtctgtggctgtgtttgcatgacaagggcagatttgagtagttgcaacagagaccatgtggccttcaaagcctaaaatatttaccatctgggccttcacaaaaacgtttgttgaccattggtttataataatgccagttctactgaaagaaatgtggaaaatattcataatagcacaaaggcctgcaacagatctttgttggaataggaagaacagattctgccaggggacctgcctgcgttccctcagtgtgccttctacagctgggctaaagcttctagaacattcctgaaagcagatgggctccctagaaggaagcagtgggttcttgtagaggccttggcaggtggaggagttcttggggtcagtaagtttgcatctggatgacattaggactctagcatcgctcatagttcttcaaaagtggcctttggccagagtgaagacaggaatctccctgcccgctttcccagccacctgaccctgagggacggtcttacctgtggaagactgcaaagggagaaccaggctgaaaggaggtgttagcagccatcctgctagaggaaactgatgccacctctggtcccagatgtttggtgctcccttctgccctggtgggcattcggatctggaccctgtgtctcagagggatggctgagcaataaaggatttcctgaagtcagcgtagacgaagcactggtgagctgttgggatgagtcaaacagagcatctgcccacgaggaactcacctagtgaggtctagctcctagctggacaataagcatgtcaagcctggaccagggagcccctaccttggccaacttctccacctgccatacccctgggtggcttattttgcacttaggatcaggatgagatcagggttcttaacttgccatagagacccagcagagtctgttttcttactctcatctctcaacatgccccagtcccttttggcttcagccacgtggcctttctctgttactcacgctgaccactggccacattcctccttggttcagagcatttgcacattctcttccctctaactggaactgccttctccctgagctcctcccgcatgccctgttccaatcagtggcagctcttccttccattctgaatgtcacttcctccaaggagtcttccctgactgccaagaccaggttggctaccttgtacacaccggtggtgaacgtctttccttttgtctagagcacttatctcagtttgctattawtgttggttggtgactttatgtattagaagctggctgtccccatggactgtgtgcttcatgagcatgagggccacatttgtttttattcaccgttgcacctctggtgtctsctgcagtgcctggcatgtgatgagcacttgataagcatttgttgaatgatgatcaagttccatctttggtattggttctgagagaatagctgtggctgcctggagtgttgtatttaaaagaagaagaagaatatcaatttgccaagtgcttctgtgtaaattctgtgctatgcattttgagttgatctgggctgattaggagtgggtgctgtggttgattagcagtgtctggcttggatgagggtgcgaaaggaaagaagggagttggttaatgaggtttcagaaagcaccatctaatgtacctcactgacctcctaggacaaacagacattttgctctactcaggtagtggagtttttactggtcaccttcacctcccaatcttccagcaacatgcacacttccgctatcctgtaactcaattgttggcctgtgtgtactttggaattcagtatgcagtgtggtgatgggcgcacccaccctgcgcagctgggcaagagaagggaggtggctgctctgcttacctgggtgcaaagtttgatgctaacgtggctccgcaggtgaggcttgtcatccaagctcaggcaaggccaggtgtggtctggaatcagaggtcaagagggcaggaccctgcagtaggggtcctggtaaccagcaggactyaggggagcctgtacccaggaatagccgtggagaagcccctgaccaccaggtgcggttctgggaggggctgggtcacttgtccctctccttgagccagagtgtgatgcatggtaaccagattggttgmtagagcaccccacagggaggccctgtggcctgagccaccacagggtgatggggatacctgctgtaaggrcagagtggctgggtgggcattgactcatgggcaccagctttggtctagtgcacattagagaaagtccagggaccagtgacgaggttggtagctctagtccaatcctgaatctggggataagcctgaggctttctgtgttcattcattcatctagcattgactgtacctctaccatgtgacaagccgtggggttcacagtcgaaaaaaagagcctctacaatcaaggaggccacagtctagttgtggaggtaaatcaacctttaaaatataatgctattcacatatatttatctgttcatgaaaggaaactttgtaaatacaaaagagtataaagaagataattaacactaatcttgctccctggagataacattcttgttaacatctccacctctctttttgcccaggtgtgtgtgtatgtgcatattctacatggttgagataattctgttaatggggtttcctatttttattaacatttccttcttatctttttttcctagattcatgtgtgtatatatattccacatgattgagctaatactctaataaacttttatgtcaagttatatcagttatggacttagtggcttaaagcaataacaactgattatttcttaggcttctgtgggtgagctctgttgatttcatctgggctcactcatgcagctgggatggaaagtccaagatggcctcacccacatttctggcgtgcagtgctggctgttggctgcggcattttgtgtctactcatcctccaggaggccaggctagcctcctaatattgtggccttacctgtccacagggtcttactctgtcacccaggctggaatgcagtggtacgatcatagcccactgcaaccttgccttcctgggctcaagcgatcttccagcctcagcctcccgagtagctgggagtacagacatgagccaccacacccagctaatttttaaattttttgtagagatgggttgtcactctgttgcgcaggatggtctgaaactcctggcctcaaacaatcctcctgctttggtctcccagagtgctgaattatagacgtgagccctcatgtccagacctgtctgcttttcctaatgatattcctgagatctttatatatttcttgattatttttactattttacttcatgccacttaatttttttctattttatacactttttttcttgatttcttctaaaaaatgggatacatgtgcagaacgtgcttttctgagcaaaatattattttgaacatgggatgtctttcaatgaaaaatgagatggctgtctacctctgtcttgttttcttctaagtttttatagttttgtgtgtgtgtgtgtgtgtgtgtgtgtgtgtgtkttttaggccttctgactcttggaacctcttggaattaattttcagaaaacccccaaactctgattcctctactgtgaagtgggggtttgtttctcactccacattcctgtataattgccccaatcccacttatgcaataattctgctatttggcactgatatttgatgctactttgtttccgattttatctcctaatatatgaagggatgttttcaggcttgctttcttgctcagttgatttatttttcctgtcctaatgctacactcacaagtatagtggctttatattctacttgagtatgttattgtagaagtgccttctcattattcttcttttwcaaaaatctcttggctatttttatttaattctcccaaaggtacttgagaaccattttgtaaagttctgaaaatgaactcattgggactttgattgtaaactgcgttacatttatcgatcagtttgttgcaaaccaacttttaatatgtgaagacttcccatccagaaacatggtacatacagctccattcatttcagccctttaaaacatctcagtagaattttgttgtttatcttcttgtagttttccaatatttcttgtgaaagttaacgtttgcaattcggtgtttttttggttgttttttggaatgtgctcatttttccccatgatatgttccagttggtcatttttaaaaacagaaatcraattaatttaaaaaatatttttattgatttttaaatggaatagatactatgtaaataatgttcattgaaaaaaagctttacagaagaatttgaatagaaatgaaagaccttctttgtggcctcttcccctgcatccactccctgccttagagaaaaccattgttaataattaggcaataaccatagaagattaacagtgaattattccagacctttatatatttgcatatgcatattttgacataaatgggatcatactgtacattaagacatatagctctgtcttgatctatgtagaggttctactttgatagagtccctgtttattgcttttttccctttagaattggttgtatgcggatggatactcaaaagtcaaatggctggttcaagggtttgtgcagatttttttcccagtggcttaagactgcaggggtttatttctcactcatgctacctgtccaacagtgtttagtgggatsttctgcccgccgagtccctcagagacccaggctgctgctgaaggcttaactgtttcttagctgcacggcgttacaactcatggcctgctctgttgctgtggcagggaagacaacaaataggaaattaaacctttctgttcagaggtgatacatttcttctgtttcctgcctactggcgagagaaagctagcatgatgtgaacctatgtactatgtgtgggaggaggaggagagaaggttgtacattttaatttgcatagatatctgttaaattaccttccctaaagggtatatccatttacatatgctaagaacatatatagctattcgtatgcccacatccttgccaacatagggtattagcaaccttttaaaattttgctgatctttctcactgttttaattttcatttccctgattagtgatgagcttaaccctctttctaatatgttgatagccatttttatttatttgaatttgtatttcttattctgcttctttgcccatttttaacttctttttcttaatcgactttgaagttccttacatattctggatgttactcttttgttgcaaatgtgaatattttctcagtccattgtcatttaattttatttttgatgtcttttatgaaaggaaaaattttaattatagtttagtgaaatttagcactcttcatggccattagatttttgtttcagtgaccttctccactgtaagtcttaaaacgcattttttgtgtttgatatgttcttagatttttgtttaactttctaatttatctggaattttgcagaggcactgtgatttctccaactttgctctttttaaaaattgttttggctggccgcagtggctcacgcctgtaatcccagcactttgggaggccgaggcgggcggatcatgaggtcaggagatcgagaccatcctggctaacatggtgaaaccccgtctctactaaaaaatcagccaggcgtggttgcaggcacctgtagtcccagctactcgggaggctgaggcaggagagtggtgtgaatcagggaggcggggcttgcggtgagcggagatcgcgccactgcactccggcctgggcgacagagcgagactccgtctcaaaaaaaaaaaaaaaaattgttttggtcattctaattatttaccttttccacatasctttcaaccttttaagaaaagtttttgacacataataattatacatatttatggagtatagtatatttcaatacatatagataatgtgtaatgatcaaatcagggtaattagcatatccatcccttcaaacatttgtcatttctttgtgttgagaatagtaaaaatcctcttttctagttatttgaaaatacacaataaaattttgttaactatattcaccttacagtgctgtagaacattaaaacttaatccttctgtttagctgtgattttgtatttattaactaacctctccctatcctctgttcgtgctattcttcacagcctctagtaactactgttctactctctacttctatgagatcaacttttttagcttccacgtatgagtgagtactagtggtatttgtatttctatgcctggcttatttcacttaacacaatgtccagcaggctcgtgcatgttgccacaagtgatagaatctcatacttttttatggctaaatagtattgcattgtatataaatatgtatatcatattttctttatccattcatctgttgatggacacttaggttggttctatatcttgactattatgaatagtgctgcagtaaacatgagagtacaggtatatcttagacatactgattttccttcctttggatatatacccagtagtgggttattgaatcatatgatattaaatttttagtttttttgaggaacctcctttctattttccatgtctttactaatttacattcccaccaacagtttataaagttctcttttctccacatccttgccagcatttgttagtttttgtttttttgataatagccattctacctggggtgagatgttatctcattgtggttttgatttgcattttcctggtgattagtgatggtgagcattttttcatattgtattagttcattctcacactgctataaagaagtacctgagactgcataacttgaaaagagttttaattggttgatggttctgcaggctctacaggaagcaaagtggcttctgcttgggaggaggcctcaggaaacttacaatcatggcagaaggtgaaggggaagaagacacatcttatatggcaggagcagaagtaagagagaggaggagagatgctacatactttgaaacaatcagatcttgtgagaacttactatacagtaccaagggaggatggcagtttattcatgagaactgtgcccccataatccaatcacgtcctaccaagccccacctctaacactggggattataattcagcatgagatttgggcaaggacacagatccaaaccgtatcacatatgcttattggccatttgtatattgtcttttgagaaatgtcttttcagatcattggcccattttttaattcagctatttggttttttgctcttgtgttgagttccttgtatattctggatattaatcccttgtcaaatgcataatttgcaaatattttgtcctattctgcgggttatttgttcattctgttgattgttttctttgcagtacgtacagaagctttttagtttgacataatcctgtctgtttttgcttttgttgcctgtgctttcgaggtcttagccatgaaatcttgtgtctatttttatgccagtactatactgttttggttactacagatttttagtatattttgaagtcaggtagtatgatgcctccagctttgtttcttttgctcaggataactttgactatttgggatcttttgtgcttccatatgaattttaggatttttttttctatttctgtgcagaatgtcattggtatttttatagggattgcactgactttgcagatcatttcggctagtatggccattttaacaatattcttccaatccatgaacatgggatgtatttccatttttttaatcttatctttaattttttccaccaatgttttattctttccattgtagagatctttcatctccttggttaaatttattcctaggtattttatgtttttgtagctactgtaaatgggatttctttttcagctagtttgttaygattgtatagaaatgtgacttttttgttgattttgtatcctgcaactttactgaatcatcagttctaagaggtttttggtggagtctttagatttatatatatataagatcatgttgtgtgcaaacaaggataatttgacttccttgtttccagtttgcatgccccttatttctttatcttgtgaaatttccctggctaggacttccaatactatgttgagtaagagtggtgaaagtgtgcctccttgtcttgttccagttcttagaggaaaagcttccaacttttcctgattcagtgtgatgttggctgtgggtttgtcagatatggcctttataatgttgaggaacgttccttgtctacctgatttgttgagagtttttatcatgatgagatgctgaattttattaaatgctttctctgtatccattgggatgattttatggtttttgtctttcattcttaatgtgatgtattacatttattttctaatgtatgttgagccatatgtgaatcactgggataaatcccacttgattatggtgtactatgttgttgatgtgttgttggattagtttgcttgtattctttgttgaggatttttgcatctacgttcatcagggatgttggccggtagttttctttttcttgtgtccttgtttgcttttggtgtcaagatgacactggcctcatagaatgagtttggaataattccctccccttcagtttatcattttactttacttattttttttttagaaacaaaatatcactatgttgttcaggccggagtgtaatggctattcacagatgcaatcatagggcactgcaaccttgaactcctgacttcaggtgattctctcacttccacctccagaggagctgggtctctaagtgcatgacaccatgcctgggccctcctcttcagatttttggaagacttggagaagaattagttttagagtccttctttaaaagtttggtagaattcagcagtaaagccatyctgttctggrcttttctttgttgggaggctttttttttttattactcttccatcttgttacttgttaattggtctattcaggtttcctatttctattttgtatttcctgtttaatcttggtaggttgtatgtgtccaggaatgtattcattttgtctaggctttccaatttgttggcatatagttgtttgtaacagtctctaagaattttttgtatttcgataatatcagttgtaatgtcttcttttttgtttgtgattttatttgtgtcttctctattttttacttagtctagctaatggtttgttgattttatatttaaaaaaaactgtattgttgaccttttgtattttttagtccctatttctgccctcatctttattatttctttttgtctattgagttcggttttttcttgcttttctagttccttgagatgtatcattaggtcatttgaaatctttctgcttttttgatgtagatgttcattgctattaccttctctcttagtactgcttttctatatcccataggttttggtatgttgtgtttctgttttcatttgtttcaagaaatttttaagttcccttcttaatttcttcactgactcattggttgttaaggaacgcattgcttaatttcgattatttgtacagtttcaaggtttttcttgttattgatttctagttttatttcattgtggtcagaaaagataattgatatgatttcaatttttaaagcatttgtagagacttttgtggcatgatgtatggtctatcctggagaatgcttcatgtgctaatgagaagaatatgcgttctgcagcagttgattgaaaccttctataaatgtctggtaggttcatttggtctgtagtggaggttaaagctgatgtttgttgattttctgcctgcttgatctgtctcgtgctgagagtggtgtgttgaaggtctcaactaatattgtattgaggtctttccctccttttagatctaataatatttgctttatgtatctgggtgctcctgtgttgggtacatacatatttacaattgtaatttccttttgctgaattgatccctttatcattatataatgacctcctttattgctttttacagtttttaaacttaaggtctattttatctgctataaatataaccacttctgctcatttttggtttctgtttgtgtagtgtatctttttccatcccttcactttcaatctgtttgtgtctttacaggtgaagtgaatttcttataggcagcatgtagttgggtattgcttttttagttcattcagtcattctttatcttttaactgggaaatttaatccatttacattcaatgttattattgataggttaggacttactcttgtcatttgctttgtggttgttttgtatagcctttgtttctttcttccgcttttattatttatctttggttttgtggttttgtatagtgataagtgttggcaaactttttcttgggccagagtaagtatttgtgagctgaacactctgtgtgacaacaactcatttctactgttgtattgtgaaagcagccacagatattacatagatgcatggacatgggtgtgtaccaataaaactttacttccaaaaacaaacatctggccagatttggcctgcaggccataattggctaactgctgattaattcacctgtttatatcagatggactcttgaatatttattcttcgggttataattctttgggatatatattctttgggttactcttattatcaggagcatgttgcttaattttgttctgttactcagattgttccagttttggccatcgggagctctttcatttggcccttttgatatattcccgtcattgtgggtttatttatttatttggagcactttcataccttttagcactctcagatcttctagggtcatcttgtatgttttctgtcccagccctagagttaggcattttcctagggagccctagtttttttcattggagagtgatattaagaaaccatgatctgtgttgctggatgtgctcattgatagtagggtgtgactgcttcttggtcttctcagaggaaagatgtaggaaatatgtgtgtgctctaactcatgtatacatatatttatatttccatgtttatatgtgtaaatgtattaaagtaaacatgagtttatactgatatctcttactccgattcagtattccagggtttattctaatcttctcctttagcttatttatagctttttttttaagccagtgagaaacctggctttcatttcctatcaattatttacatatttgctcaaacctagtgtatgcttaaggtcattttttaaattctttgtacctctgcaaaaaacaattttaccaactagagcaggggttcctaaccccctggttatggactggtaccaggccgtggcctgttaggaaccgggccacacagcaggaggtgagtggtgggtaagggagcattaccacctgagctcygcctcctgccagatcagcagtggcattagattctcataggagtacgaaccctcttgtgaactgcgcatgcaagggatttgggttgcgtgtttcttatgagaatctaactaatgcctgatgatctgaggtggaacagtttcatcctaaaaccattccgcccgtcgtggaaaaattgtcttccatgagactggtccttggtgccaaaaaggttggggactgctgaactagaatacagtatttgtatactttgtctttattttgtccaattaaaacacagttttctaaagttacttgggtcagctccttttccctgtctcttgtatttaggttgtatcatacatctgtaatacagtgagattcatttgtcactggatgcattccatcctgggagccyctgacaccttggttgatttttttttaaaagtgcgtacagaaaaggtcactctttttttgtggtctacagctctgtggtttttgacaaatgtacagtcatgaatccacccccayaggaccacgcagaacagtttaatcacctaaagattcccttgtgtagccgattggtaatcatcccctcttcttctggtccttggcacctgaatgtaagattcatttatgttgctgtaccaagtaatagtttgttccttttaatttctgagtggtattctgttatacggatgaacttcagtttgtttatctgttttcttgttgaagaatatagttgtttctagtttttggaaatgacaaattaagcccctgttagtattcacatacagaacttttttttgtaaataatacctttggcctcatttctgctgtcttgtttaatgctttttgtcttttatgctttattacaatttcttttgcaatatagaccttatttccatcttctcatttgatttgaaatgcatatttcctctttttatttctatgtgttttgtgtgtgtcttccaaacaactttattgaggtataacttatttatgattacacacattttcagtgtaaaagtgacttttgacagatgtatacctcaccacgcaaatccaattatagaacatttccatttccccagaaagtttccttatggcctttgcaatcactctcacccccaccccgccatccacccccacacccagcccccactgatctggcttcgatcactatagatgagtttgcctggcatgtagtcttctgagtctggccccttcattcagcataatgcctgtgagtttcttccaaattgttgtgtgtgtcattcctttttattattgagtggtacttctctgcacagatatgctatggtctatttattctgttaaaatacttagatttctccaggttttgtctgttatgagaaaaaatgctctgatcattgatcgtgtcattttatgggcgtgtgttctttcttgaaagtaattgttttgtcaatatacacaaacatgttactctagtgataaaggcagacatcattcagttaagttttcactcttcttcatgtttgaccatttcctatactcattatcttaacttggcatttaaaaatcacattattatagttttgctttctattttcacattatatatgcaagtaatcctttgaaaatcatttaatatttgctttcaatttgtcataattacaatgattacttaagcctcaactccaggtatttatttggtatcattgtatagcattaatcctaatatgtattcttactacaccttctccagttttacgttaaaaatttaggtttaaaattgttctctgaagtacctgtttgagtcatgttttaaatgggcagttcctattttgtcccctaagagatgagttatcttcttcccccgttctcatctgaaggaccacttgggctatagaatagaattcttgagttcagaatatttattgcttcaacaggtgttctggaacataatgttctgaagttggcctgatttttggatgggggagggctgggggatgaggcagataattcagttttttgaaatgaagaagctttgcatggatagaaataaagttgatctattctcaaactctccttcccccgtcagtgaagtcttcttttgacgtgcagacttaggacgtagatttcttctattatgacttgattagcgtttctgccctgtttagatttttttctctttgttggacttagactgggtggatctctattaactcttctaggtatctattctcattttccttagtgctttctttaaaatttctgtgtccttttttcctgctctcttggacagcttttcgagtatgttgtctatgtcgctggtgtgatttcccgcmtgttggttctgtcctttcctggttccagcgggaattttattcccttgcttgcgttttctctttgattcctttacatcctttcttatgtaaatgaatcgtttttttcatttcagcttccttctcaacctgttggtttcatttcatcatgtatctcttcttctctctcttttaaaaacatgggtcatattttctgtagtattggaagacacaccacaaatactattcaaaaatatacagtagtactcttcactggtgtgattgtactgggaacattttagttatgatcatgttcttatgttttaaaaatttttatgaccatgttgtgtgatgatgctgctattactaattttgtgtgaggtctctctaggcatagtgttttccagcagaatggatrtggaaattcctgttggtctctctcaccacttggatgccacagagtcccccagtcagacccttgcccagaatctagcttggtttacatggctctgagccaaacttcttggtctgacagccatttcccttgtgtagttttgctgcactggacgggaaaaacctactgccttctctggctagattagctgaagcaatctaagtcttctggattttaaatagcccatgccaagttgttcccagaacttgccctctttatccttcctgaggacttcataccccaagttgtaaccatggggtgccttcgcccttccgcccccaagggagttgtctcaggatgttgaaaggatgcagaaagaaaggtcttcagggatgtggggtttgaggtacagagttagggaatgaactgtttctggccagggatggctgctctggtatatggatgggcagaggctgtaggcgtggatgtcttctttctctgttcttttttttttggccttgytttttgctcccagagaccaagacatgtactagtaaacccacaatttctcaatccagtgccatgtgttgggaagatatcccttcagcagtctgcaaaatctttgattgtaatcctgggttccagagcaattgtaattttatacattgtgctggtttggtgggaatctgtggtggggattatgactggtgatgagtctgtttccatttggaccaatgaagaattgaagcagagggagaggaggccctgtggctggcatggtaggggctctaggagaggccagcgcaggaggctaatccgaagtgatggaaagatgcttcaggacttcaaggaaattggcaggagttgaggggaagagcctgaagctgcggatatgctgccagccttggtcaggttggacccactgcacgatgagaggtgtatataatgtggtcgccgagagcatgggatttggagccaagatgcattagaccaagtcttagctcttctgtgcttaccaaagtccataacttctgggtgcctcagttttatcctctatataaaaaataagaaaataaaattacttaccttgctgggttattttggagagttaatgtatagggatcaagtacagcagcagctggcccttagtcatgctgaatcaaggttaggtggtgatggtggtatgttatcagcctgctagtggaaaggctgaggaggagggggtggtctcccttgcttggaaggcccctcactgctccagtccttctcatctctacaggctgagtwtgctgtcagtttaaattgtcctttcttggaggagcctttgtgastgttstgtttgaagtaaatccattcccgctgccgttgtttctcacagcaccttcctctttgccatcagagtacgagtccttttttatttctatttwtttttttattttttttttatttttgagacagagtcttgctctgtctcctaggctagagtgcagtggtgcgatctcgcctcactgtaacctccgcctcctgggttcaagtgattctcctgtctcagcctctggagtagctgggattacagacatatgccaccacgcccagctaatttttgtattattagtagagatggggtttcaccatgttggccaggctggtttcgaactcctgacctcaggtgatccggccacctcagcctcccaaagtgctgggattacaggcctgagtcaccgtgcctggcccagagtgctttttgtaatttgttactacatattatgttgtgctccttttaaggcctgtgtttctcactagcctgtgagccatgatggcggtctgcgaggtttcttgttgcacrctggtgcctcgcrtatcagtgatccttgaagagttattgtatgcgtcacttccgtgaagccgtttccttcctcagtatccgttcctcttgttgctgttccaatggttcatgctttgcttggccctgccctgttctaatagcttctcactggcaagatgtggctaggaactcaggctgttgcagtcagatgaacttgggttcaaatcttggttaaccagctactgactgtgtgatcaagggaaagttacctaccttctctgagcctcagtttcctcccctgtcaaatgagaatgatgtccagctggaaagctgggcataagatgaaatctaacacctgaaagtgatttacacagttcctggaactatgcatgtaccagtcaagatgattgtcatcagtattaatcctactgagacagccatccaggtggcatcctggcactggtaataatagcatcagcatttccctgcctgccacctgcaatagagcagagtctcacattagctgggatcatggagagtaaatgttaatgaatgatttgattgaactctgaggaatagttcagcatctcagattgcttatttttgagaaaagaagctggtgggggtgtgtacacaggattttctaatgtcattcattcattcattcattcattcatatgtgcaaataaagggaagagaattaattattgtttccatttggaaggactgagcttcaggtaaagcaagtggcctgcccaggtagagcgggggcagagcatcaagagacagagctgccaggaccaggggtaccagctctctgttttttgtttgtttttgtttgtttgtttttggtgtgaggagttatgagacagtgcaggaagtttggaggagcttaaaaaggatttcccagagagagaatgttgcagtcatatgcaaggtcaagtcctaaacgacttgggctttttctatcaacagaacaaattacaattcaggttctgtttgaggtgctcctgagaagaggaaaagagtcagaaacctacacaaagatgtatagaagattaggtcctgagagatgccggagatcaaagtatgctggggtatttgggagccagctttcccctgagttttttgtggttattccagtgtttcaggaaaaacagtgttttctgaacctgcaaaaaccttgtgtttgtttgcttttttaaattgggggtgaaacaatgtatataaaagcagttttgtcaactgaagttcatatgtatcggagtcatccattcatcttgtagtgatgcttttcctgtatcttaattctttcagtttttctttattattatatattttaccgatggggacaccarggccagagaggtggggtgacatgcccaaggtcatacagatagaaaatgacagagccaaggtgtcttcctccacataccaggctattagagatggtcctgttaatactgctcatcattggtattgggttaagtagaaattgttgacaagccacccagtggctttgtgaatgggaccagaggtagaagaactagccttgatgtcccccataaagctacctgtgactctgtgattgcaacctccagtaatttggagggaacaaaactaagctccgcctccaatgtggccccaaatagccatctagaccctgcacccttgctaaccttcagcttttcatgtagcccaactatgcatagccaccttccatgcatggaagcacttatctaagtaggtatactctctcttcttcccatggaggagttgactgttttaaggggtcatattctgaaaggtggaggaacattctgtctttagacaccactaaggtttgtggtcacaggagtctatgcaagattactgtggaatgcaaacgtacatagttgtgtattttccgcaacaaccccaagagataggcgctatacttctgccttgctctatgagtcatctgaggcccaaagaggtttaataacttgctcaagaacacatgatargaggcatagcaggggatttaaaacagatcgttttgttacaaagccctgttcttaaatattttgctaatgccattttgataagtgtcatctattaatctatccatccatttatgaacccacttctgtccccaccttttcatccatcccacatctgtccatccatccatccagccagccagccagccatccatccatctattcatttatttatccatctagtcacccatacatcctaccatccatctatccatctatccagccatctattcatttatttatacatctagtcacccatacatcccaccatccatctatccattcatccattcatccacccacccatccacccatccatccatccacccacccacgcactcatccattgtgttggctatttgtctaacatggtcctccacttcatcctggggaagaaatttctccatcccgggaagtgagcatatattgtctagagctggaggcttccatgagaatacaccacatcccttagctcccaggaaatatctgggcgctgctgctgttcctaggttggtgtcctcacaaatgctgctgtttcaggcaatgtcagattgcttactctctttcctccctcagtaaacctgtagagagtttctccctacaatgttcacaaaaagagcaaagctgcaggctcttccagaaatccttggcgttctgaagcattattacaaaggaatactcagtaactccattccttaacccaaaggttggatattggattagttaggcatgattttactttttcaaaaatgttacagagtttgtgtattatatctaaaaattatctaataaatctaaaagacctgttcccaggacgtttaataaggaaacaaattttgatagccagtttggatggagataaattaattaaggaaacaatttaaattgtctatgaagaggcagtattataaagaggcagtatggtctagttatttgcatatttattaagtgcaaggcaaagaaagtggtttaattattttgcatgacctctgttgtgcaaaagccattgatgagacaatcccacttttcaaagttttttcactttttaggattaaaattctaaacatactaaaattcaaacacgtaaacataaacatccatataaattaccccatgtattcattacccattttcaacaattatcaactatgactgtactcacctttgctcacctgttttatttttctttttgtaagtttcagaggcttattcctgactcgacttaattttattgggtcaaaattccattctagaaaagcatattatattgatattgaagtagaataaacttttgaatataactgcttactttttcattgaaatttagcatttggagggtacaacattgggaattttccaccttcttttaattgaaaaagtttcaagtctacagcaaagttgaaagaatactaaatgaaccctcacatacccttcagttaaatacaacagttattagcatcgagactggcattttccgagtgtatttttccacgggattacataaagacaagggaggttttcttgcctttgaagacatgtagacagtagctcatggctttagggcctgacacataaaggttcaaatcccaccagtatcgcctscgagctgtgcatggtaggcgagttgccttatatgcaatatcttcatctatcaaatggaaaaataatagtggtgtacacccacagggacatgtgaggtgcatagtaggtactcagcaaatgttacctatctctttgcctcctagctgtgcctctgtgttgcagcygggggagctgtgtggggagagctggacattttcagttcaagtcctttttggtcactgtggaagatttttgcagttaagagagttagtatggcctagtgagtaagagaataagtctgaggtgagagtggttcaaaccccagttctgcccttaccattctggaacttggttaagttacttggtctctctgagccctcgttctctgactgtaaattggggatagaaaaatatttacttcattgagtttttgtccacgagaaaatgagatgggagagtctatgcccagcatttagtatagtgtctggctcataagcacccagtgaatgttaatgatcattggtattgttataagtaaggataaattggcatagtacctcccatataattgctcaataaatgttacttattataaataaggatgaagaactcacaccaaattggtctttaatagcctgcatctactttggtgcaatgaaaagaataaagatctcttgtgaaaccttgcaaggcaatttcaaataaaagtaagcctggatggacatgtggctaccaccagctgggcgtgtcatctagcgtcatcatgggaaatggctgcatgtgccttaggttccatccagtgatgtcgtaaaataaaccagccttcttgaamcctcctgccagtgttggcttctggcattgaatggctcgtggctcaccccctggctagggtagatgcctctatcccaaaggctttatggtgttcttkttgcctsgaactgagttttttcctccctctctctctgttttctgaccctctcatcttgtatcgcaggttgaaaggattgtagacaagaggaagaacaagaaaggaaaatgggagtatcttatccgatggaaaggctacgggagcacygaggacacgtgggagccggagcaccacctcttgcactgtgaggagtttattgatgaattcaatgggytgcacatgtccaaggacaagaggatcaagtcagggaagcagtccagtacctccaagctgctgcgtgacagtcgaggcccgtcggttgagaaactgtcccacagaccttcagatcctggaaagagcaaggggacctcccataaacggaagcgaattaaccctcccctggccaagccaaaaaaagggtattcaggcaagccctcttcaggaggtgacagggccaccaagacrgtgtcttacaggactacccccagtggtttrcaaataatgcccctgaaaaagtctcagaacgggatggaaaatggggacgccggctctgagaaggatgagaggcactttggaaatgggtcccatcagcctggcttggatttgaatgatcatgttggagagcaagatatgggtgaatgtgacgtgaatcacgctacactggcggagaacgggctcggtttgtagcttttctttctcttgggtttggctctggccatggcgamaggggagctctgcctgtagcctagggacatacataagacccccacctccatccccgtctcttagctagccagcaattcccccttcatctctctcacctagagctttgtggactcggtcgtaggcccatgttggttacagaccctcatgcatgtggggaggctaagcctctgatgctccagccaaggtctggaatgggtccaaagttccagactcttatttcaagacacccaaggccatggtaacccctctagacccacttccctgagggcagctcaagtcctcacccccaggacccaagacacgtgtcctcagcgggccagtgcctcccagggcacagtgcagagcccttgcttgcagcctcatcatgcccccagcagtgtagcccagagaggtagggtctgggttggggtccgtgcygtcttctcagacacagtgtggacttggagttcaccacgccagtgcctgtgctggagcctcttgtccttctgctatctctaggttggatgattgacctatattaggtcctgtcttagtctgttcaggctgctgtcacaaaacaccttagaatgggtaatttatgaaaaatggaaatctaatttctcacaattctgraggctagaagtccatgatgaaggcaccagcagatgctgcatcgggtgagggcctgttcctcttagctggtgccttctgtgtcctcacatgatagaaggggcaaggcagcgcccatcagcctcttttataagggccactaatcccatccacaaggatggagctcttatgacttaattacctcctaaaggcccctcctcttaatgctgtgactgtgttgtggcttaggtttcttcatatgaaatttggcagaacataaatgttcagactgtagtgggtcctaaatgctgtcttgacctcatcctgcactaattctttcrattggcagcctcttactctaacacagcctgcatatgttgtgttaggttatggaattcctcctttttccaaagtctctgtaggcaaaattaaggaaacaggaggtgatgacccatgtagttcatactcccaaacatgagatttcctgtgtggtcacattgccccttacctgagtccttcatggcatcagtctttcaggttagctgcttgtgccagttatgtgcagtccctcacttctcagacacctgtgtgtctacctggtggcatttgtctctttggctgccagagacccgagccttggaatgtccagaaatcttacaggagtgtggacaaccattgcccaacagggcagggccatcagattccctgatgaaaccagggtgcgtgtggagaccgggatgcttggatgcagggggaatggttagaagggctcacagaaggttggggtgaygaggccaacacacttcagtgtgacgatggtagatttggagtccagaacgtgcagagctggctcccctgcaagagcttgctgtctttaggtactcttgctgagaaatctgagcaatccgtgttgaggctcctctttctccagagagaggaatttcacccamacaggatttacttagcatctttgccccagactgactcaygtttccgtctcgggatccctgacgctgacgtgactgtgcctgtgaacatatgtaaaagctgtttgttttagaaattcatctctcggggagaagtgggctcgtgtaaatggggcttggcataaacacccgtgtttgatgttgctgtgacggctgctggcggtggcggagttccctgtctcaggaagggtggcgaggggagattttgtggccctttgggtgcaggggcaaggctctggcggggttccctgcattccagctgttagcagctccctgccctgctcatatggggcaatcccaagagtaaagcatgagggaggaagatttgctgactgtagctgacagtctgcagtgtgraggagagaagccagactcatagaggggtctacatgagggtgtgcctcttgtgctgtgcaatcttctgyggtgaggcagagctgcgagctctgtgctcttcacccttcggctttgctgatgccccctggtccatgacctggtgataaggcatggtaccccacaagcagggaaaacaggtgagggccaacctgttgagatccgttgattgtcctgttagctccaaaatgctattctagacctttcttgtctctctgatctcttatcttcctcatatttgcctgacgttgtgtgttctctactcccacttgagccaatgctggcctcyattttgttctgttttgtctgtttcaaaagggcccttttgcttaatcacatcccatagcactggtgcccgtaaggttaaggcactggttctcagattctgcatgtattagattatctggcaactgatgagagatgcagatcccatggaatctgatttcctaagtctagggtggagcccaggagatggacttgttaacaaacttcctgggtgactctaccgcattttgagatgagctttgtggccaaatgtgtggggggtgggaccttgaagtttcacatcaggtgtcaatttaattcaattcaatactgatttttttttatgacttcctaagagttattcaccatgctgggtgcttgaagtagagtaatgaagagataggtatggacttttccctctgaaacttatagcttccctctgaaacttgccaggaagttggaatgccggcctctggccccatgctgagaaggcgcccgaggctggctccatggaaggagtaacacatattacatacatgtgcatggcttcaccatacccacaatgacgtcttctgtggtcactcgtgtgataattgtcccagccaccatcagcctttcaccttctagtcagaactagcttgttagccaggtctgggggaactgggaagaggaaaagactgagaatccttgcttgagagagaaggagagtgttgaagagagtggtttgaggttcctggacaagacccaagacaggggatgccgtggttccagaatttttcagcaacaggccagaggtgtagtccagcaaaacgtgtttccatgtgtgttttcagccagagggaagctttgctgaagccagtgttcaggcccacgtagccctgaatgtcctccttctaccctcttccctaacctcaccttcccttatctggactaaaggatccagtctccaggggcccaagggtgagcactgggggtttgcagcacaaaggagggctcatcttagcccagcagaaggggttgggggatcctggctgcagttgcacagcatttgttttgggggtgggctgttgctttttatatggttttagcttctctttggtgagttaaggttctgcatacagaacagcaacttatgtaacatgttactcatttactgctgacttccctgatctactgtggaacaaatgctaaattggggctccggcgggtggtgttttggtttcagactgcgctttttccccagcagtgtttgtggggcgtgtgcagcagttctacactgctcttgattctgagtcttctctgataatgagtactggctttgtggtccggggccsatctgcctcagtatctcttggggagcttgttaaaacgggctgtatcccagttgaatgaatcaggatctcagggggctggaggggtgggttctgcacgttcatgctgaattgtaacagccacaggtgtgtacaggagctccagcagatgtgtttggtcgtaagagatggttcatagatccatctgttggtagatccatctttactccctggatttgaagcttgtgagaaggaatgtgatctggtccttcaaagttttaaaacctgtcatagtttctctgccttgcttgcagtttctactaggcatctctctcttttttctaaaactacgcgagtttcatcggtacagaaaagctggtgggtttgctaacccttgctgtggttctgccttggtgaactgcttagcactcgtctaaacaggccaaagcatcagtgttctatggattcacacgagcctttactctgtgaaacgtccctaactaggagccatcgtttctctttgagccctagaatagcataaagacttgcagcrttctccaaattaccaggaaggtgatgagcatcactgttgatgccagtcttgtggccccatgtccacatttctgaaaggacgtttaagatcctttccttgcatcttgatgactgttgtctgctgcacagacgttgcatctcacacattgcatgattcagtgtttgcagaattatctctaccattgaacgagtcattccacacaacacacacacgcaacatttgccattttctctccattgatcttttaaaatcgtctcagctttcacttctagaacatttgtttatctcttcctactcactctttcaacatgattatcatttttccctttattgattataatggataaccatgttttaaaggcagttggaaactaagcgcaagcaatgggaagtggcctatggcttttgagaatctaggggctcccaaacatggatccggcgtcagaatcccttggagggcatgttgaaacacagactgttgggtgtaccttcagcattctgatttagtaggtgtagtgtggagcctgagaatctgcacctccagcagaagttcctagatgctgctattggtccagtgagcccagtttcagaactactgctctagactaatgagctccaagatggcggagatgaaaatgcagatggtgttgtgcctgccaggtggtggtattgaggaaacttgaagtgcttgtgctctgcacctggagttggcattcataagactttgtaaagagaaagtttgtgaaatgaaaagctgtaaggttgaaagttttagagtataagtacttccctgagatgaggccttggagtttccaaagtaccttgtgtgatcctcatggcagtcgtgagaggtagtttttctacccattttacagaggtggagaccgaggttacaagtgtccaggttggaattaggagagaaactcaggcaatttgactgcaaatttaactatagagctggcctctataccacggcccagctggattccaggcagtagaatttccccaagccctgattactgacagagacatkttgtgactgggggagggtcaggagtgcttggtggtacaggatgtacttctttgacascctccttgtttgtttrtttatttatttatttatatatttttattattatactttaagttttagggtacatgtgtacaatgtgcaggttagttacatatgtatacatgtgacatgctggcacamtgcacccactaactcgtcatctagcattaggtatatctcccaatgctatccctcccccctccccccaccccacaacagtccccagagtgtgatgttccccttcctgtgtccatgtgttctcattgttcagttcccacctatgagtgagaatatgcagtgtttggttttttgttcttgcgatagtttactgagaatgatgatttccagtttcatccatgtccctacaaaggacgtgaactcatcattttttatggctgcatagtattccatggtgtatatgtgccacattttcttaatccaatctatcattgttggacatttgggctggttccaagtctttgctattgtgaatagtgccgcaataaacatacgtgtgcatgtgtctttatagcagcatgatttatagtcctttgggtatatacccagtaatgggatggctaggtcaaatggtatttctagttctagatccctgaggaatcgccacactgacttccacaatggttgaactactttacagtcccaccaacagtgtaaaagtgttcctatttctccacatcctctccagcacctgttgtttcctgactttttaatgattgccattctaactggtgtgagatggtatctcattgtggttttgatttgcatttctctgatggccagtggtggtgagcattttttcatgtgtcttttggctgcataaatgtcttcttttgagaagtgtctgttcatgtccttcgcccactttttgatggggttgtttgtttttctcttgtaaatttgtttgagttcatcgtagattctggatattagccctttgtcagatgagtaggttgcgaaaattttctcccattttgtgggttgcctgttcactctgatggtagtttcttttgctgtacagaagctctttagtttaattagatcccatttgtcaattttggcttktgttgccattgcttttggtgttttagacatgaaggccttgcccgtgcctatgtcctgaatagtaatgcctaggttttcttctagggtttttatggttttaggtctagcgtttaagtctttaatccatcttgaattgatttttgtataaggtgtaaggaagggatccagtttcagctttctacatatggctagccagttttcccagcaccatttattaaatagggaatcctttccccatttcttgtttttctcaggtttgtcaaagatcagatagttgtagatatgcaacrttatttctgagggctctgttctgttccattgatctatatctctgttttggtaccagtaccatgctgttttggttactgtagccttgtagtatagtttgaagtcaggtagcgtgatgcctccagctttgttcttttggcttaggattgacttggcaatgtgggctcttttttggttatttatttatttatttttatttttatttttatttttttgagatggagtctcgctctgtcgcccaggctggagtgcagtggtgcaatcttggctcactgcaagctccgcctcctgagttcacgccattctcctgcctcagcctcccgagtagctgggactacaggcgcctgccaccatgcccagctgattttttttgtatttttattagagacggggtttcaccgtgttgggcagcatggtctcatctcctgacctcgtggtccgcccgcctcagcctcccaaagtgctgggattccaggcgtgcgccactgcgcctggccgacacctccttgtttattgatagatgggtatggtgcttctgagcctgaaacgctgtgactaactccatgccactcaatctgaaaacctagataacatcatcacttccatagagaaatacaactcaacaaaacagcctaaaggagggctagaaagcctgaagagagaaataactattaaagaaattgggccaggagtggtggctcatgcctgtaatcccagcactttgggaggctgaggcagtggatagcttgagcccaggagttcaagaccagcctgggcaacatggcgaaaccctgtctctccaaaaaaatacaaaaattagccaggtgtggtggcacatgcctgtagtcccagctttccagggagctgaggtgggaggatcacttgagcccaggaggtggaggctgcagtgagctgtgattgtgccactgcactccagcctgggcgacagagcgagactctgtctcaaaaaaaaaaaaaaaaaaaaaaaaatacattgaattggttgttaaaaagtcctcagaagaagtaagaaaggaggaacacaaggcccagagggttttgcaggcaaatctaaacgttctagaatagatcatctgaccacacattctagagcagataacccctcccttatccaaatgattatggagaacaggaaaatgggaaaatactcccaactcctgtgacgaggtcagtatgacctggatttccaaaccagacaaagagaggaggagaaatgcaaattacaagtcaatctcacttcagaatgcagtagtgaaagtcctgaataaccttctgggcttattatagttcccttgatacttcctcaaaactacgactgtttcagaaacatctcattccttgccctgaacttgaccccagttcattgcctttagaatcaccactgcttctctgggtgaggagcttgtcccagaagaggcccagggaaactggttcaggaaggctctgactgtcatcggcagtggccccacactatctggtgaaccactgagaggtcaggaagggtgttcccggggcagcctcttgtcagcacaggtatccatgtatccacttccctgagcccagctgttcttcctgacccacttcaagtacccacccccaggccaacacactttcactaaccttttcaatttttaaaagcagatgatttttccaagtcagtaacaacaaaaacttgagggttttttaatcttttgtctttcacagggtggcaagtaaggaaggtgtgctaatgaactaacttaaaaccctttgatgtggtggtgttaagaccctgtccaacttggccaccgccctatgcacatggaaagtgccaggctgtgatgggaaatccgactctttaaccaggagcaacttgacctatggcagatccaaggggagaatcgattctccccgcttggctcctgaattctggatttgattttggtgcccagaagaggatgatggagtcttgaccactgtcaaggtttagaaaccaactaattgcttttcctacctgctcagctgtcgttttcctccctcaatgtccttaggaaagtcttaggcactgtttgctcatggctatccatcaggggacttccaaaaagggtatagtgggggagtggaagcgatcctccccaggagcaagcagtaagcgggtacagtgtctgtagagggctccaaaacaataataaaacttcacctcctaatgtcggtgaaaagccgctctccttattgagggttccaaaacaataataaaacttcacctcctaatgtcggtgaaaagccgctctccctgttgagggttccaaaacaataataaaacttcacctcctaatgtcggtgaaaagccactctccccattgaggtggatcccagggccttcctccaccctgactcctcacacaaagcagccagtcttcatgaatgatgatgataatggtggcagcggtggtggtggtggtgatggtagcaatagtagctaacatttcttgaggtcttactgcaggtaacgcctagctctttgtatttgatctactaaatgtgatttaatttcctcagtggttctctgatggagcagtttaacaacatagcaacataacaaggttacctgggatcaaccttgtttatagatggggaagctgaggctcagcaagggtaagacacagcactgagagaaggaattagggtgtggtgccgggtctggggatgctgaagctgttgggggtctgtgaccagttttgtaaatgaagaaaggtacttcagggattcaggttgaagccaacagacctttcccagatgccaagggcattgttctggccaacacccctgggcctgcctttgaggcatcttcagtagtatcagagatgctgacttggcattccagggaggtggaacctctggtcctggtgattttccttagggccttagattaaaacacacacacatgtatgcatgtacatacacatgcacatattcacatcacagatgtacacatcacacactcatgcacacatcatatatacacacacacctgcacatctatgcattgtaaaggggactccctcaattgtcaaagtttatttcaatgctagaagaaatggcaaaaaaaggacaaagatcttcaccaactgatgaatggataaacaaaatgtcgtcttcccagacgacggatgttattcagtcataaagagcaatgaatagtggacatatgcggcaacgtggatgaacctcaaaaccacatatgatatgattccacttatgtcaaatgtccagaataggtgaatctgtagagacagaaagtagattagccgttgccaggggctaaggggaggagggagtggggaatgactgctaatgggtacggcatttcattttgagcaatgaaaatgttctggaattagattatggggacagttgcacaactctgcaagtcacactaaaaatcactgaattgtgcactttatatgggtgaattttatagtatgtaaaataaatctcagtaaagctgtttttgtttwaaaaaaaaggagaagaaaaagaagctagcaagtaggatgaaaaataacagctaccgtttccctactgcttgccatgtgcaagggagccttctaaatgctctccaagaagctgtgcattgaatttcctcgacagcccccatttctacactggaaaattaatgcttaaagaagacacgtgcattgcttgagttagtccaagtgtcacagaaggtggagctggaatggaaccacagtgcccactcgtgaacccaggctcccatgtgggaaatcgaggtactcttagtgaaccaagggacgctgtattagttccctatggctgctgtaacaaattcctcccaacttggtggcttaaagcaacaccaccttcttcccttatagttctggagtcagaaatctaaaatgcattggcagggctgtgctccttctggaggccctgtgggagaatccatttccttgccttttccagcttccagaggctgcacgtwctcctcggctcgtggtccctcatctctataacctttgcatccatcctcacatctccttctcttgactccaagccccctgcctccctcttacaaggacttatgtgattacactgaaccaaccaagataatacaggataatctcccatctccaaatccttaacttaatcccattcacaaagtcctttttgccatgtcaggtaccacattcataggtcccagggattaggatatgagatctttaaggatttgctattcatcccaccacaggcatttaggagagtttgaggggaagaaagggtatgcatatgggtttgtattcttgaatgggcaagaaacctgctggtaacaaggaaatgttaattttgtcgtctagattattaaaattatttcatttaagtgcacttgcacatctgtgcattgtgaaggaaactaccttaattgtcaaagcttatttcaatgctagaagaaatagcaaaagccacatcaagtagattatttcatttaagcgaaataattattttgtttaaatgaaataatctacttggtgtggactttgatataactggaaagtgttgaagttgacttaaattcacttgttgatttttttaaaattatttatttatttatttttgagacagagtcttgctctgtcgcccaggctggagtgcaatggcatgatcttggctcactgcaacctccgcctcccgggtccaaacgattctcctgcctctgcctcctgagtaggtgggattacaggtgcatgccaccatgcccggctaatttttttgtacttttagtagaaatggggtttcaccatgttggccaggctggtcttgaactcctgacctcaagtgatccacccacctcggcctcccaaagtgctgggattacaggcatgagccaccacgcccggcctcccttgttgattttagagatgggagcaagcagctcctcctacaagacacaaaacacttatctaatcctaggatgcatttctatacgacagttactgcatgacagtgttttgtacaagccagcgtgagccttcctagtgcccaatgagctgctgttaataatgacaataacagcaattgcaccaacaacagatatttattaagcccttgctatgagtcaggtgttggtgggctaaggatgttacatttagcagctstgttaatcctgacaattctatgaagtaggttgtctttttatccctggtttgcacataaagaaatggaggctttacaaagttagttaggcagctggcctgcagcctccagatggtaacaaggtagagccagaattgtggtcctctttcttcctttcctttcctttcttttcctttcctttcctttcctttcctttcctttcctttcctttcctttcctttcctttcctttcctttcctttcctttcctttcctttccttttccttttcctttgctttgcttctttccttctttcctttccttctttctttcctttctttcttttcctgggcattttaaaatggctttcttacatcaccttatcctgtgatatctgactktatcattagatcttaatcacacacaaagggaaagcctgttctactcatctctctctctctctctgtgtgtgtgtgtgtgtgtgtgtgtgtgtgtgtaacattttgtatgaaaacacttgtattttgatttttctgctcaatatagcgtatgtctgtttccrtctatttccatattgggcaactcttcatattggaattttagtagtgccatttatatgttttcagaaggatatacaggttgaatgtccccaagtccaaaatctgaaatgctccaaaatccagaactttctgagcatcaaaatgatgcttaaaggaaatgctcattggagcattcaattatcagattagggrtgcttaactggtaagtataatacaaatattccaaaatcagaaaaaatcagaaatccaaaacacttgtgatcccacacattttggataaggtatacccaacctgtgcaatatttgatttatgtagccagtctcttgttgttggacatttaggttaggtctaaacatctttggttttctttcatttttttctggactatttttctagactagattcccagaggcaggattatactgctaattttaccatatccttctaactccatccaaaaaagaataataaccagtgaggcataattttcyagttttgtcattgccttgccagacgtgtgtgtttaaggggaacaagaggagcctcrgtatcgtttatttgcatttctttagtctccactgaagctgagctttttctctgcatgctcaagtactctttgtaacttcctctttgtggctggttcactcctgtcttttgagattggggagaattcagatacacagggaagaggtatggtatggcaaaggaggagagcccagagcatgtttgctggttggtgagaagatgcgtttrgggcaggggctggtgtgcttagggaaagacttgggcgacagctgaaagacaggctggggccaggtgcaggaggggcctgggtggcagggaaccccctgttgtacttgtggcagccactctaatgcaggtcatccatggaaggactggtcctaaatttttgatgaactggcagaaataccaaaatctggttctggcccctatgtcagccactctggccttcctctggcttgtccgtaactctgtaccaccctctttaaacccactgggcagctcggctgatagacattctccattaagggctgccccagacacctctactacctatacccacctgtctgctccctggagagctattaataaggagcccagggtgtgggtgactccagagaaacatcaaagaaaagagatttggtaggggctgcggcaggagagagaagcctccactggggtcagggatgccatagaggaaagtcacaaccctagactggttagaagaggagaacccaggagacaaaatcctgaggcagccttctttagatattcatgttattccaggtggtggaagaacagctggtgaggcaagcccctgtgtatagagccccttttatcttcctcgtgcgcaacctgactatgctgtgtatagagccccttttatcttcctcgtgtgcaacccgactgtggtgtggtgttcctgggagcgccagcctcgaggcctcgattcacactttttatgttgcaacatggcttctctttctttcatcctgtcccagaaagaaaatcgagaccctggggcaaaatgagcctggaaataggtttgcgcacctcgtgtcattaagacgttgccgtccacggagccccggggttctctgagggcctcctggtgagaagccagatgggtggactccagcgctcccttctccatgtcagccacagtagctgcttgtattagtccattctcaagttgctaatgaagacacacccgagactgggtagtttataaaggaaagaggtttaattgactcacggttccccagggctgtggaggcctcaggaaacttacaatcatggcggaaggggaagcaaacacatccttcatgtggtggcagcaaggagaagtgctgagcaaccgggggaaagccccttataaaaccatcagatctcatgagaactcacttcagtatcacaagaacagcatgagggtaaccgccccccgtgatccagtcaactcccactgggtccctcccaccacacgtggggattataaraactacaattcaagatgagatttgggtggggacacaggcaaaccatatcactcctgttttatttgtttcatgtgagggtttgtcatgtgcttttgttgagggaaaagaagacaggaaatgagargactwaaagcatatttctgaatacaccagtttaataaatctgcccaccagtggcatgagctacttgatgaggttgttgtgccccatgtcttgggttgtttgggtggacttaggcagacttaggcagagggattcctgcatggagacgggtgagattaggtggcctcacaggaccgagtcagctcctcagagcatgtgtctggctgggcagggtcgtggccgctctgcagtcaagaccctcatggtgtgcactyactctcctcatggctgagccatgtgtcaccacagcccatgtgtgcagaaatactcagctcatttytggaggctccttgtccaagttccgacaggtgctcagggagcttttgcagcgaccatgcagggagggagaacacaggctctgctttcagtgggggcacctgcctgaggccacaaagccagccagaggataagagttagctgtcttgcccaccgaccctcctgcttggcctctctcgatgtcctagctcccaattctggcatcccccggctgagggagatccaggtactgacctctgattggctttcatggctccacgcttacacctgtctgttccctgctgccccagatctgtgccaccatctcccaccatctgcttgacgcggctccttgtccccacaagacggcagtgaggtggaggggggacatctaaagggccacttccgacttggttctgaggaccattgtcctgagtcttacagtgagggcagagccactttccatggtccgtggggcctctgagtcctgggctgtggggccttgggggtcaatatatcgtcgtatctgcttccccttcttggcactttgctggatgcttcctctgctcggccaggccggtcaccttggcctgtcgtcttcccattaccttccagtgtgcagaaatgtggcacccactattgactcttctcctttacttttgcttgtgttaatacttaaaaaaaaatcttttactgccattttagagtggtttcaagaaagaggagacaaatttgtcagtrtggtatatctaggtccctaaaatgttcttctttttttctttactttttcctctcctctcttctcctctcttctctttttgttttctaaagttacaaatasgtgagttgtaaaaaattcaaacagtatggaaaatataagcatttaattttaattttatttttaaattattattattatttgagatggtgtctsactctgtcgcccaggttggagtgcagtggggtgatctcggctcactgcagcctctgcttcatgggttcaagtggttgtcctgcctcagcctcctgagtagctgagattacaggtgcccacccccgtgcctggctaatttttgtatttttagtagagacagggttttgccatgttggccaggctggtctcaaactcctgacctcaagtgaatttcctgctttggcctcccgaaatgctggggaaaatataagcattttagaaattaaagtctccatattctcccttcccaaatcctatttagaggtgacttctgttaatrtttccttatggatcttttgggactattctctaagtttatatatatgtatatgtatttatatatattaaatctatgtactttattacataccatatattatatatgtgattatattacatatttacttaaatatttgtttgttgagtgatgaacaggaattatcccatttctttctctctccatgtatgtaggtatagatatgtatatatctgtctgtcatctgtctgtctattcatttatccattatttatctgttagccaaggcctcaccaagttgacatccgagtaaagattgaaggtggtgagaacaccttgtcctgcaatttcttttttgacttaaagcctgtcttggaactctttctgagtcaggacgtgtggaacggcctccctgtttttggctgcttgggatttacggtgtgcagggacttaactgttcctctgtgatggccatctgggctgcctacaaagggacctgctcctgccaaacctggctagggccagtctttgtaatgcttttccaggccctgttgttttaattttagtttctaaatgtgggtgagcatcttctcatgttccttccacttgtgtctctccctgggcattgcccgggtgccrtcctgctgtggaaacagtggtggcgagtcaggggcattcagccatgttgcctggaacaaatgacccagcctctgtgggccagattcttaatttataagatgcagatattcatacctcacgggttgggggtaaagaataaatgaattcgtttataggaagcccttaacatattcgctggcttgtggtagacatttgataaatattagccgttatttcaattttttccccctttttccaactgggtctttatatttccccacttgtttttaaaatcactttacatacagtacacatatatgaatcctttcctatgtatgctaaccagtactcataaaatgactgccatataccaggaactgtttagacaaataactgcaatacctcatgctgtgatggagacatgcagaagatattgtggggccataggtaagggcaccgaagccagcttaggggaaggaattactgagggcttcttggaggaggtgatgcataagtggaatctgataaaatgagccgaaatgactgaggaaaaaggcagggatgtcaggaggtgatgacagcatgtacaagggcatagagctgagggacagcctctgggtgcctgttgacacatcacaaagaatacagcagtccagccaattctagagcagcctgcacgggaggctgagctccagggaattcctcgggtagtcaggcttgtcttaagaaccagatagatggaagcccaccccatctgtctgtgttctgcatgtgtgactccctctgtctgaatgcctcccgctgtgagccctcacgtgagtagtaacctctgctcatcctgcaggtctggctcaagcagcaattcccccatggaaacctttgctgactgccagcatagctcagtttccgtttttatttgcacacatggaatggtgtttcttggttgacagcactgacctcggtttgtagtggtcacactgattattcgggtaatctctgcctctttcactcgatcagaagctccacaggggagggatggtctccatttttgttcacagctgtatcaccaacacctaacaatgctgggcacttagcaggtgcttaagaaatgaatgagtgagtgaatgaatagatgaaagagaggacttaaggagccggttctgctttaagatgggggtcctgaggccaggtccacccactgcaaacccttctgacatctgtcaaagctgcccatcccctggcccagtctttccttctctccttgagttgtcctgggtgttggcttcacagcctctgctcatggtaacatgtcctggaaagcccgtattttgtcagggctcttcacagcaacgacaggattcccttcccattggctcatctggtgattgttgtcgccatctgccacgatggccctgcttgctrtgttcctcttccctttatattcacgaagccacagtagactcttaataaagcgccaggctccctcccccatgaagggcattgtgagttcttttcagcagggtgcatctcatttgggctgcagcctcygtattttgcgcagttctttgctatgagagagcgaatgcccaaatcatgtaatttatgacctgccttgatggtaacataggacatgaaattggtggacttcttaatagacgtcccagttacaggaagtattgtaagatttcacctttaaaattgctctcattttgcaggtagcatagaggcgaagaaactgataagagcaggcaggtagaaagaggctccgtgtgttcaaatacaaacattgcctcttagcatctccaggcaggtcttaccagcttttgagcctcacttttcacctctgtagtccgggaatagcaagcctgccagaaaggatgaagcagtgggtcctggcgcctcatgagtcttcatttctcttctcctttgtcagactccgcttcaggtggagcttcctgctttgctcaagaatgtgcttttctaccccaccctcagcctgccctgtcgttttttcattgatcctaggatattaggttttattctgttgcataagccagcaaggcgaaatcaagagggacagcccctgggtgcctgttgccacatcacaaagaatgggttgcaggacagtggactctgttacttttgtgacttttccatggaagttagagtcttgagtttttcacctgccatcttggtgacagtgccactgagtaggaggttctgcctccgagtttgttctttcttcttctgttccactgtggacctctggaagcttctcccatcttcatctcctttcccgattccctcccacttcaccacccttgcagaaagagggtctgtcctgagttcctggaggtttagcaagacatctccatctctggcctggcttccaccagtaactcctcatattattaggttggtgcaaaagtaattgcggtttttgctatttttttttttttttttttttaatggcaaaaacctcaattactttttcaccaacctaatacttggtggcagtgaatgagaaacaactggtcacaagatctgttgagccctcgtgtgtgccaggcatggcattgagtgctgaggatacagcccaactcatattcctgtgggaagaactgaggaaagagccaaatattccagtgaactgtgagcaggtacggcagtgccstacatgaacgtggataccaccgaagcaaggagattatagacgcagcttccacctgaaggatgcatggagcttgatcaggcaaagaggagaggggagagtgttctagacagtgagaactatattttaattaagaagatttgtagaaaatatgtaacatctatttcaagcatcattaataaatgccatttatgatttcttcatgaaatatttattaaatgactgctgtgagctagtattgtatacctagaagcaggtctcagcatgcctcgttctgggggtatgatgagtaaggcaagacasagtttagggaagaaaacaaacaaatggggwaatgacaaatacattgacaatctccataccatgtcaaaatagccagcatttactgagcccttgctaagccaaaccctcttgctagcactggcagttcctcagttaatcctagcagggagggtcattacccttcccatttcacrgatatggaaactgaggtatatgcaggtgaaatagcttgcctacagtctattagtcagtaggtggctgttccaggattcagatctagttgtcctggcttgagacctagattcctaaattctccttttctgcttcttgagggacagggctatctgggaggccagaagagagctacattgtatttggaaaactttaaaaaatttttagcgttttgagatcattttctcccctacagttcacttaaagaggcatttgctttcccctcactatgtgstggggacgaaggctgtagagatgaccagccgtgtcttccaaagaactcaaagcttattaagctgattaagggatcagctggtccccagtgacctgctgcaaagctgagcatgcgaactcaggaaggcccaggacaccggagccctggggatgggctgttcccggcgcttggggaggaagagacagctgtctggaagagaagcatttcaagtggccccggaggattagatgtgtgaaggtggacggaaatgacattcctggccaagggaacagaggaagtaatggctcagagggtggaaaactcagtttcggagaacctcagacagtcctggaagttaaggtgtttwtggggcaagagtgggagttaaggccagaaaacaggatgaggccagacgatggaggcatgtgaacttttgagcaggggagttgcaagaaaaggtgataaaaatgaattttaaaggaaatcactttatactttgataccctacagaatattttgccacataccaggatcctggcataatagagcttttggagttagcatggccttggagggttttaatgcaggagacatgatttgatttgtagaaaaagttccttttaatcaggttagttttgtattttgaattcatgctttacactgctgaatgctttaaacatttaggcggggcatagtggctcacacctctaatcccagcactttgggaggccaaggtggtggattgcctgagctcaggaattcgagaccagtctgggcaacatggtgaaaccctgtctctactagaaatacaaaaattagctgggtgtggtggtgggtgcctgtaattctagctacttgggaagctgaggcaggagaatcacttgaacccaggatgcggaggttgcagtgagccaagatcatgccactgcactccagcctgggcaagaagaatgaaactctgtctcagaagaaaaaaaaaatttagacatctgacagtgaacatcataagattacttagaggtgttggatgtagtgattagataatctgagaacctaaactttcttaaaattcgaagtgtatggattttatctggcataattttaacatgccagatgacagttaactgtggctaagatttttttttttcttgaatgcacctgtgaatttgagccctgctattgcattcaggtcctgagagcaaggattctgtacatgggactaggggcttttggttccactcaactgtagaactgatgagtcttctcttttatttaactctcccctccacctcacctcctgacatgattgatgaccggaagtgstcaagctgaactccccctgggttggtctgttctctctgttaattgtatctgctccccaagatgataagagtgattggaacactggggagaatggactggaaggaaagtgctttgcacctgtgtcttttagggggctagaaggagacccccaacaccacaatttttttatcctatcttccagcctcttgcttttttcccctatgtcttttgatcaagaggtaagaacttctgtaggtcctccattgtaagtctagtgtttattcatttattcactcattcatttattcaacaaagaatgacttgtgtcgttctttgtgctgggcctccgctggttctgaaggtatatgaataactaaaacagcccttgcctttaagaatccatctggtggtgaggagggagccagacatttgagaaaatccttgtcaagatgtggaaggtatccatgatgattttcctacagtgtgattcccttcactgtccagtacggtagccatcagccacaggtggttagagttatatttcaattagttaaaattaaaaaattaaaatttcaatagccatatgtggattccacctactgtattagacaatgcagatattgaacattttcatcattgcaggaagttctgaatcagactgtaagctctttgaaggcagatccatgtctggttctgcccatccgtataccccaggtgctaagcatctggtgaacactcactaagtatgtactgaatgaacatgggagaggataataaggagagtaaaagaagggtgtacaaacaaccagaagagagatgcactgctctggaagaatgtgcagaagagatatccctggagctccatcaaaaagtaggggacttttagcaagtggggaagggaggaagggtgctttctccaggagggagaatgactctggtctcactaacttccttctgtgttctgatgtctcaagccacacaaggtgttactattttgtttgcaatggaaggaaaattcatagcactcacgctgtgttctctccttgggtgtctttgagaggtgggatctcactcagagcgccagatgtgatataaatacgagttagtcatctaggtgtgagatcaactggattgcagaaaacaagtgttttcacgtatgaggccaatacaaagctttgcaagcatgtttgacacatggagacttcatgatctgtgagtgaggtgaatacggaatgcaccactaggaacatactaggaacattattaagaatttggcgtgggrtatgttgtgattgctggagtgagttcccccacctgattgtttgctcatgcagtcattggatgaacactgggttaagcatgcgstgtcctctaggcactgcgctctgtgttgcagacacacaggtgaatacatctcaggcttatccctcaagaggscacagtctggtagggtcttcaagcaggtgtatggatgatgataacatagtgaaatgagctctgcttggtaaagcatcacatgacacaggaatcagatgtggcatccacattttctttcctcctttgttcagcaaagactaggctctggaaaacaaaagcagaacatccatcagagccaacaccatgaagagggcctgagaccagggctagtttcagtgtcttgatgctcgaatccagcatcaagcttggtcaagatgctggagtttgaccctcatgctggcacttcccagtggcatggccttgggttttggttttctcatccttaaaatggggatgtaaacagtgtcctacagggtcgtgatgaggatggaatgagacaacctgtgtgaatcccatagtaggcactcagcaacttgtgagtattgcatagttgagagaaaggactctggggaatatgccaaagtgacacttggagtctccatttcacactgttgtgggggcaggtgtagatcacttctactccagctgcccataataatcaaggagccaccctggtttctgaggatggctgtgttaagtgaggaaccagaatggataatgtatccctcaattggggatagcatccttcagcgatctgtctaaacttttcctcccttcctccaggcctgaagggaatgtggtggtgttctgtacctggggtttgaaatgttcttggtggagaacttggacatggttcctgtgccctgccaggagtggctgtgttttctgaaaacttatttgcatggtagaagtgccctacggtctgtccttgtctgtctcaggctctgtggcctcaccccaaccccagccctccacttcctgccctctcagacagcttacccctagctcaggggcagctgcccctgtatctttaatgacaagtttctatctttccttctgtgtcttgcacactgcagtgaattccctgacaccttttgttgctgcatgtagaccactgtgcaccatttcttgattcccctgggatccttctggcatttctctattgattgggcagtttttcttcccctctttgctgagttgagatccctctttctgtctcagagtttctcctcaggaaatcttacacacatctttattattttatccagtgtgattatctctgtcttttaatatgagtttaatatgttcacagaataatgtaattattgagatatttggattatttctcctattttaggtagcattttatttttacccattcttgttctctgttccctctctcattcctattttctgaccttttaatgcttttcactggattgatacattttatacattccttctccttgggctgactcagaagctagctgtagattgtatttttaaacttcagcacacatactaaagtatgatctttttctaacaaatatgatgtcctcttactgaatttggcaagatgcttccttctgcttggctttcagttgtcattgaacatgtctcttccacatcttactattattttatacacccaacattattaaacaccattgattattattttcacagccagtaattacatttactaaaattttaaaaatctatttttttacccgtgtcttcctctgaattaaatttttgatttgctaagtttctcttaatttttttagagtctgtggtagataaattttcttggtgttagaacacctgaaaatgtccatttatgtggtcctttaaatgctgctttagctgggtataaaattggttgacagttattttgtctcagcattttgatgaatagtagctcattttttcaagcctctgttattgctgttttcagtctgccattcctttttgacaatatgatttttctgtctatgcttttttttaagaactctttacccatggaattctacagtttatcgttaatattatttgtctgtgtgtcctgcttggtacttagagtgctctttcaaactgagaactttttctttttgagttctacaaaaagttcagctattcttttcttagagttatcccttatatagaactttgattcttatctgcaggatatttatgtttaaaatatatttaactttttattttgaaataatttcaaacttacagaaaactatgaaggacccattttctgattaaccagttttttaacttttttctctctttctgtgtgtgtctgtatatgtatatgtatatagacacacatatttataatatatacacattatataaactatatacaaattgttctttttctgtaccatctgagtgtagactatacattatgcctccttaccccttaatatctagtgtggatattttataaaaggatattcttttaagtaaacacaatgtagttaagaaattcaagaaattttgcgttgatgcaatacttttattttagcccacattcagtttttttgctattaccgcaataatgtcttttagatatttatttcttccaatatagaatacagtctagaattccatgatgcctttagttgccatgtctgtgtagtctcctttaatctggaacagttcttcagtctgccattgtttttaatgacgctgacatttttgaagaatacaagcyagttattttactgagtttatctaatgtttcttcaaggttagatttagcttatgcactgaactagctgatatgatgctcttccttcttatccatctcatctgtctgttcatccatccatccgtctgtccatccatccatccatccatccatccatccatccatccatcacctctatcgtgagtacaaattcaaggattcttactttatgtgacagtttataatctattactgccattatttattttactattgaaaacatccaagatttggccagtgggagccccttcaagctgccttatatgcccttttgcaatgcctggctattcttttgatcacttcctatttttaggtacaataagattttctagcccaaagtataccttacctgcccaagccctggaagcagccatttctctaggagcccttgtttattttagtgggattgttatttagaaaccaacatgtgggatctacatagctcattgctatttgggtttcatttcttctaagccttttcagctgacagagctaggaaatatgtataatttttaaaatcatgaattcttaccaatacctatgatccattttaacctcactggattcttccttgcctctctgcatcccatatttgtatgtcttcttccacagagagaatcctatttctccacaatatcatatatttactcattttctcaatcctgaactactcataaaataatcttagaattgctccattcttaccacagtgaaaagcaaacccactaagaagagttcaagatttatctgttgtatattcataatattatatccaaaagttatttgtatttgttcttcccctctccccttttgatgtggttatgttattcctttgaaagacgattaggtttatttctttctcttttcatttagtttatttccaccccccatctttattgcttttattttatatcttaacatgttttaacatacttccaaaaattaaaacaaaaagatatcctcaaagaagggtcacctcttccccatcccttttactcaattttccctgccaaccacttgtgataatcaatttcattgttttctggtttattcttcttgtgatttttttttttttggaaaaaaaagcaaatttatgttattttcccatcttttttttttacatttaaaggtaaagtacttttccacctttcttctctttattggaatgtatactgtgtaaaccactccatattcatagagatagctctttcttttttagagcgacatagtattctattgtgtgggtgcatcgtagtttatttcaccagtctatgcttgcacatttaggtagtttccagtattttgcagttatagataaagctacaataattttatgcatatatatatttgtaccattggaagtacagttttcctgttaaatttctagaagtgggattgstgggtttcgtgagagtaagtgcataaacagtgttgtcagatactgccaaatttcttcccatcacacttgtacctttctgtatctcccccacaatgaagataatgcctgactccccacattctctgttgcagagtatattgtcaaggtcttgaatttttgccaagcataagatgcatgagaaatggtatttcagtgtagttttaattttctttgttatgagttttaatgtgcactattcttttgggtggatttggagccatttcttctatttaagggccatttttgtgtaatgctgtggattgtttgttctgtcttttgttcattttttcctgaaggaatttttggtcttcttatcttcagtgtttaaaagttctttacaattggggatattagccttttatctgtgatacacaactgtttttcccagtttgtcatttgctgtttaattagttctttatgctattcactgtccttgtttcctttctgtctgcttttgtttgaacatttcttgtttattttaaatgaatgtttttcttgcatctgagcatttgaaatgttcctattttaaagtccttgtcaaattgtttcatgatgttaatttaattttatttggagtaattcatgttttgagtattgattttgctggcttgttttctaagcgtgagctgtctacaagttttggtattttggtgtgcaggctcatttcaagagcaaagtttctgttttgttttcgtttctcgttccttctctctctctctgatagttttgtgttcgcctctacctggtcctgagatcctaataaagccttagccgtggatatcacatcccttggttactgttttactgccttcagggtggacagctcacttcatcccctggcttccagctctaagcctgggctccccctcccatcttgcagggaagacttagtccttgttgcctttgaagaacccacatcttccctcccctctcccaccccactgactgctttgtgtcagtgttgtgcctctcatacgcagagatgattatctcgtttgtgagcccggcttcatcttattgactctctccttttgtattttatctgtcgcttctgtatgtttggaacaggggcacggtgtcagcacgtgagtttatggagccttcttaatgggaaatactcctttgtacgctaaaggagggaatgttggaagtcttgaggggaacagaaggaaggaaactagcatgatgggggctttcctattttccagatatgtagcatgcaccatttcctttacttctcagctgccctcccatttcacacgcaggacagtgggggcacagaacaggcgagcaagttgtccagccctgcagcccgtgagggggatgtgggatctgaatgcaggcagtgcccccgactggacgtcaccctggcttttgggctcagcagagcagttagtcccctctgtgcctggaatgcctaatctttggcctaggcctgggtgtggggttgggagtaggagaggcatgattagggacactcaccaattagttcctcctttttgaatgccttggtgtcctccagctgacattggagaagtgcctggagtgtgctgggcactttattgacmccaggtcagttctttaattgattgagttcaaaacagcccgaagagtaggtacttttagcccctaccttttaaaatactaagtaagattgaatctcatttctcatattttgtgggaacaaggagaccaatgctcaagagctcgtgtggcttccttgcttctcccattagcaaatgtagggctgggattatttccatgtcctctgactgcagagccctaagcttccacagttccaacatgttctgtttctcacagcgtcttccctgccagcttgttgctgtcactcgggaagcatgatgctcctgaaggagagggacctcgaggactgctcggtgagagggcagagtctgaggggctctggaggcaccattcccctgcgtctcctggagagaaggcccgtttcagccacccgcatccagaattgcacacattttgaatccagtactcaaggaggctctgatccctgcttggctcagaggtgttgcatctttctaagtttatcggagaggcgagcccagtgtcctggyagagggtaggagggtctctttgcctctgctagtttcatggcttatttggtaagatggcctcagggccctcgtctcttcgggtgcttctccaccctgttgcgctaatggaaagaccatgagatttgggttcacgaacacctcccctccctgcatcactctttatcacatcaccctattgttttccaatctgtaatttttttaggtattagttacttgttagcttttcatctccccaacccaaagcaagctccatgagggcacaggccctatttctctactttcttttggatccccatcacctggtagatacctagcccataggaggtggcaagtaactagattttgaatgaatgaatgaataaaatgaggagatggctggctccaatcctggctcttccatttacaatctctgtgacttccagsaaggtactcacttttccttatctgtaaaatggactaactagaatggcaaatgtataagactgttcaataattgacacccagccttagagctgctcagaaaaggcctggcctggccccagcagggatggatgtccccaggctctgggcatctggtgacaccctgcgcccaccaaaagcagctcccatgaggtgaagcctccacgaacgggaccgtgccctggatctgcctgggccgctgcagaaaccacagccagctctgtctgattaggaaggccttctgagttgctgagggtttgagattaaccctgaaggaacaactccctctacacaagccttgtaattagacactcgtgtttactctccgaagttcactgaatcattttacctggtgtcaggagctgcatcttgatgtttgacaaagcctgattgcttttggtaagggaacaatacaaaactggggcttcacagaagctgtgggtggcacaggcccatctccatgccgggcagctctgatgtctgaagcgttgccttgcatgtagcagggtttggtggagcgttttctggtccctgccttaggcctggtccttgagattccaagattcccaatgccatttatgagcctgagcccacccggaggtggacccagggccctgtatgcagaggggcaattcctgtaggcttctaggtgccacgggtgttatgcagcgctgggctctgagtgtgccagtggccttgccttcagacattatgttattagagagacagcaaatattaccagaatggtrttgtgctaagctgggcatgatgattataaagcaaataagagccaccatttattcctggtttactgtgtgctgcttctttaaatgttatcttacttgatcctcatatcctgctcaccaaggatcagaacacggagcctgtccaggctgtgtacacacagtaatcttccttaggaggggcatgggrcaggttggcttcccgggctgggcttctggttgggttccggagtctcagtctctgtagtgactttttcccaacccagcccggcagagcgctgagcacatggtcagtgcctgtctgcgtctccttgcacccttcttccccaaatcaccacggctgagcagagtcatcgtgagatgtggctccatcctgcacggggcagtcactcacttcattggcagaaatggtgacagtccaggagattttccaacttccgttggcatgcaagcatggggcagccccatgcatgaggaagatggctcacactygacaccacagtgactcctggggtttgaggaattcttgggttgtctggatcctggctctcaaagcctggaccctggagcagcctgatttttcacaatcctcccatgatccctgtgtacacgcaagtgtaagaaccatgggttgaagttctcaagcttgcctgcatgtctgaatcacctgggaagcattgtcatcatttttaatgaacttaattyctaaaacatattctttaaaataatagcttaaagagtgtaactagattgtttgtaactcaaagaatacatgcttgaggaattggagaccccattctccatgatgtgcttatctcacattacatgcctgtatcaggacgtctcatgtacccttaaatatgtacacctattatgtactcacaaaagttaaaacaataaaaagaagaaaaataagaaattaaaatactctttaaaataaatttcacttttttgttttttcgtttgtttgcttttttgttttttgagacggagtttcactcttgttgcccaggctggagtgcaatggtgcgatctcggcttactgcaacctccacctcctgggttcaagcgattctcctgcctcagacttccaagtagctgggattacaggcatgcaccaccatgcccggctaattttgtgtttttagtagagatagaatatctccatgttgatcaggttggtctcaaactcctgacctcaggtgatccgcctgccttggcctcccaaagtgccaggattacaggcgtgagccatcgcgcccagccaaatttcactttttaaccagttataggttcacagaaaaattggaacacgaaatacagcaagtttctatatagcccacacctagtttctcctatgaacatcttacattagtatgattttttttgttgttraaactggtgaaccggtattcaagtattattatgaactgaagttcatactttatttaggtttcacctagtgtctgttccagagtcccattcagggaatattcagagaatattatgtttaatcatgcctccttagcccctctgggctgacagtttctcaggctttccttctttttatggtcgtaaaaagagttttgaggagagctgcttggtattttgtagaatgtccctcagttgggatttgtttgatgtttttctcatgattagagtggtgttgtgagtttttgggaggagggaccccagagggtaagtgccattctcatcacatcctatcaggtctatagttcataaagactaagaacgtgacctgtcactgttgatgttgactgtgaccacctggctgaggtatgcgtgtcaggtttctccactgtagggttacttcgcctccccctctacacactgtgctcttgggatggaagtcactgtgcgtggtgctcactcaggaatgggaagttatactccattgctttgaggttgcaatatttacacaaactatcgrgaattcttctgcatggaagatttgtctcttctgcatttatttattcaatcatttatttaaagcagtatggactcatggatggtaattttatattttcagatttaatccagtactactatattttgttgctcaaattgttccatctttggccattaacagctcttttaggtggctcgtgtgtccttttgacatactcccatcattgcagcagattttttttgttgttgctttgctttgtttgagcacttccttctgttctggcacttataaacttacagagtcagccattgctccagagtttcctaggtccttttattgagaattgtgttagaaactagtatctgtgccccaggtatgttctttgctattgggatgtcattgattctgggccctctcagctgagagagcatggcaatacacatgggtatactaacctgtgtatatacccttatctatagatatttctgtatgcagccatctttatctgcatcaaactaaaaatgagttcatactggtgtttgcaactctaacccgtggtcacattctagccttctccttttgcttatctgtaaactccaactcccacagtgaaaacctaagtcccaccatctgcaatccatttacttaatcattcaattccagtatacaagtataacagtatcagaattgttagcccctacygccatgggaatcaactttttcaactggagtacagtgctgtgtagagtttattttgcctttagtttcacaaactccgctcatttctaaagttatttatgtcggcaccatatttccgtaaccccttcagtaaggttgctttatacatatataattcagatggattcttttgtcacattctgcattctaccctgagatcctgtgccctcctaaatgacatttttaaattggcatgcttttaaattcgctctctgtgctgtaaatttctttggtatttgacaagcgcttaatgtctagtattctccattgtagtatcatgcagagtagttttaactgccctaaaaagtctcctatgcctcacctatttgaccttccccttattccactggaacctctagcaaccactgatctttttacctttttatacttttgcttttactagactgttttatagttggtatcatatatagatttttcagactggcttccctaacttagtaatacgcatttactattcattctttttttggtggcttgatagctaacttttttaaaaaattatttttaatttttgtggttacatagtaggtatataaatgtatgggtacatgggatgttttgatacagggatgcaatgcataataatcacatcatagaaaatggggtatccaccctctcaagcatttattccttgtgttacaaacaatccagttacactcttttagttattttaaagtgtaaattaattattgaccagagtcaccctgttgtgctgtcatatactaggtcttattcattgtttctatttttttgtactccttaaccacttcatctcccccgccccccgcccttcccagcccctggtaactgtcctcttctgtatttctatgagctcaattgttttggtttttagatcccacaaataagtgaaatcaggtaatgcctgtctttttgtgcctggcttctttcactcagcagaatgacctccagttccatcygtgttgttgcagatgacaggatttcatttttttatggctgagtagtactccattgtgtataagtaccacattttctttatccatttgtctgttgttggatgcttaggttgcttccaaatcttggccattatgaacagtgctacaacaaacatgagagtgcagatatctcttcaatatactgatttcctttcttttgggtgtatacccagcagtgggattgctggatcacatggtatttctatttttagttttttgaggaaccatccaactgttttgcatagtggttgtactaatttacattcccaccaacagtgtgtgagagttcccttttctccacatcctstcctgcatttgttactgcctgtcttgtgggtataagccattttacataaaatgcggtgagatgatatctcattgtagttttgatttgcatttctttgatgatcagtgatgttgagcaccttttcatatccctgtttgccatttgtatgtcctcttttgagaaatatctaaatcttttgccagttttttaattggattagatttttttccartagagttgtttgagctccttatatatgctggttattaatcccttgtcagatggatagtttgtacacgttttctcccattctgtggcttgtctcttcactttgttgattgtttcctttgctgtgtggaagctttttaacttactgtgatcccatttgtccatttttgctttggttgcctgtgcttgtagggtattgctcaggaaatttttgcgtagaccaatgtcctggagattttccccaatgttttcttgtagtaggttcatagtttgaggtctcagatttaagtcttttcaattttgatttgatttttatatatggcaggagataggataggggyctagtttcattcttctgaatatggatattcagtttttctagcaccatttattgaagaagctatctttccccagtgtatgttcttgacacctttgtctaaaatgggttcactgtaggtgtgtggatttgtttctgggttctctattctgttctattcatctctgtatctgtttttatgccagtaccgtgctgttttggttactgtagctctttagtgtaatttgaagtcaggtaatgtgattcctgcaattttgttctttttgcttaggatagcattggctattctgggtctttcacagttccatataaattttgtatttttctatttctgtgaagaatattattggtattttgagagggattacattgaatctgtagattactttgggtagtatggccattttaacaatattgattctttaaatccatgaatagtttttggcgtcctcttcaatttctttcgtcagtgttttatagtttttattgtagagatctttcacatctttggttaacttaattcctaggtatttaattttatttgtggctattgtaaatgggataactttttaatttctttttcagattgtttactgttggcatatagaaatgctattgatttttgtgtgttggtcttgtatcttgcaactttactgaatttattggttctaatagttgtttggtgtggagtccttagttttcccaatataacatcatatcatctgcaaacaagaataatttgctttctttctttccactttggaagccctttatttctttcatttgtctaattactctagctagaactttcagtactatgttgaataatggtagtgaaagtggatatccttgttgtgctctggatcttagaggaaaggctttcagtttttccccattcagcaggatactagctgttctgttatatgtagcttttgttatgttgaggtatattccttctataccagttttttagggttttatcatgaagggatgttgaattatatcaaatgtgttctcagcaccaattgaaataatcatatggtttttgtccatcattctgttgatatgatgtattgcattgactgatttgtgtatgttgaaccatgcttgtatcccagggataaatcccacttggtcatgatttttttgacatattgttgaattcagtttgctagtattttgttgaggatttttgcatcagtgctcgtgagagatgctggccagtagttttcttttttttttttattttttttctttctgattttggtatcagagtaatactggccttgtagaatgagtttggaagtatttcctccttctctattttttagaatagtttgagtaggattggtattagttcttcaaatgtttggtagaattcaacagtgaagacattgggtcccggacttttctttactgggagactttttattatggccgtgatatcgctacttgttattgatctgttcaggttttggatttcttcgtggttcagtcttagtaggttgtatgtgtctaggaatttgtctgtgtcctctagcttttccactttattgcatataattgctcatagtagccactgatgatcctttgaatttctgcagtatcagttaaaaggtctccattttcatctctgttattaatttgggtcttctctctgtttttcttagtctggctaaatgtttgtcaattttgtttagcttttcaaaaaaacaactttttgattcattcatcttttgtattttcttcttttcaattttatctatttccactctgatctttattatttttttcatctactaattttgggtttggtttgctcttgctttcttgttctttaagatgcattgttaggttgtttatttgaagtttttcttcttttttggtataggcacttaaagctataaaattccctcttaatactgctttagctgtatcccataggttttggtatattttgtttccactatcatttgtttcaagaattttttcaatttccatcttaattccttcattcagtagcatattgtttaatttccatgtatttgtatagtttctaaaattcctgttattgatttctacttttattctattgtggttagagaagaagatgcttgatatttccatttattaatgttttaagacttgttttgtgaattaaaatgtagcctgtcctagagaatgatccatgtgctacagaagagaatgctgcagccattggattaaatgttttgtaaatattaagtccatttggcctatagtgcagatgaagtccaatatttctttgttgattttctgtctggaagatctgtccaatactgaaagtggagtcttcaagtctacagctcttattttcctggggtctgtctctttagctctaataatatttgctttatatatctgggtgatccagtgttgggtgcatatatatatttaaaattttatatcttcttgctgaagatayaaagatagctctgtaatgtaatttgaagtcaggtaatgtgattcctgcagttttgttctttttgcttaggatagctttggctattctgggtctttcacagttccatataaattttgtttttttctatttctgtgaagaatattattggtattttgagagggattacattgaatctgtagattactttgggtagtttggccattttaacaatattgattccttaaatccatgaacatggaatatctttccagtttttggcatcctcttcaatttctttcatcagtattttatagtttttattgtagagatatttcacttctttggttaagttaattcctaggtatttaattttatttgtggctattgtaaatgggataactttttaatttctttttcagattgtttactgttggcatatagaaatgctattgatttttgtgtatttatcattatataatgaccctctttatcttatagtttttgtgatgaagtatattttatctgacatcagtatagctactggtgctcttttttggtattcattggcaaggaatatctttttccatccttttttttttttcagtctatttgtctttaaaggcgaagtgtgtttcttacaggcagcagatcattgggtcttgtttttttgtttgttttgttttgttttgttttgtttgtttgttttgagacagagtctcgctctgtctccaggctggagtgcagtggcgcaatcttggctcactgcaacctctgactccctgattcaagcaattctcctgcctcagcctcctgagtagctgggattacaggcatacgccactctgcccagctgatttttgtatttgtagtagagatagggtttcaccatgttagccaagatggtcttgatcasctgacctcgtgatctgccttccttggcctcccaaagtgctgggattacaggtgtgagccaccacgcccgacctgggtcttgttttttaattcagccactctgtcttttgattgaagagtttagtacattcacattcaatgttattatttataagtaaagactttctcctgccattttgttatttgttttctgggaattctgtgcacttcttttccttctttctttcattcctgtcttccttttagtgaaggtgatttttgtctggttatgatttagtttattgtttgttawtttttttgtattcattatatattttttggcttgagtgatatagtttggctctctgtccccatccaaatctcatcttgaattgtattcccataattcccacatattgtgggagggacccagtggaagataatttttttgtttttttttaattatactttaagttctagggtacatgtacacaacgtgcaggtttgttacatatgtatacatgcgccatgttggtgtgctgcaccyattaactcatcatttacattaggtatatctcctaatgccatccctcccccctcccccctccccccaccccatgacaggccccggtgtgtgatgttccccttcctgtgtccaagtgttctcattgttcaattcccacctatgagtgagaacatgcggtgtttggttttctgtccttgagatagtttgctgagaatgatggtttccagcttcatccatgtccctacaaaggacatgaactcatccttttttatggctgcatagtagtccatggtgtatatgtgccacattttcttaatccagtctatcattgatggacatttgggttggttccaagtctttgctattgtgaatggtgccacagtaaacatacgtgtgcatgtgtctttatagcagcatgatttataatcctttggatatatacccagtaatgggattgctgggtcaaatggtatttttagttctggatccttgaggaatcgccacactgtcttccacaatggttgaactagtttacagtaccaccaacagtgtaaaagtgttcctatttctccacatcctctccagaacctgttgtttcctgactttttaatgattgccattctaactggcatgagatggtatctcattgtggttttgatttgcatttctctgatggccagtgatgataagcattttttcatatgtcttttggctgcataaatgtcttcttttgagaagtgtgtgttcatatccttcgcccacttgttgatggggttgttttttcttgtaaatttgtttgagttctttgtagattctggatattagccctttgtcagatgagtagattgcaaaaatgttctcccattctgtaggtggcctgttcactctgatggtagtttcttttgctgtgcagaagcttcttagtttaattagatcccatttgtcaattttggcttttgttgccattgcttttggtgttttagacatgaagtccctgtccatgcctatgtcctgaatggtattgcctaggttttcttctagggtttttatggttttaggtctaacgtttaagtctttaatccatcttgaattaatttttgtataaggtgtaaggaagggatccagtttcagctttctacatatggctagccagttttcgcagcaccatttattaaatggggaatcctttccccatttcttgtttttgtcaggtttgtcaaagatcagatggttgtagatgtgtggaattatttctgagggctctgttctgttccattggtctstatctctgttttggtaccagtaccatgctgttttggttactatagacttgtagtatagtttgaagtcataatttgaatcatgggggcagtttcccccatactgttctcatggtagtgaataagtatcaygagatctgatggttttatcaggggtttccgcctttgcatcttcctcattttctcttgccactgccatgtgagatgtgcctttcgcatgctgccatgattctgaggcctccacagctatgtggaactgttaagtccaattaaacctcttttgttccccagtctacccagtgtctttatcagcagcatgaaattggtacaagtagagtgggatgttgctgaaaaggtacccaaaaatgtggaagtgactttggaactgggtaacaggcagagattggaacagtttggaaggctcagaagaagacaggaaaatgtgggaaagtttggaacttcctagagagttgttgaatgtctttgaccaaaagcctgataagtgatatggacaataaggtccaggcttagatggtctcagatggagatgaggaatttgttgggaactggagcaaaggtggcacttgttatgttttagcaaagcaactggtggcattttgcccctgccttagagatttgtggaactttgaacttgagagagatgatttagtgtgtctcgtgaaagaaatttctaagcagcaaagcatycaagaggtgacttgggtgctgttaaaagcattcagttttaaaagggaaacagagcataaaagtttggaaaatttgtagcctgacaatgtgatagacaagaaaacccatttttttgttttaggagaaattcaagccaacttcagacatttgcataagtaatgaggagctgaatgttaatccccaagacagtggggaagatgtctgcggggtttgccagaggtcttcacagcagaccctcccatcacaggcctggaggcctaggggaaaatggttttgtaggctgggcccrgggtcctgttgctgtgtgcagcctagggacttggtgccctgtgtcccagctgctccagccatggctgaaaggggccaacatacagcttgggccatggcttcagagggtgcaagccccaagctttggcatcttccatgtggtgttgagcctatgagtgcccagaagtcaagaactggagtttagaacctccacctagatttcagaagatgtatggaaatgcgtggatacccacgcaggtttgctgcaggggcagggctctcttggagaacctctgctaaggcgtgcagaagggaaatatgggctcaccgcccccacacagagtccctgtggaggcaccgcctagtggagctgtgagaaaagggccaccgtcctccagaccccagaatggtaaatccactgacagcttgtgctgggcacctggaaaagttgcagacactcaatgccaacccatgaaagcagccaggagagaggctgaaccctgcaaagccacaggggtggagctgcccaagaccacgggcactcaccttttgaatcagcgtgacctggatgtgagacctggagtcaaaggagatcattttggagctttaaaatttgactgccctgctggattttggaattgcctgggccctgtaacccctttgttttggccaatttctcccatttggaatagctgtatttacccaatacctgtaccccccttgtgtctrggaagtaactagcttgcttttgattttacaggcttataggcagaagggacttactttgtctcagatgagactttgcactgtggacttttgggttaatgctgaaatgagttaaaactttgggggcctgttcagaagccatgattgcttttgaaatatgaggacttgagatttggaggggctgggggtggaataatatggtttgactgtgtgtccccactcaaatctcatcttgaattgtactcccataattcccataattgtgggagggacccagtgggagataatttgaatcatgggggcaattttccctatactgttctcatagtagtgaataagtctcatgagatctgatggttttatcaagggtttccacttttgcatcttccttatttcctcttgccactgctatgtaagaagtgcctttcacctccctccatgattctgaggcctccccagccacgtggaactgtaagtccaattaaacctctttttcttcccagtctacccgatgtctttgtcagcagcgtgaaaacggactaattcaatgaggtttgcaaataatatcttatatctcatcattttaagcttataacaacactatttgcataaagaaacaaacaataacaaactaataaatatataattttttttagatggagtctcgctccgttaacccaggctagactgcagtggcgagatcttggctcactgcaacttccgcctcctggttcaagccattctctcaactcagcctcccaagtagctgggattacaggggcatgccaccatgcccagctaatttttgcatttttagtagagatggggtttcatcactttggccagkctggtcacgaactcctgacctcaagtgargcacccacctcggcctcccaaagtgctgggattacaggcgtgagccaccacacccggcsactaataaatattttataccttaacttcatccccctgcttttcaacttctgtttctatttatatcttattgtactatgtcttgaagagttgttgtagttattatttttgacctgctcattgtttatcctttctatttaataagagtagtttacatcccacagttacaatgttatagtattccgtttttttctgtgaacttgctattaccactgggttttatgccttcagatgatttctttctttttttttttatttttttattattatactttaagttttagggtacatgtgcacaatgtgcaggtttgttacatatgtatacatgtgccatgttggtgtgctgcacccgttaactcgtcatttagcgttaggtatatctcctaatgctatccctcccccctccccccaccccacaacagtccccagagtgtgatgttccccttcctgtgtccatgtgttctcattgttcaattacctcctatgagtgagaacacgcagtgtttggttttttgtccttgcggtagtttgctgagaatgatggtttccagtttcatgcatgtccctacgaaggacatgaactcttcattttttatggctgcttagtattccacggtgtatatgtgccacattttcttaacatccttttctttctgattgaagtgcttcctttaggcatttcttgtgggagagatctggtgttgataaaatttctcagcttttgtttgtatgggaaagtctttattcccccttcatgtttgaaggagattttcaccagatatactatactagggtaaaagtttttttgttttgttttgttttgttttttgtttytctcctttagcactttaaatatgtcatgccattctctcctggcctgtaaggtttccactgaaaagtttgctgccatatgtattaaagctcctacattgtgtgctatttgtttcttttttcttgctgcttttggaatcttttctttatccttgagctttgggagtttgactattgaatgccttcagatagccttatttgggttaaatctgctttgtcttctgtaaccttcttgtacttggatattgatatctttctctaggcttgggaagttctctgttattatccctttgaataaactttccactcccatctttttccctacctcctctttaaggccagtaactcttagatttgcccttttgaggctattttctagatcctgtaggcatgcttcactgttttttattcctttttcttttatttcctctgactatatattttcaaatagcctgtcttcaggctcactaattctttcttacgcttgttcaattctgctattcagagtctgctgcattcttcactatgccagttacgctttttagctacacaatttctgcttgattctttttaattatttcaatctccgtgttaaatttatctaatcgaagtctgaattccttctctgtgttatttttaatttctctgagtttcctcagaacagctactttgaattctctgcctgaaaggtcacatatctcccttgctccagggttagtacctggtgccttatttggtgaggtcatgttttcctggatgatcttgattcttgtagatgtttgtgtctgggaattgaagagtcaggtatttatctctccctgtagccgccacagatgggaatgtgctgagtctcacctgaagccaccaagtctcggagtcttacccaaggccctcaacgtggtacctgtatattgctgctggttattcagggctcttcagttagcaggtgatgaatccttccaagatgggatccttcccttgaaggcagcaggttcccttctggcccagactgggcctcatgactctgaccagtgccccatcctgctgtgactgagctgttatccaaaatgcaagacaaagtcctccctactcttctctctcctctcctcaagtggaaaggagggatctcttttggatacttgaggtgtgcagtctggtgttaggagagcggtgataccagcactcccttagccaccccagctggtgtctcagtggattgtgtgccccctgagtctactggctctgggcccattgcgggactaggattggccttggaggtctagcccttgtggcctagaccacctttcaggtttatctagggccccagagcactttatcccattgtggcaagacttgcaggaactcaagttctgaccactgggatatcagtgattcccctctggctagggctggtctaaatgctccgtcattgggtagacgtcagctgagtttggtatgcttttgctttctgctataacaggacaacagtgagttcaatgcctcacaattgctacactctccctttccacagtgcacaaacgtgctttccataccacactactgcttcagggggaggggagagaggtggcgtttgtgattcaagactgtttttcttacctcttcggtgcttctttcagcaatatgaagttaaaaccgggtcctgtgagtgctcacctgattttttgttcttatgaaggtatttttttttgtgtgtagacagttgttaatttgatgtccttgcaggggggagggtacaatccatggagccttctattgtgccatcttgctccattccctcataactcattttttattgctgaataatgttgcatattatgaatgtaccacagtttgtttatcccttcacttattaaaggacacaatggttgcttccaatttttggtgctttgaataaagctgcagttttttgtgttttggttttgttttgtgactataagatttcacatcattatggtgaatgcgtaggaatggtggttgctggttgatgtggtaagactagtttagctttttaagaaaagacaaaactgtcttacaaagtagctgtgccatcttatatgcccaccagcagtgaatgagcattcctgtcactcggcatcctctccagctattggtgttgttgggtttttggatgttagctagtctaatgtgtgtagtggtacctcctggctttaatttccttgctttagttccctaatgaaaaatgatggtgaatgtcatttcaatatgcttgtcatctgtataacttctttgttgaggtgtctcttcagatcttttgcccattttaaaattattgaaattattttgtttaaattatgttctttgtaatgtccaatttaaaaattttttatttcacggatcatgtttttagtgtcttatgtaaaaagtcattgcaaacccaagttccctagggtttctcctgtactatcctctaggagctttataatttgcattttacatttaggtctatgattcatattgagttaatttttgtttgcaaagtacagagtttgtgtctaggttcttttttttccctttttcaaatggatatccatttgttccagtacaatttgttgagaaaaactatcctgtctccattgaattgtctttatttctttgccaaagatcacctcggtatattgctgtggatctatttctgggtcgtctatcatataccactgatgcatgtatctgttctttcagcaacaccacgctgtcttgattactttagctttatagtaagttttggaattgggtagtgtgagtcctccaggtggattcttactcatcagtattacctaggtcttttgccttcccaaataaagtttagaatcagtttgccaatatctacaaaatagcttgctgggatttgaattgggattacattgagtctatagatcaagttgggaagaattgacatattaaaaatattgagtcttggcgaagtgtggtggcacacgcctataatcccagcactttgggagcctgaggtgggaggattgtttggggttgggaatttgagaccagcctaggcaacatagtgagaccctgttctctgcgaaaaataataaaatagccaggtgtgttaccacatgcctgtagtcccagctacttgggaggctaaggagggaatatagtttgagcctaggaggttgaggctgcagtgagctgtgatagcagcactgtactccagcctgggtgacacagcaagaccttgtctcaagaaaaaaaaaaatggagtctttcaattcattaacacagattatttctccatttacttagattttctttgtttcatcagaattttacaatttttcacatatggctcttatacatattttgttagatttatatctacgtatttcctgttttggatgctgtcataaacaatattttttaaagttttaacatttacgtataatagttgtacatatttttggaatacgtgtgatgcttagatacccgcataggatgtgtaatgatcaaatcagggtaatcagggtaattgagatatccatcacctcaaacatttgtcttgtgtttgttttgggaacattccaattcttctgttctagctactttgaaatatacaataaattattgttaagtataatctctccattgtactattgaatattaaaacagtatttttttaaaaaacatcaagttccagttgctcattgctggtatgtgcaaaagtaactgacttttgtctgttaaccttgtattctgtgaccttacagtatttgcttattagttcaggagtaattgtttttctttttttcttttttcgttaatccagttctttcgtactttctatgtagacaagtcttgtcatctgtggacaaaaatcgttttatttatttcttcccaaactttatatacttttatttcccttaaaaatgtttttgcaatcgctaggactctcagtgtgatattgaaaaagagagagaacatctttttcttatttcagatcttaagggcaaagcatccatttctcaccgctaagtaagacattatctgtaggtattttgtagatgttctttgccaaattgaagaagtccctttcgtttccccctttttttttaagtttgtgctttttaggaactaaaagatttttttttaaatgtatacatatacagaacgtgcaggtttgttacataagtatacacgtgccatggtggtttgctgcacctatcaacctgtcatctatattaggtatttcttctaatgctattcctcccctaacactccacccccagacaagccccggtgtgtgatgttcctctccctgtatccatgtgttctcattgttcaactctcacttatgagtgagaatatgcggtgcttggcgttctgctcatgtgttcatttgctgagaatgatggtttccagcttcatccatgtctctgcaaaggacatgaactcatccttttttatggctgcatagtattccatggtatatatgtgccacattttcttaatccagtctatcgttgatgggcgttggggttggttccaagtctttgctattgtgaacagtgctgcagtaaacatacgtgtgcatgtgtcttcatagtagaatgatttataatcctttgggtatatacccaggatgggattgctgggttaaatggtatttctagttctagatccttgaggaatcgccacactgtcttccacaatggttgaagtaatttacactcccaccaaaagtgtaaaagcttcctatttctccacatcctctccagcacctgttgtttcctgacttcttaatgatctccattctaactggcgtgagatggcatctcattgtgattttgatttgcatttctgtaatgaccggtgatgatgagctttttttcatgtatttgttggctgcatacatttcttgagaaatgtctgttcatatcctttgcccactttttgatggggttgtttgggttttttcttgtaaatttgtttaagttccttgtagattctggatattagccctttgtcagatgaatagatagcaaaaattttctcccattctgtaggttgcctgttcactctcgtgatagtttcttttgctgtacagaagctctttagtttaattagatcccatttgtcaattttggcttttcttaccattgcttttggtgttttaatcatgaattctttgcccatgcctatgtcctgaatggtattgcctaggttttcttctagagttaggctttaggtgttacttttaagtctaatccatcttgagttaatttttctataaggcataagaaaggggtccaatttcagttttctgcatatggctagctggttttcccaacaccgtttattaaatagggaatcctttccccattgcttgtttttgtcagatttgtcaaagatcagattgttgtagatgagtggtgttatttctgaggcctctgttctgttccattggtctatatgtctgttttggtaccagtaccatgctgttttggttactgtagctttgtagtatagtttgaagtcaggtagcatgatgcctccagctttgttctttttgcttaggattgccttggctatacagactcttttttggctccatatgaaatttaaagtaattttttctaattctgtaaagaaattcagtggtaacttgatagagatagcattgaatctttaaattactttgagcagtagggccatttttacgatattgattcttcctttccatgagcatggaatgtttttccatttgtttgtgtcctctcttatttccttgagcagtggtgtgtggttcttcttgaataggtccttcacatcccttgtaagttgtatgcctaagtattttattctctttgtagcaattgtgaatggtagttcactcatgatttgsctggctgtctgttattgttgtgtaggaatgcttgtgatttttgcacgttgattttgtatcctgagactttgctgaagttgtttatgagcttaaggagattttgggctgagatgatggggttttctaaatatacagtcacatcatctgcaaacagagacaattggactaggaagtccctttctattggattttgtgagatgctttttctacatcaattgatatgatcatatggtttttcttcttttagcctattgatgtggtggatcacattgattggtttccaaatattgaaccagcttcttatacctgattgtggcgtataattccctttatacattgatgtgctaatattttgctgaagattatttttccatctgtgttcatgagagatatcagtctactattctgtgttcttgtaatgtctttatctggctttggtattagggcaactcaagcctcatggaatgaattaggaagtgttcctctgaacctgttttctggaacagcttttggagaattggtattatttgttccaaaaatgtttggtataattctttgggcttgatgctttctttgttagcttattaattattgattcaatttctttagtagaaattccttcaatttcttttttttatagccctattcagatgagatgatgtatttctccttgtgtatattttggaagtttgtgtcttgattaaagaaatttcatctaagttatcaaatacatgggcagagcagtttttcttagtatttctttattatccttttatttttatttattttttaaattatactttaagttctagggtacatgtgcacaatgtgcaggttacatatgtatacatgtgtcgtgttggtttgctgtacccattaactcttcatttacattacatatttctcctaatactatctctcacccatgtccccaccccacgacaggccctggtgtgtgatgttccccgccctgggtccaagtgttctcattgttcaattcccacctatgtgtgagaacatgcggtgtttggttttctgtccttgcgatagtttgctcagaatgatagttcccaccttcatctatgtcgctgcaaaggacatgaactcatccttttttatggttgcatagtattccatggtgtatatttgccacattttcttaatccagtctatcactgatggacatttgggttctttccaagtgtgagctattgtgaatagtgccgcagtaaacatatgtgtatatgtctttatagtagcatgatttataagatcaatagtgatgccccctctttcatttctgatattggtagtttgtgtcttccttccctctctctttcccttttttttttttggacggaggtatttgggaagtgttttcaaaatacacatttgagcctcttcctatatctgcttccgatggaggtttgggggtgttggcttggccttgctttctttagcacatcccagagctcctgatgtatcctgtgtgaggctggagactgggaaccgttatacatctggatcattctgtttttagttttcaaaccttttcaggagggcaytttcaggccatttgtgaatgttaatatgtgaaacagaaaaatgcaaagccattgtaattgatttgcgagaggaagagagagacctaaggatactgcctgcttggtattcacccctctcatctcaaggcagcgcctgaggaagccctaggggggtcccagagccccatctctggttctcatattaaataaggtcatgctcgtgaatgtatttgagggtggtgcttagcacataatacgggttggttaaaggttagctgctggtcttgctcttattgataatttcctatgattcataggcatccaccagtggagagggctgcctctcagggtggtcagtggattccctgtggccaaggaatctgagcagaagctgatatatgggagaagagagtagaggaccgcacagggccttcacaaagagccctctaggtccccttctgaatttggagatgcaggaattcagcctgtctcttcaccttccctcttcctagaacagagggtggcacaggggagaaggtggtgtgtcccagcacatccaaacctttccattggaaatcccaacgtcctctgatcacatccttctaggatcgtggtccatttcagtttcttacattrtttatctggttttggaaggctctgctctgaccaacgggggattgaacctgcacagtccrgtgaagaggaagctggaagcggagaaggactacgtctttgacaaaaggctcagatacagtgtccgccagaatgaaagcaactgtcggtttcgagacatcgtygtgcggaaggaagaagggttcacrcacatcctgctgtccagtcagacctcggataacaatgccctgacacctgaggtaaggggtggckgccagagggaagggcargctgggctgtggctccttctcactyagaatggaayattggctttctccttccttccatcrgggagctgaggatggtaactagcgtgcataaaaacttgactgcagcgcgcaatttgctcatcattttacatacattatcccatttgatctttatgaccgtgtaatgataccctctcatcttatggatgaagaccatggggagagggactcactgaactgatcgtggacacagacttagccaaggggcagacccagaatccaaacatcacatcttgggcttttccagctaaactttgttgtcatcagcatgtcatatttgttggccgcagatataattcactcagttaatgtatctcactcagtttataatacatatatatgttactacatattgtatatataattgagacagattgatttcacataccataaatgtcacccttttaaaatgtacaattcagtgatttttaatatattcacaagattgtgcaagcatcatcactactgaattccagaacatcttcatcaccccaaggagaaacctcacccacatgaaatagtaacttcattctcctttctcccatgccctggaaaccactcatctactttctgtctctgtagatttgcctattccggacagtttgtatcaatggaaacgtgcagtttgtagccttttgtgtctggcttttttcacttagcatgttttcatgtttcatccatgttttagtgtgtatccatacttcattccttttatggctaaataatattccattgtatgaatagactatattttatctatcaccttttctatttgttcgacttttggcttgtttctacttttgatttttatggataatatttctacaaatgttatatacaagtttttatgtgaacatatattttcaggtttcttggatatatttctaatttctaatatgattttcttgagtctattccaattcttagaattgctgggtcatattgcttaccgtatttttcgaggaactgcaaaaactgttttccacagtgggtcccccattttacgttctgaccagtagtatgtgagggttctaggttctctgtatcctcgataacacttgttacgtctgtcttttttattatagcaatactagtgcatgtgaggtggtatctcaytgtggctttggtttgcatttccctgatgactagtcatgttgagcatcttttcatgagtgcattggtcatttatctcttctttctattcacatcctttgcctatttttaaaattaggtcacttttctttctatggttgacttttaggcattctttatttactctagatagtaaggccttatcagatacttgacttgaaaatatgttctcctattctgagagttgatgttttacttttttgatagtgccctatgacaaacaaatttttaaattttgataaagtctgttttactgctttttctacattactttttaaatattaatcatgcttatgtcttagatgaataaaatagggaaacaatgaatacttaatgcagtgagattgacaacatcattcaaaatacagggtacatggcaggagaagggaacagattcttgacggcacaaaggtgggaagatgctccacgaagcagccttttcctacaagatgcctggggtagggcagtagagtggtaaatggcgataacagtgatgacagccactgaacaggggctctttgttccttgtatttgctgtttatctcatgtcatttcgtcacctcccttctgatgtaggattgttatgatccacattgtatagatgagaaaatttaggcttaaacaacccaactgggctagggtctcacagcttaaccaagtaggtgccaggagggcaggggttctgttcttgctcgcccttttgtctcttctgttcatcccagtgccaggcccactgaagacatttaactccgagacccctttttctgtccttgcaatatcctgtattctctttttcataatagcaatgggaggttaatgagaagggtatgttttggaggatgaagtcaagggatggccactcactcacatcgggataatagaatgacctagcattgtccagtgtaccccgtaccatcagggaggcataggaagtggggtggggagggaggtgctgtgctcttgaatttgtgattgcattattattatggttgaaatagaccctggttcttttacggggttgtgggtgcggccatctggaatgattgacaaatggtgagggaagcactgtggctaaagctttggggttgtggggtagtggttgtgtgctgccccttctctgagcatggtgttttgggggcctctccatcctccgcctgtaacagaagcatccctggggttctctgctgtgtagacctctgtgtgggattcaaagaagcccagagcctgcagtccaccccgaaagcagctcttcatatgtttatacacctggaaacctcattattttaagctcatcatgacatctgcagagaccagtttttcctagattctttctacttcactactttctaaaagcgtgctctaaaaaggcacagcattttctttcaagaaattgaacacatgtgaagtctccagttcattccctytgtggagcagccctgggtggtaactgttgcccactcatcatggaaaacatgttgtgctcgtctgatttaaggtgcacaggttctcacctcctgagctgcgggcttggttaattggggttcctgccctaatcagtgtcagttggttacagaacaggaggaaaacagtcaaagttattgatctggtattttcagctgtctcaacaactgaaggggattgagtatgtgggtgagccagctgactgggtaaagcagcccgtaatgaaggtcctactgaaatgaagaggctgtgtgagaggaggaatacaggttttagtctagcagacctggcttccaatcctcccttcaacttaccatgctgttaccttgggaagttactttgctgctctgagcttcctcctttatagaaattttacagtattttgctggcaagattagagataatgtatgcacaggagcccacaaagtacctggcatataggaggtatgtaataaatgttcccatcattgttaatgggaagcagaggccatttaatgtccaccagcagacattgccttgcttgtgaatggaggaaccagaaggcgaccactttcatggttataattaagttgctttttctagttgtatgtgtaacattggttggattggcctcatgggcagaaattcatacattactgtgtgcattaagtagattctgaagctagtgggtttgctgtaatatttctcctgtctgggatacagcagagaaccaggagatgaacagaaatgccccttaaggaaagagtcagtgaaacagatgacacagtctccttgattgaaagcttatccacttccccaytgggagaagactccaggtcttccttcagtgcccttggcctcagcccacaatcctaccactactctcaggaacacagcagacatgcaggagtcccttttcacaccgctcttgtcgtggccccatgtgcaaacctgtctcaaggccggttcacctttattcttgaatagctctttcatatgtttacttctatttccaccataaccattacagtccactactaggctattttgtctggactgctgtaattagccgtctcataagtctgcctcctttcatgcttcctgccctgtaatccattctgcataaggcaggcagaatgatcttccagaaatgcagctgtggccaagtcaaccctttatacacacacccctccccaaccaaatgtgtcratggctcctgattaccctggctgacagtcagaaccctcagcgtggtgcagtcccgcctcatcgtgcagcccacctcacatacctgtcctcctgtacctcagtcacctggtttgctttcatgcttacacctgccccggggcctttatatgtgctctgactggaacgggcctttcttcctccttgcttcactcactcttgctcttccttcaggtctcagttcacccatcacttgcacaagtcttatcacagttgttagtctacatgtatttgtggggtgacttgttaaatgtctgatatcccccccctcctccattagactgtaaacttcttggggataaagactggcattctcttaattcagtaaacatttgttaaattcttttatgtgaaagggtctggactaggtgctgcaagggatataaagatggtaagtatgctattttagctcttgtgggattgtattagttatctataactgtagcagattgttttaaacttagcattttaaaacagcacacgtttattgtctcataattgctgtgggtcaggaatctgggcatggctcagccagatgcttccagctcaaggtctcttacaaggctgctgtcaagtggaggctggggctgcagtctcacacgaaggctcaactggaggagaattcacttccaagctcacccacgtggttgttggatgcatctgtttcctgccatgtgggcctcttctgagggctactcatgacaaagcagctttattccctcagagcaagaactccaagaaagagcaagagaggatgatccttttgtcacctattctcctcctgaagatgacctgccatcattttggcatcttctgttgaagccagttgctaggtccagtcttctcttgagggtgggatttacagaagagtgtgaatacaaggggtttaaatcacacagaaggcaagatgcagtaaggaggtgcacattctacaagggagtttgtcagaagaatcacaacaaggatttaaagtattcagggttttgggagaagggagagtatgcatctagtctagggtatggggaaatctcccttgaaggtggttgcatttgagataggcctggtgtgactggatttcagcaggtrcagatgaagtatacagagaaggaccctgattgattcctcttttacatcacattctaattaatttggttatctgggtgtaaacccacgccggatccaaagctagaggtcatagagggggagtctgttctctccagcagacaactaatagcaggtgcaagtgacagctaggaagtgcataatgagggcaatgaatgtacaggacatatttaggacttcaaaatgcatagcagtctgggactatttgttatagaatcacatcccagaagcctctaagaagaattttctgttataggccagcaggtgaycattgagaggtagttatatgcatacagtatattctgtttaagaaggaaacagaatstggactaatttcggaacattttactttaaatgaaccagttacattattaaatttggggtctttcaagaaggtagaatcttagccatctgtccaaattgaattagcaacaccaaaaggaaagaaaagagatataaactagatataacttttttaaaaatgaaaaayagtatagtttgtacttttgtatcaataaaatgcaaatttattttcagtttaattcataaatgagatggctgttttgtttggtcttttatttattttttcttaacgaattgagaagtaggtaagtatggccttagccagagaagctactctctgagtcatctatagaatttcagttcacctctttacagcagggtttctttttttttttatttgcctctcagagaaatagagttcatgtataggtgagagtatatctatttctggaggcagatggattaaaggacccacaagatagtggcctgtgagcttttttgatgttcaaaatgaatatctgttgcttatacccagataggctggaatgtgcttattccatccttccagcagggcacagggctggagattctcaattcagattgacatccagccctgttttttccaccaaaatcctatccattaaaaaaaatcatccaacagtataaagtaggagaaagtaaaggatggttagcatgagatttaaatcatggtcgtgcctcttactgttggtgtgaccttggacatcttactgcacctgtctgagtcttcatggtgtcacttgcaaggttgagataccatctcctaccttaccagatttttgtttggaataaaattcctggtgcaattcctggcactactaggtgcttaagaaatggaagttcttttaaaactttaaccttaaaaaacagtattttcccagtatccccctaacttccatacaccgtgatgatgcctgtggagtctttaatagtgatcctttggaagtttgctcacttatcatctcttctgttagcctctaagcttcacccaggcacacgccatgccttgttttctatcactatgtactttctgctcttgttttaacaatccagtgattgggtgttctttattttatcctcctccccattcattataattcatgtatttttaagaagttatccctaaattatatacacatagcaaaggctaagagtaactacctccaccacttccgaatataaccttgacatgctccaaccctagtcattcctcctctcatcctctacaatattattgcctgctactacagttgtacgccataccaacccctgccctcaaattaatgaatatcagtattatgatttttatagtcagtttttttttattaacaacacattcaccaattttttcctttttttttttttttttttttagatgggatttcattctgtcaccgaggttggagtacggtggtacgatctcggttcactgcaacctctgcctcccatccttctgctgaagagctgggaccactggcatgcaccaccatgcctggctaatttttttttttttgtatttttaggagagttggggtttcatcatgttgcccaggctggcctcgaactcctgagctcaggcaatctgcctgcctcagccttccaaagtgccagaattacaggtgtgatccaccaatttctttgctggttattattccttgcaggtcagtttttgtttctgaatatagtttctttttcttgaagtacattcctttttagttcttttagtgagggtctaaaaatggtaaacattctttgactgaaaatgcctaatttttacccttccttttaagtgaatttagctgagtgaagaatttgttgacagttgttttcctcagcaccttgacaattgtattctgctaccttctggaatttatttctgctatgtagaatttgcctccggttaaatatttgccctctgtaggtaagctttctttttcctctggatgtatttaaggttttgctttgtctttgatgttctgaagtttaaatatgatatgtctgtgcttgcgtgtattgttatttctattgcttagctttttgttgtagttcttaaattttagtattcaagtctgtggtagatagaagccctctccccaagatgttcatgtccaaatctccagaatctatgactatgctaggttccatggctagggggatttaaggtttcagatatacaattaagggtgccagttagctgaccttaaaatagagagtattctagactacctggatgggctcaatgtaatcacaagggtctttaaatgtagatgagagaagcagaagaatctgtcagagtgacacaaactgagaaggtgaggaagacccagctcggcattattgcctttgatgatggaggaaggggccakgaaccaaggaatgtgggtggcctctataagctggaaaaggsaagaaaatgattctcccttagcgcctccacaaaggaatgcagtcttgctgacaacttgattttaacccagtaaacctgcatcagacatctgacctaagggactataagataataagtttatgttattttatgctgccaaatttatagtaattttttacagcagycataggaaactagtggatctttcatcaattctgttaaattctcatcctttatctctttcaatattgactttctcctcttctctgtgatctcctgatagaatcccyacagcaccaattttaaatcttagcattcttgtctttaatctctccrttatattttccatctctgtttttctgtgctacgttttggtcamttacttcaggtctttcagttactttatgctcyctttagcaccacctaatctgctgttgatctcagcagatgtccatgactttgtttttcatttccagaagtttctttttctcctcaaatctattttttccccatattctcctgttctttccttattgttcatgtctgttttcctctctgtgattatttgaaacatccctattttacagtctcttttggatccttgtattacttgaagtcatgttatgtaatccgctcatttgctgagtatgccaacttgtatttcccaagtgttttgtgatttttgattgtgagctcatctcctgctagggttttttttcctgtgtaattcccatgcggtctgggttgcagcttctccccagagtacttttacattcatttccatcagacacctcagggatattactagcctgtgtccaatttctgtgttaatttttttatcttgtggattcttccccatgtgggtgtggtaactcagaacttcaaatccacatacagggcaggtatggagttttagcttctcatgggagagttttcctacagcaaaaataaattatttgctggagtggcttgtcctgactgtggtatggcaaataggtagcagaaggactagaagggctgagcctgtttgtggtaaagccgattccatcataggcttcctgtctccaaagcctgtaccttttcagcctggccaactgccttgagtccttgtgaataccaggcacccaagagacattgtgtagtctagatacgcagtgttgctgcaaggttgtgattggaaggagtcggggagtatgcaggggtgtgagggggattgcttcagtcagtacacagacttggagggtctggatgatgcttgggcctcagaacgtagcatgtggcaggagctcactttcagatcctggctccatcctaaaatccacagtctgggaggggagaaggatctgctttcccctgggcatcacagagctcatttcctgctgctcccgtagccacactgctatcatgtggaggtcttcagatgaaaagccctgatgctttgagaggcagcctagcytgcggtgaaggacatggtccccaaagtctgacttcctgagtcctagtctagctccaccccatacttgcaaacttctcacagtgactgtactttgattttgtcattcataaaatggagcttcaacaagtgactcccccagaaggctaagtgagttcatatygtaaagcagcacttctcaaacaataacatgcatatgaatttcctgcaggtcccatgaacatgaagaaactcatcctgtcggtctgggctggggtccaagactctgcatttctaggcagctcctaggaatgtgaagctgctggtctaaggaccatactttgagtagtgaggtttgaaagtgcttggggcagaagctgacctgttccgtagggtcagtatataaacggggacatcttgcagggtatgtgccatgcactgcactaagcagtctacttgcatcttgtttgttggttcatctgaggtagctctgaattttacaaatagggagaccaggagaggctattgatttcaccccagaacacccaagatactgtggggtagaagtggagcttgtgcccaaccgtagccccagaggcgcatgtggaccttctggaaccccctgtcatacgtcggggctggggctttagactctgcatttctggccacctcctgagggatgtgttgctgctgttccaaggactacactttgagcagcgaagtttgaaagtgcttggggcagacagagcttgtaccatctccgcaggaagctttgagctggccagtctgttagtgcaggctctgccacttcctgacatgttgctttgagaaagtcacctttctctctgagcctcagtttccctttctataaaatggagctaataataatgcccacctcacaaggggttgggggtgcaagtactcatgggcaagtgctctgtaaccttcaggctcatccaaaaatagttgctcatgtgatgaggagctgaatagccgggctgcatgcctttgaagagcgcaaacacagttagctttcatggggtgcaaactttttggtggcaaactctttacagtcttttaaatggttttcacaggtgccttttgagttggccttgtaaaagcttctaggtgggtgagcaagcagcctgcctaatttcctctgaagttgaggaaaagggctatgagggagtttctgtgtgactaaacaagcagatactgagtgtccaccataccccaggcactgtgctaggctctgagtatacactggagaataagagagatgcaattcctgtctttattaaaataacagttgagcaagtgtggacaaataaaaggcaggaaacaaacaagtagtaggtaagacaggtaaatgtatgataaatgaagaaaacaaatgggggtgctgggcaagggagaatagggggaggagaatagggtgggtcataaaaggaccttcagaatcaaggagcctgggcaaccccacaaggggtggggagattggcatgtgcaaaggtgattaggtgaatataggcttggcccagggaagacgttcaaagaaggctgcagggtggtaaatgggagctctgggctctcctagctgccccacccctgcctgtccacccctgggctggctgcgtgctctggggctgagtcctctccttctccataaatggaaggccatggccagatagtgggaatttgcagtgtcaaagtgcatagactaggcattgtgtgagccaggccagggctcaaatccacctctaacacttaccaactgtgtggccttggactagtgttacgacccctctaggcatctgtttcctggtctggaagtaagaatagtgaccactcactggtgttggggaggctggaacccatgtagcagggtacctggcctgcagtacatgttcactgctaaggtagcacttgttggtcttaccacttaccgagggcacctgtgtctatctcccaaattctgtcctgccctccacctgcctaagacaaggtcatagagacctaaaaatcctagggcatacatgcaggagacccaagcaggagattaggggaacttgtcccatgatggcagggtggccagcacagttcttccatgtcagatggcacctttactggcatgaagaggaggaacaaaatgccttttatccagaattcatcactacctcccaggaatgtgaacctgcaggtggccatagcataacctttcctttcatttattcttcactggaggccttgagagtgggyccacccacttatagatggggacattgaggatgaataaccagcatggctcaggtcccatggctwgtaaggtgcagagccagaatttggaccaggggcttggaactccagtgggacactgaacccaggtctggatctgatgccaaagcccacttgccatgtggcacctgcaggccgtgcggggtatgagctggaggaaagatgagcaaggatgtataataattaaattgagtcatctagagatggcttacatccctcacttgggctgtgcatggattttttccacatcttgtaaagggctaaataagcaaatgccagaacaagatttgcagagatttaccaaggattgagtgactccaggccaggcttccagatctgcagccagtgaccacactgcctccttattagcactcttctgccttctccggggatggtgctggagggctttggctatgataagtgtttttctccttgctctggactcttgcttgtactcagrggaggctccctgcacaggcagaagcagattccctggcctctaccctcagggggtcaggcctctggctgtcttgcagtctgaaagccccaggcttacaggatagacacttaacatccctgcaaattcatctctgccggcagatcatgaaagaagtccggcgagcgctctgcaacgcagccacagacgacagcaaactgctgctcctcagcgcagtggggagcgtgttctgcagcggcctggattattcctacctaattggccggttgtccagcgaccggcgaaaggagagcactcggattgcagaagccatcaggtgagctgtgctccttttcacacaccytggggtcctgcgtaggattaccaagtaaaaatacaggctgctcagttaaattcgaatttcaaacaaccaggaattttatttttagcataagtatatcctgtgcaatmctcgaggtctgcttacatttttaaaatgttggttatttatctgaaattcaaattttaattgggcatcctatattttcatctctaaccatggtcctgccaaaattagggatgctttgccctctaggttagatcccactttcattcttttgatcggaaagattttttatttgctatcaaggcctgagtctggtagtggccatgtgttgtccacactactcccgccccttgcctgatggggagagtctctggttgtctggttgtttgtatgtcccagcactgccgtagctcagcagtggggaggttgatggaggggttccctgggcagctgtgtgtttgcagacccaacggggtacagagtatttccccctttctaattgcccctgggcaaaagttgggatcctggcggtgacatccagtcccaacaatgagtacccttttgggacactgaagggtagttatttccccattctttatcagtatatcaaaagcaagtgagtgtcatttctagacactacggctgtttagctggtttacagctgtcacccagtgttcacctggcgggtgctgctgtatcttgcttaggaatcagacaagtcacaattcaggaatgcccctggtcacatgagaaggaacatttactccacatggtgtcacggagcctcaggccacaagtcagggattttctggggcctccagtctctatggttctgtggaggggccacacagagggaggctgattcccacgtggctatagggggctttgaggggttgctttgtctcyaagaggtgatgctaggatgctcttgtgtgtggaattctgagtccctcttcagggtgaagcagccattggagcccctgctccgaaatacccgtgtgtttcctgttgcagaatccttgccagaagagacatgacgagcctgggcactgttatgtgaaaggtgttgtggttatggaggcacaggcttcctggctgtgcccacacrgtttgcgctttgcgtggtcccagctatgccctctcactactgcctttccatgtatcaaagggggaccacaggatttccagcgtgcttctctcrtcatgcatgaggccaccagagcccatccagagaaacaagtgcccatttttgtgacccgtggagcgtcaatcatggtctttatctggtttacacatttcagtggaggtgttagctggatttccagaagtycagggaaacctggctgacacagcccctcgttttcactccatgcacragcagctcattarcatgcagaccccttgtagtgagttgaagtgtggcccccaaaagatatgtccacgtgccaatccctggaacctgtggaggtgaccgtatttggaaaaaggctctttgcagatgtgattaagttcagagtcctgaggtgagatcatcctggattggagtgtgggctccagacgcagagagaacttayttcataagaggggacacagagacaggagaaggtaatgtgacagaaagggagagcgtagagtcatgcagcctcaagccaaggaactccaagaatggccagcagccaccagaaactgggagcgaggcctgacacagcttctccgtcagaacttccagaaggaaccagccctgccaacaccttgagtttggagttctggtctccagaactatgagagaataccttttgattgttttaaactgccaagtttgtggtgactgttccctgggaaactaatacagcctggaaggaaatcaktagcagctcaaagagccccatcttttcaggctctcctcttaggcaagggcccatcctgacctctgcccaacgtcctcaatggctgctccttctggtgggcagctcttcacctttgctggatggggtctgttaacagattatcctggacagctgcaggcaaggtgggactcccaggccagccctgggttgacggtgatgaggcttgtcccagcctggggagggcgtggggatccttcttgcatgcaggaataaggtattgtagctgggtcactgaagggatggaagctgaacagaaacagggtacccrgggggtcaggtctcatgatggatttccccagagcccccaccgaatggttccttcctgtggctttgcacgcccagtctctctggtgagggaagtgtctccttgacctatccctgcatttgtgtcttagatgtatcaaagctgaggggcaaaacctcttctcctgtccccatagcctctacccattggggtctgctgcgtggtrtctgtgcgtctctggactcttgagaacsaaattcatggagaaagaggtgtcagaggcagatgggattgaaaacatcagctgtaggagaacgtggctggggcctgaggcccaaactggctcctgactttcccagctgagtagttctggggaaacatgactagtrgaattcagacatttgccatctcagcgggcaagtgagctccccttaggcagagcacagggcaagatggcggaggcaggaggaattcttctcgatgcttcaaagggagcagaagttgctagttcatgaactagcaaggatgggggcgtgggaaaggagatgtcccctggaccactggttcycagccctgacagcacagagaggcccaagggagcattcccaagaccctgatgcttggcaacacccccaggggactctgagttatttaggctgaggtggggccagcgcatcttttgatgtcagtcgtccttggtggttctcaggtgcagccagggttgagaacacccgccctatgctaaccagatttctgcaccactgattgagagcrctaagagaaacgcaagattcttatttttatgcaagagagtaaaggtggttattaaggggatgagtrtgaggaaagaggtgatacaggcatgagaaaggtgaggacgatgagcgaagatggatggaagtgcagaagatgcggcgtgtagagacagatgctcccggggttagaaagagactgtggctcgcccatcagcaccaaactcttttaaggcatctccagctctcccaactcgggagtgctgccttggaggccacactctggagttggggacacaaggtggcagtgaagcattctgcacagaacgttttgtggatttccagaggggtgtcctgagagaagcgcactgtcattgaaaggagcttgattcatactgcaagttctgtgcctgctcctgtggactttctaggtgtattagcatacttacaagaagtctcttgtgaaagaacttccttcaaaatctagcagggctaaaacgttgtttggacatagaactgccaccatctcttctcttgggacacgctcctggtagggctgaccaggcaygccgcatggccttggcaccccgtgagtggtactctcaccccctcctcatccttgcctaaagaaaacttgcatacacgtgactgggactggtgactgggacgcatcactctgcaaatgtttgatgaatgaactagcagatttggggagagctcaggtgaattgttcagaaggctctctccaggatccatcctgaaaagagtctgcctcctctgaacttgtcataggtgacaaggtggcttgttcaaacgtggtattcaggaaagcagtgttggctagcagctgcccacatggcccctggaagcagaccgcctgagctcaaagctgcctctgcacttgctggtggtggagctttgggtatgtcatggatctctctgtgcctattagctcatccagaaaatgggaacaatcaaaatgatggtactggcctcactggtgtgttgctaggataaagaataaaaagatactctgtgtgaaacactcgggctattcctggcactaatatgttcttggagttcttattatggttgttgtcactactgctggtacttccagccatgacttctagctaagctgagtctaagaccagggagtgggcgcctggactaaggggtgggttggagactaaggagtggcctgccagggacctctctgggggccccaggatggtggtcactgtttggtcccgtactggctgacttggctctgagctttggctgggggagggttctcctccatgcctctggttaaagggagttgggtaactgggtcacaggagaaatgccgattgctccaggggaaattgaggcactcctgtgagcagaattttgctgctgggtcacctgtagcctaggagaatggatcacagaccaatctgagaattgaatgaggactctgtccaccctccccagcagatgcactacccataataatagcagcagggatcgcgtgctccctgcatgtcagcactgggctagcaccctgcatggaccgtctccttggattcttattcagctccctatctggggcaacatcattgattttcccattttacagagggagaaagtgaggctccagagaccaggcaccctgtccaaggtctcaccattagttaggggcagaactgagacttcactctgagtctttcagattctgaagttgttgctccttctgccacatcagtgcagcccagcagctttgtcaggcagaagccacaggggtcgggtagagcagaggaagctgtgtgggtcaggtcagcctgatggccttggatgtgggggaaggtggcgtacagttttccccacgcagccccgccatcgcagaaggatcagatatcggagctgcagggcccgtaatgcaatatcctgtttgctgcttggctcccagtgatagagatctactgcccgaggtgagagaaagaggatggggggtggccttcattaaacatcgggtgacattttcatatcaaggaaatgaagtgcgaggcagattggatgacacaggaggggctggggcggagggtcagagctctgcacgcctggtcccctttcccttgcgtccctgattccgtttcatggatctcaggttggaaaacacagaatgaaaggctctggggtcctgcagaggaaagctctggaaagtcacaagggctgcagtccattcctgaaggatgtcatgtggttgatggagctgaggtggcaacagtatcagagaggcttacaggagacccacagcagggaggctgtcttgacaggcacggaccctcttttwttaaaaacgtccagcagaggcggaatgatgcatcgttggaatgttatggagggaattctgcaccgagtggaagatacggtcccatgagtcctaaagtccttcccacctctgagatctaagactctggaattgtatgaggtcactcaggaatgggatgtttgacaaaaatcatccaaacccctaaggattctccaaaaaagtccatatcccccgcagaccccaaattgctttcagtgaaaagcacttgcaaaaaccagtgacctaaccgaaaacctcaccattaggttaggaagtgagtgatgtcaggagatgggccactggaataccaagcttcagaagtcatggagccagaactccctctctgaagtagtaccttttgggggccagcagggactgagagctaactccaccatcttagggaatgtgatgcctcaagcatgagtcagaggcacgtacttttatgatgacttacatagatcgtaagataccttctacccccgcagaacattaagtagacttctcgcagttgaatctgatcccagtatatcattatgatatccacaacttttgataagacttgggggaaggaacagtattgattgagaagagataaatcagctcaacttttttttttttttttttttttctccctgagacagagtctcactctgtttcccaggctggaatgcagtggcccgatctcggctcactacaacctccacctcctgggttcatgcaatcctcctgcctcagcctcccaagtagctgggactacaggcatctgccaccacacccagctaatttttgtatttttagtagagatggggtttcaccatattggccaggctggtctagaactcctgaccttgtgatccatccacctcggcctcccacactgctgggattacaggcgtgaatgaccatgcccagcctcgacttttgtattagttaagtattagctgttgtaacaagtaagcctcatatatagtaatgtacttctcacatacatgaacctaaaatagatgtcaccatcagcctgtggctgtcttcccattggtgactcaggaacctagacttcttccatcytgtggctcggcaaatgtcttccaagactgctgtgcccatcaagatgaatgggcttggaggacgccatggtgggaggtttgatgtgcacctggaagtggtactggtgggtttttgctcacatcctgtttggccagcacttggtgacttggccacagccacatgcagtcggagacgggaaatgtggccggccagcagacctgggaagaagagggaaaacaggtttggtgaagagctggttcaccattgccacacctctgcagtctttgttcttgttctgggagactcatgtatttgctcaacagctgtttactgagtgctaattccaatattgatggaagccaagcggtgccccaggcagacctctgggtgtccttaaggagctaaaggggaagaagaatccaaaaacaagcaaatagttagggtgattgcaaattctgataatggtgtttttctgagaactctcagaggcccatgtggctcatgcacagtgagcaggggcaagagtgatgtgagggaaacctggagaggtaagctgaggcaggtcaaggtcaggccaaggtcagaccaacgtaatgggcatttggattttattcttgtgagttcttatagtttctratctttcctctgaaagtaacgaaggatgcagactttactagacatcttgtgtctttcctccatgtccagatgaatattaaaattttatagatcatacatagcaactaggaaaaggcaaaaagccttctgaggcaaaggaaatacaggtcattgttgatggcyctgtgtaattggtaaaggtacatgccttgctcagtgcagaagggcagggagagaaaatattgcccagtcttgtagccaggattgtagctccttcctacagggaacccaattttagtcagagccatcctaacatattcagcattttagaaccacccttgatgagtcyggcatccctgcaggtaattcagaatcagaccatcctaggtgtgatttttgaaagaaaaatgtcatcaatcccaacatgtacccaccatctgaagcttgaagtccctctacagcatcacccagcataatcattgagctaaaatgcaaatacctccaggaatgaggaattcataccccacaaagccactccattcacctttggccagagatgttagaacattctttctctctttgagttgaaatatgcctccctgttacaccttccctgtggttctgcttctgcaccttaacattcaggttgacttccttaggatatatasaaattctgtcaatatctagggtgcccatataacttactgtgtaagctatggcttttgagagtggaaggagatggtaactgggtgcagtgctaggacatggggcatgaactggggcaatctgagcaaaccaggacatgcagtgaccccatcagtatacctcagaaaatctgacagctggtggttccatgtccaggcaatgaggcccttgcctggcacctctaacctctgacgacctgagggtgctcctcacagcacctgggagagtcaagggttccagtggggcttagcatgctatagtcacctgttcaagaggatcttctttctctcccagggactttgtgaaggcctttatccagtttaagaagcctatcgtggtggccatcaatggkccggccctgggcctgggtgcctccatcctgcccctctgtgacatcgtgtgggccagtgagaaggcctggttccagacgccctaygccaccatccgcytcacgcctgctggctgctcctcctacaccttcccccagatcctgggcgtcgcgctggtaagcctcctgtgatacctggattcgggtcccagcaggatccttcctctgccttgggtttaggggctcttcatggggctagaaacctgagggtgttgtcagcctgcagattggcttggctgcctcatgtccttcacaccttcagtgccagatggagtagcccggcctgagaagatggcgatgatgtcagtgtatggaccatgcactctgcatggcgtctcaattattcctcactccaaccccctgaaggcgtgtcttaggattggctgggtgctgtgacaagcagcccacggtctcagtggctttaacaacaaaacttgccttcatcctcttgagtggtccagcataggtgtaggggccacccacactctctggggacccaggtgtctcccgtccagtaaatgtgccctcacttccagccaatgggagagaagagagagccagaagcatcaccctggagggcttcatgggccaggccggcaggggcgtcttcccctccactcatgtggtattggccatgactcagcttctggtcacatgcgcctgcaagggaggccgggagacgcagcccagcgcatgtccagcaagaagagggaaaggattcagtggacacaaagcagtctccaccccatgtggaaacgattgcgatttccatcttacagatggaacgttaagctcagagaagtcgtgtcaccaggtggggcagacagagccactgtccaacagaggcggcggagtccactgtaagctgtggtcagattctgcaccaacatccagaagcaagtctggacaggggagagcactgatgacagctggcacgtaggaagcacttgctgtgtgctgggctgggctgtcaacgcmgtccacgcccctgtgaggcaggacagctgtgatccccattttgcggatgtggagactgaggctagagaggtttagtgagttgtctaaaggcatgcagtggtagtgccagttgtgggatttgagcacgaactggctggttccactgtctgtgctccgaacccagcctgttattaaataggtcccacatctgaggggttaatctgagattagctgtcaggaccagggaggggttcagaacatgtagctggtccgagtaggcgttggaggcaccacgctgctgggtctgggcttcctttgacggctcctcccctgtggactctcaggcagcctctgctgttcagagcagccacaaactctgaattcagctctgatgggctaatccttatttcataagcacgggtcccatctggatctcagaaggttctcagggagtcccctccttccagccccctctagccagtcagctccctttttcctctccctttcttcaaatactgcaaatccactaagtgccyggctcgccacacccaccaggagtgcaggggtgaacaaaaaccctgctcttcagaccttctattccccagctctctgtcttggaaggaggtcccaccttgttcagagaggacccctttgagcaggtgacatttgaacagacgcaagaattccaggcagaggatgcatgaagggaagaacagggtagggagtgggcctggcaggccctgggttgagagtggtcaggtcagtgtggctggggcctggtgaggatggtggggagagggcgagggatgaggccatggcagtggcgtggagtggcccctgcgagcctggcatgccggggagggtgctgggccttctgtgttgtgcctgcctcagcaaggtctgcccggggtccactgggggcatctgccagcagatgtcataggtcataggagacccacaaaagtgccagagaagcaccccttaggtgacagggccaaactctacaaccccagagaaaaagccgagtgctggctcccggccctgcaaagtgtgctgggagcttggtgctgtcatcatgcctcttggacagcagagaagattgtggctttgtgacgttaagtgacttgcccagagtcacatgccagtgactaaactctgtttatgttcttgttttcttagctctagcatgggttttttgttaattttatgggtcttcaccagggacaccctacctctgcccaagaatctcctttctctctgagtccttaggcttctggataatacccttaagttccctcttcaaaagagarcagtccattgtggccccacggctattgtgaattgttcctttttaggaacagactccaggatgtttcttttgatgtcttgattttatcggaaggtcaacacccacctttgacattactctcatgctcttgaggcagctccgcacattctcaggactgtggctgttgcacctaggcaagcacctgtggaagggcaggtgcttttacactggatttcttcctcgtcttcctttgcagttccatcccccattgtttccatctgagggcctgcaagcccattcttctcatctctcaagtcctgcttttgttgcaatagtgaggctgataagcattgtcccttttccttccttgatattcccccttgttctgttttgaaaataacatcaccaaccatacaaaaatagcaaatttttgctacyccttctgcactaccaggccctgttctaagcacctctcagttaaccttgcctctgtgctgggagcttggtgctgtcatgatgcctcctggacagcagagaagattgaggctttgtgacgttaagtgacttgcccagagtcacacgtcagtgactaaactatgtttatgttcgttttcttagctctagagtgggttgtttgttaattttatgggtctttaccagggacaccctacctccacccaagaatccccctttctctctgaatccttaggcttctggatratacccctaagttctctcttcaaagagggcactgcagggtatggtgtctgaggggtggccaggagcctttccgtatgaatgggggcctcgccttgtaactcacacctgccagggagtagcttccagtggatctgaatccaggttcattggagcagatrtggccatttgccccttctcccagcgaacttctgctgagttcatttgactgaggtgttcttcagaaagtatcaagtcctccatttgtgttcaaatcttgaaccaagcaagcatatgctaagacttattatcgacataaaagattgccctctactctggcgtgaaagattgtcctctgggtcatcacgaaccatcagtgacacaaccagaactcagtgggggaacttacgcatagctctggaggcctgagagtgcctggcatttcagcgtcaacccgagaggagctagcatgtagaggcaggagagaagagcaggtggggaaggcgttgccggccgtgcggaccctatcacatggatttgaccattatgccctaattatcagtcactgtctgtcagttgcagctcattactatcatgttctctgtctgtgcaggactttatctatatagctcctcccagaccttgtatgacagctgaaaatttcaaagcaaaaggaaattctctggggagtgtggtacagagatatcccaggtcaccagaccccagggaagattgctctctgcccttcaagactgggcagtgcccttgcccagccctgagctgcttggagagatgcacgtctctgccttggtattgtggtgttattcacgacctttttggctgccagtgatggaagtgctttaaccagtttaatttttaaaaaaggagcttaatggttctcccagctggaaagcagaagtggcagttcccttggggagacagggctggggaattcaagtaccatcaggtctctctctctttctcttaatctytctctctctctctctcttcccctatttctcctttccttgtagccccacctctccacaggccgggacacagccatggatggtccttgggctcactgatgttagcctgcagtcacagaggaagaaagacttttccaccacacctgcagctggaaaccccacttgagctttattatctagaagggagcatctctttctccctgggctgttgtgggctgtgtgcatttcagtgccaatgatgtcatcacggctgggtcatcggctctgaaatcttcccaacccacaacccatgcccatgggtctgccaccagaaatggggaggggtgtggggcatacagagtcacagtaaatacacagctcctttggggaatttaatgaaagctgtggaccttctgctcatgcacacgaacatttccatacaattcccaaagcttatctgaccccaaaataagataaggatctggaaggcaagatgccttccagaactgggatggttgcaggtggcaagccctggaccagctgagggacatgggtggacctccaggccctcagtctttgcctgcttttgcttttycaggccaatgagatgctgttctgtgggcggaagctcaccgcccaggaggcctgcagcagrgggctggtgtcgcaggtcttctggcccaccacgttcagccaggaggtcatgctgcgggtcaaggagatggcatcctgcagtgccgtggtgagttcctgcgcctcctgcgtgcttgtccttttgatagacccattttacasatgargacagcaaggctcagagggcttcaytgacttgctagaggtcgcacagggaataagcaaaagaccctttgcaatttaacaaatgccttttctcagtattgacagcttcaatcagagggagacagtcagcattattacaaattstccatcatctccaggcagagaaacctcacaggagagatggatactctagggtagcgtcactgctttcaaagaaagtcctaaacaccacaaaaacgcaaaacatctatagctttcaaagaaacgagaagcagcggcsaataaggataaaaagtattgaacccatccggaagatgactagagaaagctgtacacaccatgcctctatttcatttgttttctccaccgactgctcgtcacatttaaatgtcactgtttgaagatgcactgaaaaatacataaacamataacacctctgcagaggcagtggtttttaattaagtgttgattttatctcataacagtcactcagagcgcggcaggggaatatcctgtgggaaggtggagacaaggccactcctgcggccccagggctggttccagagctgagagaggcattttgggagattgaggctctaggactcgctctgtgcttgagaaacagggagctgctgcgtgcatttttggggccagamccttgcccctcccttccttgtctccctgtgcctgtgttcacacccggctgtcatgcttctcatccctgactgttggcacctactgtgtttaagtctttctcctgctgggcctcatccctgactgttggcacctactgtgtttaagtcttgccccctgcaagctgaacagacagtgctcgcggggtgagggtgacggtggggggtggcggtctccaggttgttagtcaacactcacgcgggccacgagcatttctgatctcttcacgtggattctcttttaatcttactaatgactagggtcaccaatttgccccaccttgtctgggactctcctggtgtgaggactgaaaatcctgcatcccaggaaaccctattgttctcacgctgctgataaagacatacccgagactgggtaatttataaagaaaaggaggttgaatagattcactgttccatgtggctggggaggcctcacaatcatggcggaaggccaaaggcatgtcttmcatggcggcagacaagacagaagtgacaaccaagtgaaaggggaaaccccttataaaatcatcagatctcttgagacttcttcactaccaggagaacagtgtgggggaaactgcccccgtcattgaattatctcccacagggtccctcccacaacatgtgggaactatgggagctacaattcaagatgagatttgggttgggacacaggcaaaccatatgccccttagttgtgggcaaacaggggtggttgatcaccctggggttagcttcatggagagacaggtagaaattctaagcagaggaagtggcaagagtgagggcactcaagacaggaaatccacagggagtgtaggcagcagtgtgcagtcaggtggcacggggatgctaggaaacatgtgactgaaaaggagggtgggagactggcctgcaagctgcatggagggggttggcctgttctgtggcagggaagagaggctcaggtgaaaccaagtrttgaaggacacctgrgggtacaggctcttaggacaaggaatactgcaaggaggtctctgctgccaaaagctgtgaattcaggaatgctgggggggtttcccaagaaaggaactactccagcagagtaaggcccatggcctctgggagacggtgctcttcgaggccattccagggggaaagagccagctgggtctggcagctcatcccaccacytgcagcctctagcccaggcaggggagtgagggtgcagcccctcccagtctgctggagccagggagctgccatcttgcttctttctgtttgagggcatttcaggagaggctggtggaggccagcgaagaatgcacgaaggcctcacttctggcygtaacgtctgccagagggcggcagcagcagcgtggctgttggaatcagccagaccaggttttcctgctccytctacccatgagtggtcaggcagccctgggccactttacatcatggagctttgggttctgcatctgtaacatggggatcaaaagactacttacttgcagggttatcatgagaagtaaatgaaagaattcaggaaaagtatttctcttagatcctgttggataatggtgatcatagtggcattattatagttattacaaatrttactacaatcattactcattactattattagtattactattactgttatgaatttttactcactactatgattattactattgttactgtgattattgctcattactaagactattactatgattattgttcattaatatgattaytgttactatgattattactattgttactatgattattgctcattgctgtgattattattgctattgttactatgattattgctctttgttgtgactattattactatgattattgctcattactatgatgatggtagtaatcatcatagtaacactgtgggattaatactatatttacataatatgtatatattatatataatacatatacataattatatattatacatatacataatataatatgtatatattatagtgtatatacatatatacatgtgtttacctatatacatatgtgtttatacgtatatataatgtatataatacataatatgtgtatatacgtaatactttagtaatgaataatcatagatcatttatgatcatttatcatagctgtggacagcagctactacatttataaccatgattactatgatcattattactcattactacaattattactatggctgtgatgattgttattcattcctatgatttttactctttactataatgattatgaaggtgatagccttgagtgttattagttgttactaccatgattactaacattgtagcctgaacacggggcattgctctcagggtgagttgtatgtgacaaccattcgttcatttcatcgtcttattctgtgttctcagtgatccttgagttattgccaacagatcatgaaaatgaatcacgggaggttaaaacagtgtctcccacactttttcatgacacctatagaaaaggactctgtgtttgtatcaccattgggcaacaggcaagcctctagtggtctggggtgacatgggccccactgagccatcccagggcctcacagtgttcacgtcttgacacatctgggatccattcatggccgtgctggaaacatgggactgggaaggcccaggctggaggaggcagccttctctggctgtgagtatgggaggttggccagtgccccatgggccaggtacctagttctggagcagagtccctggtgcccggctaatcaggcctgtctatttccctctaggtgttagaggagtccaaatgcctcgtgcggagcttcctgaaatcagtgctggaagacgtgaacgagaaggaatgcctcatgctcaagcagctctggagctcctccaaaggccttgactcccttttcagctacctgcaggacaaaatttatgaagtctgaggggccccagctcacgggcccccaacttccagctctgccctgtgtttcggaaaccagagcacagtgtctgccccggccaaggagtttgtcaaggtgtctctttatacgtagggttgtgtccatttcctcgtgtcctttggttgctcctccttggtttgattttgtgtaatggatggaaaacgcagcatacttggcctcccccacctccctgcccttcctggccagagagctgtccaaggctgtatcttcccagggctccgccaagcaccgctgtcctttccccacttgctgaaatgcaccatgacrgtccaggaaggggaagaccactttcacattcttctgactcaggctgtgtctacacagtgcctctgacttggagacttggccatcatggctctctctggttgtatttagatckggtgtcagaggacgaccaatcttagggaatttccagaccaatgagcaaaatgattgtgcacacctggcctcagtctcctttccgacgcaaatctgtgtgactattagggcttggtcttaaaacccaattgagtgatttgcaaacccagatattstacatttagaaatgttttgttaaatatatatttttaaaacaatgtaagtggaaattctgataatttatgtgtattatatgtaaagctagttttgcaaaaacaaactactagggaaatgttttttctttccttggacttgttttatttatttatttttgtttatatattgtgatgtctgttgttcacacagatactattttcatactaccctggaccaaatcccacacaaggttcatgccgtttggtgcattctagcaatgaaccatgtagaaataaagtttagagagatgaaaacagaaggatttctgtggacaaaaggaatagcgctgcacctctgtgtaaaacggttctcagctgtaataatagaatactagttccttaggtttgtccttaggagacatcttgggagagttttttcttccctctgctgtctttaaggagttaaagggccctcttagcctgaatgatcctgaaacagacccagtcccaaattgcgtgatgttgggcaggagtggggataggccctacctgagaatagcatactgtctagaataagacttctttctttggggcaaatgactgaacttggatcctgcagtctgttgcttccatgtgatcagtgatttctggtattggccagggggatggggaagagttcccactctgctgagctgtctggaggtctgaatcttttccctccagaagctgaaatgactcatctgttttctagtttttttatgtacatagggagcaatgaccaggaatgagatctccttgcccctgtgcccctgggctgcaaggggactccagcagctgtgttagaccatcagattcaagtccctggattaactacagagaaggagggattgggggttgtggttttgagtggtgaggagaaagttcaggaaaacctgaagttgagagcagacaaatggaagggatgtgttctgcgtgaggtttaaaccatgggtcaagcacccagaaaaagctagattctcagattctcaggatggagggatttttttccgtttctatcacagcccctgcgtattcctggaggcccttggccctccccttcttcccctttcctgttgggcaccagcctttcttggcccttctttgaagagagtggaataaggcagcaagaagtgggcacagcttatggaggtgaggcaggcttagaagagagagttctggtgacagttctctaactctctgtggtcctttatcttttcctggcaatcaggtgcactgggcagggcaggtggaatgtattcgtggccctgagctttgagtttcaaagaacacgttgatagtctacaccagatctagagacatggtcctttaagcagtgaccctcaagttaatctggactgctggtccttctgatgaccttggttccctccctggaaagcgtgtctcctttaagagttcatgagggtcaggaaggaggggaaacctctccttcagccagaggaggatggaattaaagtcctgtgcaccctcccctttgtccatgtaggatcctgtaaggacttcggacctgtcctacagggagttactatagggagacacctgcttttgcccaaatgcctgttgtcacagctctatctggatcttatctcctcctttgagaaagcaaatgtgagctttccaaaacccttagatgaccctggttcttacatattgtggcagacagtgtcttcactactgctaaattttcattagaaagagccccctcttttctgttgaacttctgattgggcgcagttatattcagcatcggttgaagtggggtcaggattctccttggacatggaaggggatgtttagaaattcctttagatcagtgtccaccttcattccctgcttgaaagaactagaaatgcttcagctttggatgtactatcaaatccaaacttctaaacatttcaaggatctctgaagattaaggtaggaatgtgaaaccatttctaaggtggaaatcttgctgttaagtcacaggtcctgggtgtaacgggggtggtgaaagtctgtattttggttgtttccatacagtcagttccaccaattgggtgaaagcaggtgaaatctttttgctgcagggtggactgaatttttcactttctgggtagttgttttgatcatgtgtaggcgaattccaggtaacttacagcaaatagatttgggatggaaaataccagacctctggttgtgtcagggtttatcctaatagctttcctgagacagagctcagactttcatttttgatcttccaccccagggccccctctctgtctatgggatcctttctcccctctctctaccattttcccgtaccttcccccataagtcactcccaagagcctgggcaggtctttgaggaattgcggctcattttggcagccccgtcctgcaattacctttgggtttgaaagaatagctgtgggtgggcaattgaggacacctctttagtcagggacctttctagcaatccactccctcccatcctgttagccatgcagtggaactctccttccctctctgccccaaccccggtgatggctcactctcagcatcttatgggaccatctgagttaacaaccctgttccaagaagactttgtgcagaacttttgttagggtggtcataccttctcaccaccatttggaagacacagcctaatgctgatgtacttaatgtgccccttccrgcatagaaataatgtctgggtaacagccatcaaaatcactaagaatgacattggatagctatgagaaagtagtagagaattgatttaaaatatcattcttgtttggtatagattaaactaggaaatgttctctctgaagcatgaaaatgtttttcccatgtgaagtttagtacaaggatggaaaaataataatcacagtagactttgaacaatgcaactgtatctctgaatatccacatttaaaaatagccttcactgaatgctgaattgcatttcccattaatttttggttttaaaaattttgtaaactttttttttatttggaatttagtcacatccattaaattttccaatctagtttctgtggaaattttttaacagagagaaacaaatagaaacatcttcaaatcttcctaagtgaatatttaaaatgcagaattgcttatcttctgtttttctgtattcagacacttatatctgttgtatatattagtttagacactctcactaatatacacagtatttaagactctaaatgagatttcttaagtattttattttattctctgtaaatggttttgtataatctttaaacatctacactttgcctttgtagatatttaagggaaaccatttggggttgtcttgcatgtatatttttgttgtagataagtgttgcttagttatttctgcaaattttggttgaaatgcttacagactttaatacagtatatattttcaaaatataaacttttatatttctgtgataagttaggatatgcrttttaggcaatatttttcattaatatcacttgttctttygaaaaatagcatactggtttggtgccaattttttcattagaatataatgctcttatattgttggagagcaggttaatcttttttcgaagtaattgcgtttgaagtataatttcaaaatrtattgaatttgtgaataagccttaccattaggatcagtaaatttttcaactttgyaactacataagtagtttaagatctccccgtaaattctcactgtgtggcagttgatggagtttgtgaacagagccttaagcttgttgcaaaaaaatttaaaaagggtaatacgggttgtttcctccatgcaacgtaagccatgctgatggactgaatgcagtctgtaattcatggctaatccgaagagtttgattgagttgatggcggcagggaccagatagacaccttggtgattgtstttggccataagaatagaccaaggataggttttcyagagacaccttcatactgtaaacatggtttagacacggtcatagggaaggctgctggtccatcatttgttctgaacaaatggcatttcctgctcctgaccctggcagttggccccagattccttgtcgatgacttggaaacgtccattctgggtaaggtcagcactccctgagagatgttaacaaagtttacctatragtcttactgtgtagacaatctgaagtcaattttagttacacaatcagcattcccatgtgtcctcagtgtcttatcaatgaactatgtgtatcaagccatactaaactggagtttagcaggacaaaggcaaactaaatgtagaacataacatatcagctgaatatgtctatccaggactgtttttctagaacataaatcatggagctccttgacagtgtatccactgtttttggggtttaataaaaccaactagaatttagacttaaaaagaaattattattccttttggttgtccacataaagtagtccagggctatcatatggctaaaatcaagttatttggttcatctctggtatgtatttataaagtcaacttatcagccattaagatggagatttgctttaaatttttgcagtgtgtgtggcagtcagaaaaacccatatctagttttcaacttcacctctggtgtttttatggcttaaccttatatcattgatccaacatctagcctgatgctggagctcttatttctagcctgatgctggagctcttatatctagcctgatgctggagctcttgaagctgactcttggaagtttggagggtgtagagtttcccatctagtatttaatttgtccctgtgccattagtcccagcttgaagtcatttgccagtgtcgatgttgacaggattgtgacaatattgcctttcataaaaccgagaaccaaagaattccattattctaacaaagcctgagtttcatagattgtgggcacatctagacagatatgtgcatgcttgatggtgcagagaaactgctgacttccaccaacctcatgctccccctggctggccatacagagggattcgttgtcatattgaaaaggctctgaaagatgagtttctaattgaagctcactatctcaggttggtgtttctactgtgtagtcccaagcctgtatccatatcataaaagtggaggcctggtactcctccaggttatctggccagtgtagactcctccatctgaatatgaacctccagggtaagaatttttcagacatgtctatactgaacagtaggatcctgcactttccaaatgtctgcctccttttgttcttcattgacccattctaattcctgttaggtgtgagaagaattgtcttcagttctctctccattctcattcatgatggaatcattgatccattgaccagttgagaaatgattgatgctgaagargtggtattctattggtaaggcttattaccaaacttccgataatgaagcaggctaccaaaaacttatccagcccaccctaggagtgtttggatttgatcatggatgtagcatacaccaaaatccaccgagacctttgcaaaattaggctacttgttttattttgccagattatcatgggagagtctttaactagttctgaatatttgtaagtctgagtacttcatagaattataaagaaggtacagctgaccccttctcaccatgttgtaaatatttactgagactgggtgcagtactgagggataataatcttctgatttatcaaatcctgactgtctagagcaaattgtacactctctttgtgaatggtcctgtaacgtgtatgaacacatttctgggtgccttagaagttgtatttttcatgtgtgctaatatgcagtatttatacattgtgagaagctgctttgaataaaaaggttgaaacttcgtctgcatttgcttgtgttccccgttttgcaggctgcacataaagttcatgagtagattctgtggtttctgagcagagaagtttttgggggccttctagcggttgagacatctgatatttctaggt

SEQ ID NO: 93609 - DNA, 183873 bp, Homo sapiens
catgggtcactgatttgaaattcttcccttcttttttccgatggtaatttcagtgtgtgtctctctctccttccccaaatccagaccagtattaattacgccaaatgaaatgactacaaatcaaacatacagaaatataatttgtcaaggtactatctgcaacacagatctgctttcaccttatctcataaatgagtctatacattccaggagaatgctccaaatgaacttaaaaaataagtttagtggacaaagaactgcaggcaagtttctatccatttacagggacccaaggctaagacaaggttctgtcctcaaggaccatatgaaagacagaacatgttgtgcaaacagtacatttattttgcaatgaaattgggaagccaagtgctgtcgtgtcatagttgtagatagtttctccaaaataggaacaagcacatgtggtggtttcatttcactttatttcaygaaaaataattataactgggcagaatgacgtctcactatttttttccctttctgaattttttgttgttctggaaaagcatgtggtttttatgggacagagaatggagagaaaaaaagattttctaaaagaaaaactgatttattttaaaaatatatttaatgtactagaaactgaaaaaggaaatattttatatctttctctggccatggaaataaacttttcctttgtttcacttagttgaaatagtatattctcctcaagtcatccaattcaaacattttatatacaaggaccccagtggtcattgttagcattcttcagtgccacctttctgctctaagaccttggtttcctaattcttcacgcactgaaccataagtctccttactttgagactttgccatcactcacattttctcaaggctttaagaactatgaagaatactattcagtcttaaaaaagaaggaaattctgtcatttgtgatgatgtggatggaactggagaacaatgctaagtgaaataagtcaggcatggaagataccacatgttctcccttatatatagaatctaaaacaactgaactcagaagcagagaacagaatcatcattctaccctgcggaggctggggatggggagataatggtcaaaggatacaaaatctcagatgagaggaatttctgtttctagttctatcatcacacagcatggtgaatatagtttatgatagaatactgtacatttacaactggatgagaaagtaattttcaaatgttcttaccacaaaagatattaagtatttgaggtgatggatatgttaactacctggatttaagtattctgcattatattcagaaatcataacaccactttttaccctacaaatttatacaattataaattgccaattaacaagtagtagtagtagcagtagattagttggtcaactttttgatcctataaagggtgaagaaacattttaagactctccagctaccaaacccaacgctgttcctcccaaccatactttcttctccagtggtattattcaaataagggctgggagttgaaaagtgacaaccatatgaagagccacataatctaaaatatctcttcctgccatcctttcttgggtcttctttataagaatcccacagacactgttatttcctcattcccaacattaattacccttttaagagaggggaaaaatggacttaaatttcttaaatgcctactgtgccagacacattagttacatcatttaacctaagaggaacaacaaagttgcagatgaagaatgagaggcacagaataggtgacttcttggccacggtcacatagtaaagcacatgcgcatgcacgtgctctacaataaattcctctcttattcaaacccttgcccagtgacctcaggaaaacctccccctgttatttctttcagtccctttgttaatgaaatcaaaacaaaaccaaagtaaaaataccttaagggcagtagtcgtgatatttttcaaaccaaaagaaagctacacacactgaaggaaaactatacctaagaacttccatacacctttctgaccttgcaagttgattttagaatatttctgaaactatcattatatctcctctttcaaataaatctgtttgtcctcaggctctaacattcataataaataaaacacttttctaatttaatgttactttgattaccagcattgcaacagtactttttccaacatgttattcttccctagggtgaggtctttgcagtgcaggctagcagcccaaagcaccatttacaaccctgtttctatgaagaaaaatgctctgaaagttccaaagagccaatgcacacaaatacttgcaggacacaatgtttttaagttggggacagttaatatttatgaaatgtgttcaaaacaaaaccatatctttcaacaggagcctgcaggaacagagggctcctgccctcactgcccctggcacccacgccccctcaaaaaaatgtgattggaattctataaaaataatctgccactcaggcagttccaaagtaaattgaggaagagcaaaaacatggaatcagaaatataacagtagactccaatttgcatacaaataacaccgatagtttcctttaaaactctggttaatttccaccttaatatatctcatgtaaaattgagagtgcccattgaagtattgaaacttcaagattaatattcacaatgaatcattttttacgtattacatttggattttttaaaaaataagagcaaagacctattgtgacctagaaaatctcccattaaaagattttatcagaaatctaacttgttggagaatttcagtcattatttactgtacatgtagattaaattcatttctttcactagattaagttttatttaaagtaagagaacaaaaatcctcaaaaggattcttccacaaacttctaactagtactgcctagaaacttcctaagaaatgtttttgcacttcaatttttgagaacttataattttataaaaatataaatttatcagttttataaaaatattgccaatttttcctctgtaagtctgctcataattattactatatttcattttaggcatgttaatgtaaaaattaaatctaccttttggtaatttcttttgaaagtagaaaaatctaagcaacaacatttatttggggatttctttgtagtgttttgtggtatcactgatgatcaggtttttaaaaaattacttgattcaaagatataatcttgaaacacaaaaatttacaaattatcaaagaaatacacaaaaacattaagtattgaaaaaggaaaatgtaagaattaagtttgcaagcaaacctgcaaaaattacaagagagttatacttcaaaaggactggctggccaaataaaaaaacatagcaagtatttttttaaaaatcccacaaaattactaaggttcttaggtttacattagaccatccataatgagaaacagcaatttcagcactatcattgcattcataaagatggtgacattaccttcaggtagatgtggctagggagtcttgacttaggggacaaagtcaaggtttcattacttaaaagacaagaaccaatcacctttatttttatctcagggtacaaagtacttttttcaatggtagaatgtcaagtgctttgtagtactgaaatcagaggaaagtgtccgattttgcttctacaaaatgcacaattttacttgttgactattttctactcctcccttaccatgagcacacagggcttcatgtgattattttaaagaggatgcataattcgattgctatgcctcttcagataccttctttgtgaatttttcaaatttgctctggcccaaatattggtgttcctatatagttcttatcccacctaatgtacacagacaccctttaatatgtacctataatcaaccacccatgttaacttcttgtttaacatattatcaaagccaggctgcaagtataaccctgtcatttaagaaatacggaaaataagaaaaaaatcttaaaataagcttcatgatgaacttaaaaagaatagttactttaaaagatgtagaaacaacatagataaatttaaagtttttaggggaaaaaatccttaaacccacgtactaaatttttaatatttccactacagaagttaaatgcccaaactgatttggtatcaaaattaaagtgtcagaaatagaattaagttataacttttatttatcaccattttaacatatacttaaaagtggaatttattgttttgctggaatacttaataacattaatttgaaataaagcttctaaatatttccggggctataattccattcttacaacataatttttaaaataataaatcattccaaaaaaggatgatcataaagagattagcgtttggggtagttaacccagttcctatttatctatccattcaagaggtaactcagttttaaggatgttgttagaaacattatttcacagtgattcaaacctttcagcctatgcacaacctacaaatgcataatcgtttgaaataaaaattgcctttccatcattaaagaaaaatcatctttgttttctttttcagtccttctgaacttattaccctgcttggatatgctgcactcttctggacatagaatttcatagcaggtatcaaaataaccaagccataaagccagctttatcaaacaataatttcctattaacaagaactttgagtgtattactcattttacacaaaacaagyagacgacaaataatgatggttaaaattaataattaaatgattaaatgaaaactagtwaggatttctgattacttttctactttctcatacagcttaacacctggaaacaactgtactggagccaccttcccgaaaggtgccagctgtttcctttgtcttaagcacaaacagaactaatgtcacatttccagagaagggtaaggatgaaataaggcgactacaaaccagctttcagaaatgcgaagtcagtcaacgttttcctctctgataaccccttatttgtggagcaacaggrgaattacaacacattttggaaaataatttctattggaccaactcctcacttcgctggaagtagtcggatccaagayttaatttcaacacagtgttcgacttattgcttgaagcyaccgcagcataaaactcgtcttcgaatggaaaatttgaccaacttctatgaggtaaatgaatagtgaaagtacgggtgggcgggagagacatacaagttttttcggttttttgttttttgggggaagaaagggcgcatacgaaaaaagtcctaagcaagcacagaactgtgtctcttaggatgtaaaaggatgttataccagagagctcaaaagctcccagggtcacggctcccctaaccgagggacttggggtttcactgctaccaggcacccggggaaccccggccttggataaaaagagggtaactggagtaaagccgtgcttctgaacgacccagcgcccaggaccccctgccagaccccgcctttcccgggaccccctcgggagcgcccccgaccgccccgcacgggtcggaggaggaggcagagaggtcccgcgcggacccaggcgcctcccgggccagtcgaggatcaaccaccccggggacccctgccgaggccagcgcaggataaactccccgaccccgaactctgcctgccgcttctcggcgctgggcctcagccacgggttcgaccgtcctcctcaccgcggctcccgcctacctcgcgcctcccggccccgcgacctccccgccgccggccgggccccgccgaggctgcgcttcccgtaaactccccgccccgcgcatccccctcctcgcctcggccccgcccccgcgggaccctgggcggcgcgtgattggcccggccgcgccgtcactctccggccgcgtcgcctccctcgctttccaccgccccaagaccggcagtgagattagtgctcgcggggccgcggcggagtgtaccgtgctgctctactcgctgccattcgcccgcaggtcggcgcgctcgcccacctgagccgckccggggctgcgggaccgtgggacagcgcgctcagcccagcctaggaaagaggcagcagtctcagcgcggagatggggagcgggcgaagttgacgagtctcccgcccacgctgcgcccctcctgcccagaggtgcgctgcccctccccgaggtgctcgcgcgctgccctgmccccytcctgcgcgggacacccctcccctacccacgggacctgataacttcaccccaagtccagagagtgggctgcgagggcggtgcccggactggacaggactctgcttaaggggagcggtcctggaggctcgccaggagtcggagggcggagacccgctggaaactttatcatcgccgtaattactacgttttactgtttctctcccsgcaggggctgcagccagcggtctgtcgcgcgtgcctgtgtgcccgaggagccgccccggggagaagacccggcgcggagttgttcccccagggaggatccgcagcccagccgagggggtcgggcggcctggctacgcaggacccagccccgcagccgcggactcccagcggcggcgaagtttggctgctgagcggcgcggcgccggaccactggacagcgggagcgatgcccgtggggggcctgttgccgctcttcagcagccccgcgggcggcgtcctgggcggggggctcggcggcggcggtggcaggaaggggtcgggccccgccgccctccgcctgacggagaagttcgtgctgctgctggtattcagcgccttcatcacgctctgcttcggggcgatcttcttcctgccagactcctccaagctgctcagcggggtcctgttccactccagccccgccttgcagccggccgccgaccacaagcccgggcccggggcgcgcgccgaggacgcggccgaggggcgagcccggcgccgcgaggagggggcacccggggacccggaggccgccctggargacaacttggccaggatccgcgaaaaccacgagcgggctctcagggaagccaaggagaccctgcagaagctgcccgaggagatccaaagagacatcctactggagaagaagaaggtggcccaggaccagctgcgtgacaaggcgccgttcagaggcctgcccccggtggacttcgtgcccccaatcggggtggagagccgggagcccgccgacgccgccatccgcgagaaaagggcaaagatcaaagaggtgagtgggccgcgccagaaatccctcccgaccggccgtgtttttcagggagaaacggcaagcctttgaaactctgaagactgcaacaatgcaatgtatggggagatggaggtttgccccttccaccaggtgctgtgtcaaaagctctttcttttcctgtttccaatatagtagtagatgtgtccagtaagatctaaggtcaaatctcgttgcttttaatttgcatgctcttgctctggtgaccacaagccacacgaggtgggtataaatacatgggcaggtaatacgcaaacctcattctctggccgctacacggttaatcgccccaccagtaacagcgacggcactgatcagccccctggtaaggattggggacgtggctttaaagtgagtcttcacgcgtggtaaagctagccagcataccccgggttcagctgtgtggcccttgtctgccaggtggcattctgtgtgtactttcagactataaaggtgaaacctgagaacttcccatcatcgagggatactattgtttacttttttaaaaaatgaaaatataaaaagccagtcggctgcctcttgtatttctaatgcacagccagaaatagggtattccatgtgatgcaacaggtttgcctccacagcagcacaatggtgacaaagttaatccaggataaacatggactttgatacatctttcctaatttccttctcgtaattttcagttagaacttgaaacatgtgattaggtcaggaccagcttaaagctgaagggggccgtaaaaagtcctttcaggctgtcattttcaagatgaagatcgaagggcccagagctctagaacccgttagtgatgagtcaggacttgaagcccgaggtccgaacttcccccagtcacctgtcaccacgcggtctgtggacatgcctcctctctgagctacttccctgtgtgaaacggtgccagcctgcgttttacatagaaaagctgtaggaaccacattaaaagcatgtcattccaaatcttggttcaattttctaaaatatgaatggaagtaatatttttgccatttaaaaaataatacgatctgtgaaaataaatattgtattttcatattgggtaggtaatcaggagaggaagtccctgatcccattttcagagagtaaacagatttttgaggtggttgagaggtgtttagcttaagtggctgcagaatgaaggcagcaggattgtcatgggatttgtgactttgtattataagatcagctgaatttggttaagctgtaattgagcaagttaaagtggacttggatccctttcggtttaggaagaatgycttcatccttcctatgcagatagcttccttccacagtccatcagcatatctgcttttctgagacccctcctcagggacagaaccctcccatacttgggggaatggattctactttccagaacaactgtctagcagtttcctttctccatgaaatcctgcctgtgctaccaaatcaggaaggtggaacaaagctstacctcttaccaaatcctcccagactccttaataatatccaaccaaaaccataggaaattaacccaaatgatctgtatctgcctgtgtttctgttaaatttgaacggtgtaattcatacatttcatgcctccaaagtcatacgagctgccagttagctagtacaaaaatcacagttgtccgaggaaaagattttaatacgaaagatacatagatgttaagctgttggtactgaccaagagtgattacaagtgcattcagagcagaaccagtggggcagtagcagtctcagactcaggacaacatattaacagtgtgcatatccatccagtagatccatgttgtctgtatgcctaaatcacaaggtcttaattaaccgtgtaaacgagatttacgtagtctctgtctaacatcttagcacctagatgttttgaaacygcycagtcttgcataaagcrgtggaactaaatgtgttctttaaaattccttgttgctgtgagaacccaaaagagccagcataattagctttagtgtttagtcaaaggctaatgggaagaaatggattatgattttccatcagattagttcaggcagatatattcctttgtaaaccaaaagaaaaaaaaaagaaattatgatgctgttctaaaaactgtgctgtaaatatttggctttagagaggcaagagtggttgcccattgtaaatagggcactggactttaactttacrtatttggattcagtttcaggcaccactgtggacattttgttatcaaccagtagatctttgccttagtttttttctttaccattgtgttttcttttctttctttttggagacagagtctggctctgttgcccaggctggagtgcagtggggtgatctcagctcactccaacctctgcctcctgggttcaagcaattctcctgcctcagcctcccaagtagctgggattacaggcacgtgccaccacacccagctaatttttgtatttttagtagagacggggtttcaccatgttggccaggctggtcacgaacttgacctcaagtgatcgacctgcctggcctctcaaagtgctgggattacaggtatgagccaccatgcctgacctgttcctgtattttctaattctctttatacttaggttctctatcacacctgaatgcaccaacacttatagttaaaatttagaaagtgcactcaagtctaacatgttggaagactggattgtaatttgagtcaacctgttattttgtacttggttcaaagtcagtcaatactattttttatatctatggcacatttatgttactagtactgcagtagatttttaacaacttcgtgtcttaggggagatactctgttaatttcaaataggtcattgtacagaatgcttcacaaaaaatgttaaatgctttccactactgatttgatggatgatgaatctttgatgtaaaacttcaaaatagaattaagatcttcctcccttcacctctgttaaaattttgtaaattaaccctgggatttctctgagatttatgatacatacatagtgtatatttattttcatgagtttgatcttaaaattgtactcaggttgtccttagctttaaaaagcagtgttagaataatgaagcacaaaagttaaaatagcagcatggaagttttagaaaaatagtccatttacttttttttttaatcagaaatcatttttagcttcccttctcccccgctccgcccccccctcaacctctcccattttctcaattagcctgtgctgtcctttaggattagaaccttaatccaatttggaggatgactttttttttcgtttttctgaaattaaggggagacctgagtaataggggctggggctaaagacagtcaggttgtcagaggggactcctttcttctcaggctggaatcctcaccaacctaagtgggggttaggggtatgtgcagactggcagccttagatttgtcatgtaaggctttaggaccctgcacctgtggggtcacagttttcttctctcagttctaaaacaagactttagtattttattccagacctatttgtgtaatcatgaatttaaagaacrttttcatattgatggctagtagttaaaattcacatttattatactttatgctagccttaggcatatagcctataatttatattaactattgacagtttatamccttttggtaaagatcagatgtgagaataatctgccttggcaggttaaaacaaaacacttttattttgacacttaactttccagtttatttttatgggtagttctggggtggaaaataatatttacaaaataataaaagccatgatttggagacctgacccaagaagcttcaacatccttaggttgcttgcctgtgccactgtgccgtgacacattccctactgaacataggctagtgtgggattgctccacccagaggcccttccccagagcagggaggacatggagtgtttgtgaaggtttttctctccttaacaagtaggttagttttcaacagtttaagtactggagtaggtgcygactgttaatatacaaaagcaaaaaaatacatatatacagtaatgggtagttaattatgttcagcttcattttctgtaagctgttgatagtttctcctagaatattctgtcttcctcttatcaaggcaactgggattcatataaaggagcttcttatgtatatgggacttagaaactagttaaaagtgtgaaaagaggttttaaaaaatattttcaaacaaatgcatctatctgtacttcttaggtgagctaatgaactaaaccatcttgaaaaatttatcttagtattacacaaaatgcatttgtatgagatctgaattggttggaattcattgaagaacttacatatttgaatcagattatttcataagctgtggtggtacaaatttttcattgaagagaattttaagcatgtgtccgaaggtcagaggggaggaatgcctgcagatccgtgtgagggatgagggctraatacacagggtagatcagaattgcactggaacctggttatacctcctaacccagtcaagcacctgtggtcttttaaatttctttctttataatcttgtgtatgttggtcaaagaagggtttgattagtcaaaataggaacagccactgtgggctccagagatactgtgaaacgagtggcaaaacaacctccccgccaagtagacgaaaataataaacaagatacctgtttggtagtttagggaagagattccctctttgaggaaataagtcttgacttttccctcagtattcttagcctagttccttgcttggtgttcagtgattgaactatatcttatccccacccccaacctctcaatctgttaaaaggccctttacacaaactctgcaaattatgccatgataactttaaatctcagattttaaaactaagtgtatgctccgagtcgtaaggtattgcatctgaatgagatctgagaggtagctcattcattttacagtagaggcaaccaagacacaaagatcattctggaaatcacatcaccagctagtggcagagttgagttgcagagggaagccccagtcttctgtgagtgttgcgcattgtctcccacatggtttgtctcctaaataaaaccccaaagaattgtataaattatccgtgcttactatttgcagaccctaatagagagtacagaaaacatacaattctgcattattataaatttgaccttatactaagttggtggtttttctttttttttttttcagccaacgatggatcaaagtagtttttaagtcaattatagtaatttttaaaaatcttaccagtggcatggtttagaaatcttcttctttgtaaagacacccggggaaagcttgataggacatcttgttttctttataaagatctctccaagaagcacaggcatttgtaatcattcagttaaacattctttatgaggaaaagtggggaagaagaaggaagggagagaagaagagagtgagttactgtatatacaaagggtgaaaggggatcacccagagaagggacatgtgatgactagaagggctgctttaaaattataaatgtgtgtgctcttctgatattgcaccatggataatagaagaatgacagctaacctaaaggatgattgttttaaaagtagacatgtaaaaatcacaccaatctatgggcaattctctccacccaagtaggttctggcgattctcttttgggatgcacttacctgtctctgatccatccatttgaagcaatgtagtggttagaagggtggatctggactcagataacgtgggtctgaatctggcctctaccattctcttgctttgtgaccgtctgcaaattacttaatctctcagaactttagtttcctcatttgtaaaatgaggttaatagtacccactttgttggatcctgaggcttaaatgtgatagtaaagcacttagaatggtatcagacatgaagtgggcacacaacaaatgctgcttgtgattattgctgttactggtcaccacctaaagccatcaagccaagattgcattgatccatatgctgtttaataactcaggaaagtggataatgaagtttcaaaagggtatcaaaaatagttaaaattgagttttagtgcttaaagggatacatttccagttcatcaaaaagaycttccatacctataattttattttgctacggtcaactctgattttctttgatttttaccaaattccaaaaaaacttaagtatctttagaatgatatacttactgcatatacatctycagcttcttcagaatatatgttaaagaattaatttgtctctttctcatagtcaaatatgcctattcccgcagataccatctttcagagtagtcacagtcgagttatcttaatttctcttttttctaataaataatttttttatttacacaatgcagatcgggtctcactatatttcccgggctggtttcaaagtcctgagctgaagcagtcctcccacctcggcaccccaaagtgttgggattacaggtgtgagccaccatgccttggctgagttatctatcttaagtattgaagttattcttctaaatagagagagagatcgagtaaagtgaatttcaatctgtttcatcttggaggaatgtttttaagaagtgagaattattattttaggcttggcaaaaattatataattatgataaattctataatcagagctcagtccatcacttagtagtcaaagttagcataaatcagttttattttgtagctcagagagtttggtctttttgagascttcacattgaatttagatttattaggattccagacccactactcattttacacatgagaaataaggcctgtgagctgtgacttcctgagattcccccagtgtacaaacaatagctgagaattgcttcttaggtgttgagaagtactgagaaccaggccccactccacctgggataatcttgactctaatgagaacgtgtgctttggtgactggctgaccaggccctccctcctcctcagccctaaatggcaggccaactgccagaagccccactgagaccatcctagagggaggtgggacgtctttgctgggtaggggattgcctaagaaagcaatactggctaattcctttgctccggagaatgtggcagcagtgccccgcccccactgagttttgataaagacttctgtgatcattaggtacttgaaaaaaaaccaaatgagattaaggcttaagagcatttaaaagtcacagccctcatttctgtcatgaatactctggtagttgctttaggtactttagagctgagcagtcctgcagataatccagaacagagataataaaattgaaaagtacacgtatccttcctgtttacttgacttttgtgactagaatgactccttctcgctcgtgtttctcagtctgctcatctccctggctcttaagtttatcaaaagcccagttcctgatttgctctgctgctttctcatcactcttgctctacatcgttcattcaagtgacactcagaacatattatattaacttttcatttgcattgttcatgtttttatgtgggtcactaattagatcgtcctgtcttgtgtgggagtgtttagtattagcaacttagtatgagagagggcatggagatgaggggataaaaacctgatgaaggacaccaagttctgaaagggtggtttaataacacagcattgctaccctctgaaacaacctttgttgctggtgcctgtttgtctgtgctaggagtttatgagaaagggggtggcagtaattggtgtccgaaggcctgtgaatgactatggccaagacgtgaactcaagccatccatagactacaagctattgctagtgtctccatttctgccaaatccttcctcattaaatggtcttctcaaggtcccttcagaacactcaattcttctaagtgacaggatgatctcagaaataggacaggaggccagggatcctagcctacactgggggtggcatgtccagcttcctgagctgatgtttaggtcatgattgtctgtccctagttcctctttcacgggaatacatgctggagctatgtactaaaaggggagtgtgtttcctcactgtatctctctctgtcggggcataagacaagagaacagacctgtggaatgattagggaagctcaggggtatctacccagtctcaaaatctcattcccagctgccagaaattcaccaccagtgtttcctttttactgtttttgttttgtttttgtttttgagatggagtcttgctctgttgccaaggctggagtgcagtggtgcaatcttgtcttgctgcaacctccgcctcctaggttcaggcgattctcctgcctcagcctcctgagtagctgggattacagacacctgccaccatgcttggctaatttttgtatttttggtagaggcaaggtttccccacattggccaggctagtctcaaattcctgatctcaagtgatccacccaccttggcctcccaaagtgctgggattataggcatgagccaccatgcgtgtccatttattgattcttaaaggcttgctttagaaatagatggataaagttgctcagcagaattattaatattatactttgagatttgtcttatcaaaggayagaataggtttgttgaagcaagtatcttccattgtcttatttcgctttataaactcatgtctgcttgggaaagaaaaatttgaaagcacactagagtagaaaaaaaaaaacaaatccttcatagttttatcagtcactaagtagtgtcaatgatgctcctccctaaccccaatatgtaagttcgttcccaccccccgacgccgggttataaccacactatatatactttttgtttttcattttctttgcaagtgtcattttatgttggcacagtatatccatgtcaaaacatgatactttatttaaccagtcccttggacctgaacatttagattatttccacttttttgtttttattaaaaatgctgagacagacagctttgtccagtaaatttgtgtctcactttttattgcacacaccctggtaagtgggattttctcttaaattcttaagaggggaaataaattggccaacagatagtacattttgagggataactttccagaaaccatttatactcccatgtgtcatataatgaatggagtctgttgattctttgtgaatttcataagtgatgaagcagtatatggcattttcagtttgcttttctttgatcaacactttctcctgtgttgatcatttgcatttcttccttgtgagttgtatagatagaacaaggaaattttgaaaggaggaagatagagaagatggcagagcttggaggcctaaggagtgaaatccaccaggggagatggatctggcaagccggctcaatgaacgtggactcctgtgggaggcaaagtcctgaaggcgagagttaggattttataaagcaaagttgcaagaaaaaaaatttttcccctagattgcacacttagaataaaatatcctttattgataggagctcttaccaggcacttgggacagcccacatccttcagctgagacctagccagctttaccagcgcatcttcatttttaagtgacagttgggattttgcctcagatacttgaggaaggtattgacctctctggagatctgcggaaggatctttctccttttggaatgaatcaggatgcttttctaatagttgaagatcaaaagtagtccaaatagaatttcagaagtgattttaatgatgccagaaaatggcaagtcttacacagctgaattcttaaagaagaaaaattaaccaaaaggaaatcatgagatttcctagaaatatttgttcttatgtgtgaagaggcaggctaatcttttgtatgtgagaggccttcagtgttgtaaataggataaatatgcattttgtcaaagatattttatttttaaagaaaagcatgatattttgtgtgtgaagtttgggcttttttttttccaccctaaatccttcaaatgtttttagtcatgttttttaagatagtgaagagctgcatatttcaaaatgtatttatattctgaccttggttcataaaagtctgccaagcgccagaactatttaaatttggctataacactgtgttaacrtgatgaataacgattgacataaatgtactatattatttttataaattgtggttagacatgatagtaattttagaatatttacagtgctatttttggagactttttttttttttttagtcaactagcagtgttgaatgttttatctagccaactacaggttttcagctcataattagaaatgcctgagaagtccatattgtgatttaaggagttattagcccaagtcagcaattttataaggcattcttattaggaagtataaaatgaactttatgtagtaaaaaacgtattttataattggcatatatctaatgcattgtatacattcactcatattaagcattttggttagtcttcattatttaatcctcctgtggttacttaacatagaatgtgtaatgaagaactcagtagctttaaaggtggggtggttgaggagaatagaaaatgaaggtgatttattaactactgttgaaagctgctttagcagttagggtgaataaaaatgatgatttattaagtattccatcagtaataagataaagccacagtgtagggttggaagtacttctgttttccctaactcccaagaatacagaatttctatgacattggctctttgcartcgtccgtcccttccagaactatcatattgagggcaggagaaagagcttcccctattcatccatgtgtccaacagatcagttagctctgggccctgcccataatagggcccagtatgtatttgttgaatgaatatgctctttgaaataaacatgcctacaggagttactcaggttaagtgtgatttcgcgctaagtaatctggtattccagaagtggtgtccgctcatctttgaagtcctttctaatgtatatactcatgggctacaagtctttgtctttttgattttttttttttacaacagtcagaagtcatttagaatcagacctagtgaataaagagactaatgaatataggaaatgccttttccagttttcaagttgttttccagaatgatttataaaatgaaaactgcattcattttcttatatgactgtaaactggtgaaagtggtgccaaaaacaaaaaaaartcttttgaccaaatacaacactgctgaaataaatgtagatgattgtgagattcctttaaaggtcaacactcgaatataaagattctgttattttattgaaaagtgtttatatctacagccagtattttttttttagatatgttatttttaaagtaggtagagtcttcatttattttctttattacctagaatactggacagtatttaataagggttgccatttttcttgtatttcaattttatacaggatatacctagagttggttttgttttgtttccattttggcaaaattttttgagagataaaggtgtcttaatgagtaatgcttacagtaccacactaaaatgaaaagtcataggttagctattattttccactagagaaatcagaattacataaacatgttcctccctaagaaggtgtgatattttgagaaagagaaagaagcttggttttctatttcccaatttcatattgtttctcctgaaaagtgctgtgtcatataaataattgcatggtagaggctcaatgaattttatgcatttgtcagtggtcccttttgcagtttattctacagatgactattaatattcctaaaacatcacttctctcrtattgcccaactcaggttttaatggtcctccatttcctataaagtaatgattcagacttcaacatgcatcagaatcacctggagggcatgttaaaacagattgctggtgccgggcgcagtggctcacacctgtaatcccagcactttgggaggccgaagggaggatcacttgaggccaggaattcaagaccagcctggccaacgtggtaaaaccctgtctctacgaaaaatacaaaaactagccaggtgtggtggcgtgagcctgtagtcccagctactcgggaggctgaggcagaagaatcacttgaacccaggaggcggaggttgcagtgaaccgagattgtgccactgcactccagcctgggtgacagagtgagactctgtctcaaaaaaaataataataaaaaaattttgaaagcctggagtttctgattcagtaggcctgggtgggccccagaatttgcatttttagcatgttgctaggtgatactgatgcttctggtccagtgacttcagctagaaaaacattttgctctagaatgaagtcacagtgaagtcacaaatgtttagcttggcatccgtagtcttctgtaaatctgcatcagtttatttgttgagttgtatctctgttacttcccaggaaggactgtgcttccacaaaacttacatagttactatctccagaacacatgtmgtttaggatttcaccttgtttactttatggttctcaaaaggagagtcttctcacttgctcaaaatccatgtcctcatgaagccctctctacactctcaaccttcactgatttctcccttctccaaattcccatgttattgattatttctatctttggcctgtgtgtcactgattttgtgtgcatatatgttatctttcaagtagatttcagacaccctagaagtggggacaccttttttatctcataggtccgtggcccagaatttgacaataaaaggcaattcatcctaaatgtaacccagattaagtatatcaacaaaatgttttataaatgtgaggcagtatggcagagtagaaacacttctgtcctccctttccacgcctttgaaatggagttaataattcctctttttcagagttgttgtaagaattaaaatagaaaatgtatgtgaatctctcagcgcaatgcctggcatgtatcattcattattcaatacatagtatgtacttactagcagctaggaattggtaggagtgataaggaaaggggttggtaggtaaattggattcagaaagtcatttccaggaaagaaaagtatgttttggctgcagtattgctgtattgaccaatagcttctattttctattgttgcctccccttttagttgttgttgccaaatttctcacttcctatggcaggaaagtaagcattattttgccttgttagaattgttattacacagaagggatgctcatcctcaggaaaaccatagagagggtgttgaatggagtggttcctcattcattcatcagtgtccagttacttctgacttctgggcctgctgtcacacaacactcagatatgtggggaggaaagaaagccagggataaagaaatctggagaaataccttcagggcatagaaagaaataatttttgtgagctgaaaagctgaaaatgtttcattcagagataactacatgtgtaaatttagctcaataattaggcatatggtgctttcattttaggatgtatccaccctttgtgataatatccgttgattattagagctgctgcagctttaactacattggcagcagagattcctagtgcatttaagacaagaattcaagagtgaaatggaaaactgaattaataatttgttcttgggtggttttaatctgctccttaaatgtagtttatgcctggaggattagatttggaaacagaacaccaactaatgttctaaaagtttacttccttttattggaacattatactcttaaagattttcagaagaacattttggctgttttagtcttaacatacgaggtacacttaagttcttatgattcaacctaaaacaatagaaagcttttaatctatgatataatttttaacttttaaagtatttcatgttagacttcaaggcaggaattgtttaataaaaaccaactaataaaaggaaagatattctttgttgggcacgaggatatttgggtctcttttcccaagctttttaaaatccccctaggtctatatttttcaatcttagaatttaaaatctgcttgctgttgatggtaaagaaaataggaaaattaaaatcaaaggttatttctgtttacttcccataccttgtcaaatgtttctaaaattgatcgaaaataaaccattgtaattttataaattgaaaaaagagttatattccaagatatagcatagtaggatgagctgaaataggaagtttaaaacaggtgtctttgggagagttggggatggtgatgctttccatctgcttctkgcttaaagctttaactacggtcctattagaatatacctgagagtctgggaagtcagtgtatttgcttctgtggttgtagttctccacccacctgtgatctgaagaattacaccctaggtttttataaggtaaaggcactagaatttagacatttagaagggacttctttgaaaactaggaagaagatgggcaaagtataataccaggtattggtcygagttaaccaggagtagattatttattagaaaactagtctgaatttatgtattcttgataaatacaggttttgacagaaattctccacttttgactgatctggtaatagaggttgaggattttatagccagatatgctgcaggtaatcaggtgttagttctagcttaataattagcttaatttagtattagctgtctttttctgtggtactttacccatgctcttaatcatcttccatccttcagtgtgttctgctggagagaggcggtactaatggtgcaaaggcagacatcaggagagttgcagaagtggtattatatatgttacacacgtcagaagactagtcaccttaatactcagtaattgactatgattggcagcagggaatgagcagccctctcgcttcctggaaccttgagaggtgaattccatacattaccactggtgttcagaaggatcacctttttctgacctgtgggcactcactcctaccttttagaattcctgagggaggaagctgtctagttatatgattagttagcatatttgtggacctttaattatcaatagaattgctcgaaagctgtcttaggaagtaatgcctttgattgatttgaaatctcatgcatcacccrtgttgctagtgttttccaaaacactgagggatttttgcagacagcattttcaggggctgatttgaaggtaataaaccaaactggcagggagggagggttcttcctccacctcagggtgagatctctgctcctttactttactctggagtgccctgtcttcacaaaccccgggggcacacaacacattagtagccataagtgtctgttgtgtgttatgcagcccggagtcttccactggtatataccaagtccccaagttagatatttctcttttaaaaagaattttgccttcatatttaaaataaaaattatattcctcaattggctttttttttttttttcttgagayggagttttgctcttgtcgcccaggctggagtgcagtggcatgatctcagctcactgcagcctcagcctctggagtagctgggattacaggtgcccgccaccacgcccagctaatttttgtatttttggtagagaccaggtttcaccatgttggccaggctggtctccaactcctgacctcaggtgatcctcccaccttggcctcccaaagcgctgggattacaggcgtgagccaccgtgcccggccagttggctcttaaacctcagctattaatttccaagtatttttggtttatgaataacaacagcaataatagcaatgtctgataattttctctttttctctaggtttaaaacagagrcaacagttaaaactatacttttaataaaaagtgcagcttctcagttatactccatcatgtattccctttttctcctaatagaatgtgtttgttattcttcctgttctgagagtggctccttaattgattttataccatcagttagtgttattatatataattaaggaaatcaataatgagatttttaaaatatcatcttggcatagattttgtctcctttatctgcagttttaattctggaatggtgaaaagtatgccagtaactacaggataccatttgttgagtgttcacttcctrttagatactatgctcaccactttatgtacatattctcattaaattctcagaacaacaagtatttggtttttctcagaatatgggtatttgacattattctcctcattttatacataggaaattgaagccaggaaggggcaagcaaattgcccagggtcgagcagctcctgcgaggttgaaatccaggtctgtctggtccctgcccccaccctcttcttgtgcactcatctctgctgggttccccatatcccctggggccttggcaggctcagatcttacccaccttgaataaagaatcaggactcctgttgcagtcactcctctgcctgagaaggaagtaaagggaagtgaggtgaggactggcacaatttccaccccagcttgtggcagacaacatgctttaattctgaaagcaacaccaatgctcagtttgtttggaaaagcctctcaagagtaatattgtgctcaacttaacaactatatttactagtatgtgttcatgtatgtttatatccccttgatwatatatatatatatatatatatatatgcataatatgtacatggttatgtgygtgtatataattatctraaataataccttaagcattaatgaaagttattgggggttctggaaagttgtttaaatcaagagaaaaacaattgtcactggaagaaacaaatctaaatttgcttcctttattctccctcatcttggggcaactatgactcctaaagtttaggatacataatgttacaattatttaatttttaagcaagagattctataaagtgtgaccacattaacaaaaatgcagtwtgaattttaaattcacagtgaggtatatcaccaaaaagaattctatgagtcaaaataatatrttgttactgacttgacagtcaagttgtatatagaartgacaacaaaggctctgtttaattgatcttaagagatccggacagtataactctttctgcaaatggggcgatacagttatcattcaaacccaaataawttttttttaattttaatattttcctttaataaatcagattaagaatcacttccaacaaccctcctacaaatatttagaagtaccaccctgtgcaaggcactggagagatgacagtaaacaagaccattatcaccactgcccacatggagcccaaaggggtagagagtaaggaggccctgtgacaagtaccctgggaggggcctagagktactatgggaacctggagtagaacataactctggcagattagggggttcaggaacactttctaaatgaagtaaagtattagacctgaggatgagtgggaattagccggttgcaggcaagatgaagagggccgcaggataggaatggaatgtatgaaggtccccagggcagccagaggactgagccagagtagtagtgctgagaagaggaagtgggccacagaaatgaagcagagaaggcgtctgaccaggtgtttagactttatcctgagatcatcaggaaccatgggagggtttcaagttgcagaaataatatcaaatctgcatttttggataagactggagtccaggacatgtgttagaaggctcggcagtaatccaggtgagagatgaggatggcctaaatgcataaaggggtagtgaagatagagaaagtgaacagatccttgagatacttaaaaccggaatttatagaactttgtgggcacttaaaaatggagagtgagagaggaaatggagataaagaggttcttgggttcctgattgggtcacgggttttctgatggttggaatcgtcaggagagagagaggagtggagaggggtaatggatgtggtttaggatatgtggcattagaggagaaagatgtccaattggaggtctcttgtgagcagttggatgtatacaacaagcactgcaaagagaagtctaggctagagatgccaatcttgaggccatcaaactatggaaataaataagatctattagggataatgtgtcctgtacaaagagtcaagggcttagaagcccaaggaacatcaacatttacaggatgtgcagagtaagtggtgacagagaaggagcaatcagagagatgcaggaagaaaactggcagagtgtggcactctggagcatttttagatattcagtatttgaaggagtgagtctcagcagtgtcaaatgctgctgagagtcaagataaggactaagaagtgttctgtggatttggtaagaagcaggtagaagatgacccttactggggctgattcagtgcagtattcagggtagcagctgtattgcagtggagctaaggaagggcacagactattctttcaagaaggtaactgtgaacgaggccagagaggtggggtggtagctgcaggatgacaaggggcaatgagaaggctgagtaaagaaacagaatacttgctgggcactgctgagcacacagttggagccggcagctggccccctctgctcactcgtttgatttttccttagcgggattcaaccactctgccatatttggacaaggcaaacaagtagattgacctatcaaggaagacacatgttcccaagtgcttttttgagaatctgrtacaagagatcatttgttagtaagaatgtaaatccacttaatttggagtcagtgggtgggggggrgatatttattataaaaaggaatctctcatggatttaggtgaagacctcacagaacctggaattacaaatgtgaaggtacmgggaaccaagacygctattcctcatttcttactctgggctacttagtcttttgtcttcagtcatacatgctttattctttcctctgcagacaggctgtcttatgaatcagtactcaagtttacatrgccaataagtttaaacactaatagactttrtaataagcatctcagaggctcaattccaaattcccagaatggagaatctgacccagctttagttaagtgtctaatcatctatggccaggggggtggagtattgatttttagtgcaaatgtaggcatggcacagagcctcctaagtgacagaaagaagaggattgcctggctgcacagaggttttctggcatctctgctgcatccagacatctgctktgctgtatttatcttattgaaaatttctctgttgtgggcctacttgtcagaggcaagttgtccagagttctgctatatattcattatggaaggttttaccttattgaaatgacagttccccacctttagcattttatattgttccattaactgtcatacaaacattcctgcaaaatatcagttcaggaaccaaacttactttccctgagatggtaaccgtttcacagcctctcatattgctgcttcattatgtgatgaagtctaaacacrtaaatggtgaccagttaaaacacacacctrcacacatcaaatcaagaatttgattccaaatttacaaaataatcaggtcttatcttttgaaatcctacctgtctatcaagacccaatttaaatcttattcattccataaattcttgcctgttcttatcccctgaacagcagaaaattatttttctctgtttttatgactcactttgttttaacctacttackactttcttagtgtyaaaggcagcacacacaaaggcactgagatgagagagcttgtggctttgccacttattaacagtccaaccctgtgaagatatacagtgcatttgagctttatctcttacctgtgagagtgatgataatgcctacctttcctggatgtgaggagccagcaagtgagcrgatgcamaactgtttgcatgctaggaaacctttgcagatattgattacttaaggaaatagttttggggtttgaagaccgggtttctaaatccctgtctgccacttggtaattcatggtgtggcagtgggtgacttactgttcttcttgggcatgttgtgtggtgtgttttctttcattgctctaacaaattatcacagagtgacttaaaacaatacaaattaatatcttacagttctaggtcagagtcagagtggccttgtttggtttctctgcactgagtctcataaggccaaaaatgagctgtcagctggcccaggctcttctctggctctgggggagaatctgttttacaagctcattcaggttgttggcaaaattcagttccttgccaactgtagaactaaggtccccatttccttgctgtcagtcgactctcagtttctgaaggccacctgcattcttcgtcagtttgctcccttcattttcttttcattcattcattcatttagacaaaaattgtatatatttatggtgtacacatttcaaaatatgtaaccattgtggaatggccaaattcagctaatcaccatatctgttacctcacatacttaccatttcttttggtgggagcacttaaaatttactktcttagcagttttcaagtatacagtacagtgttcttagctatagtcaccatgttttactaccatcttaaaaatatggaatgtagcctggccaacatggtgaaaccccatctctattaaaaatacaaaaattagccagacatggtggtgcatgcctgtaatcccagctccttgggaggatgaggcaggagaatcgcctgaacccacgaggtggagattgcagtgagccaagattgagccactgcactccagcctgggcracagagcgagaccctgtctcaaaaaaaaaaaaaaaacaaaaaaaaaaaacggaatgcttcataaatttgcacatgatccttgcggaggggccgtgctaatcttctctgtgttgttccagtgttcatacatgttgacaaagcaagaactgaacactcctttttcaaaccagcaacatcacatggagtcctgttcagctgaatctctgactttccattctgctgcatctcttctgcccccagctgaagaatgttctttgcatttaagggcccacttattagattgggcccacctggataatccaggttgctctttaagggcaacttaattgttcttaagtaactttcatcatacctgccaactccctttgccatgtgaaataacatgtgcacaggtctggggattacagcatggaaatatttggggtagggtggtcattcactctgcttaccacttttggtactatgtatgtgtacagtgtgtgaagtcaagcacagtcacttgcatacgtagagctactcaacagtcagtggtaaatcatgtggtcttgatatggttaggctttgtgtcctcacccatatctcatttgaattgtaatccccataatccccacaatccccacgtgtcaagggagaggccaggtggaggtaattgaatcacggaggcagtttcccccatgctgtgctcttgatagtgagttctcacaagatctgatggttttataaggggctcttccttccctgccttgcttcaccttccaccatgattgtaagtttcctgtggcctccccagccatgctgaactgtgagtccatgagccctctttcctttgtaaattacctagtctccagaagttgtttataacagtgtgaaaacagactaatagaggtataatgtacatggatgcactttggtcaagagtaggccaaggcaggcatccgagcctgcatgactcagtgagtttagggcacaggtgcatactccatttgttataaccggtttgtgtaagtttgtacttggttctggaccactattgtctgtaaaaggtataactgtcctgctgacgctatacaggtgctcgtgcccagagaaagagagagctagagctgtccgtcttttccgtctttgcagacggacagtgaggagccaggacacagctcggcctgcttatgtccagagagagaaagagttaagctgctgaccctgaaggcagggagagccacccacacaggtatacgtgggagcagccggctcaagcagccgagacagagcagaaagtgtaagagagatgctgaataaagctgtatttcacctatctacggcccctgagtgttctttcagctatctgccattcatccacccactcccctcggacctcagcatgggctggaacctgaccctggacctaacaacaggtctgttgctgtgatttatgttcaacaaacataaactgttacccaagagatattttgtgcctcaggttgctggtaggagtaatgcaaatcaaaagaagctaggttgatagtcatacagtagttcctttgtatagtaacttctagtatatgcaaatagagaaggcaagcaaacatgctgtatccacatgtagggaatattgatcaataggaagaatattccatttttttcttaggacttttgttgaagcctttgacaaactatcttatttcaattccattattgttcgtattctgggctcaataggggtatttaaagtacccagtgttgtaagactactgaaaatccacatccccctgcccccggcgacggagtattgttctgtcacgttggggtgcagtggtgcaatctcaactcactgtaacctctgcctcctgggttcaagcgattctcctgcctcagcctcctgagtagctgggattacaggtgcatgccaccacacctggctaatttttgtatttttattagagacggggcttcacatgttagccaggctggtctcaaacttctgacctcaagtgatccacccacctcggcctcccaaagtgctgggattataggtgtgagccaccatgtcttgccagactactgaaaatcttgaatgaaaaataattctaatttttgtttattcaccctgcatcttagcaggtatagtgtaaaagttaggagcaaaaactctagagccagactccctaattctgatttcccgctctttgatgtgtccagtgaacttgggcaagttacttaacctccctatacctcagttttgtcatctgttaaggtaaatataggcccaactttgtggagttattattgaggattaaattaaatgtgttgatatatgtaaagtgtctggaattgtaactactatatagtgctgtgtgagtcttaggattattattttaattgaataatatgctttaaccattggctctaaactaaggctgttttgcttcccagggtacatttgccagtgtctggagataagggttgtcacatctgttggggtgagatacagacatctagtgtatacaggccagggacaccactctgcgtccaaaaatgcacarggctgccctccccaaccccccaaacacaggcttatccagcccgaatttcagtagtgtcaagattaaaagccccagtttaaaccagtggccttttatttttttagtaacaacttcattgtcaaataaaatattcatgtatcatgagtgacttttaacaatgaggaaattcatgactgagagccatagggctctgagttctacaataaagtgaaaagtagaaaataattgttctggtgattataaaaagagatatcacaggaaaagagtgtgcttaacttctagaatatataattaagggtaagaaatactctgatcctgtgaatcattgaatgggagttctcattttctaattttccagtgaggttcttctggagattataaggatgaaattacaggtgacccttgaacaatgcagggattggggcaccaacccctcatgcagttgaaaacctgcgtataactttcgattcscccccaaacttaactaccaatagcctactgctgaccggaagccttactgactaaacataagcmgtcagttaacacgtattttgtatgttatatgtatgatatactgtattattatggcaaagtaagctatagaaaagaaaatgttatttaaaaaattgttagaaaatatatttattcaggtggaagtgagtcatcataaatgtcttcattccttgtcttcgtgttgagtaggctgaggaggaggaagaggagaggtgttcatgctgtctcaggcagaggtggaagaaaatccaagtataaacagactcccacagttcaaacccatgttgttcaagggtcagctgtacttggatttggaaacttgctgttactgtgtatgttgaaacrcagtgagagttaagataactatgcattacagttgcttrtgtggaatttacctatattgtagtagtggtaaattttgcaagtccccaaatgtttttgccactgttatttttatttctgaatattatataaggcttatgtgtttgctctcttcactccgtctcatcccgtaggtatattgaataatttagaatttagggtattcttcaactacttttttctccaccacctctcctatcaattttagctatttgatttgtccatacaagattctgtaggactatctgagactctgttcattcttgtggttacagaatttgtccttttgatgataggtcacttaatcatcaacacttgcatgaccacagggtgcagaagctgttgagactgacatcctggatcatgtaggaaagaacctgggcacattcccataccttccactctgttaacctacttggagaaactgaaaatcacaagacacaaacaaaaataacctgcagttgttcatcattaagattaagcagaacactgatatgttgggcatcaactaagtgctaaaaatacttgataattgattacatgatacaattgctaagtattggttaaaaaaaatatgagattgtgatcatattagaaatacatttgtctcatggtatttaacaaatttgtggcttacatcaatatggcaaaaggaaggtgttaattgcagcgaggatgataaccactgcatcatttttgggtcattgtattacaactttgaatctataggcataaagggaaacacmctgactccttatttaaaaggaagaaacaaaacctttttgattcagatcatgtctgccatatttttaaattagggctagaacctgggaaaagcagcttacagcagaactacattttataatgcgatcttttgttcaatttgactagtttgtttttctgacactctctaaagtggtgtaacagtgataagtacttcttcacagactttgtrattaagagagatcagccttaaatataattggcacctttcaagggtttgggcaaagtccagccagtgtcctgtgatgtcagggtattagaacagagaacgtcttctgtcagccaccaccttgctgtgggctcagttatgtgctgagcaccacatcaaagacccagctacgtagcggttgaaaactagttaaggccttccttctactttgaaatgattgttacccacagcttggtttgctacttcctaattcagagccttatgctgaagacatttttggaaaaaactcaacagttttatcagtgaaatatggggaaatacttaagtgtcttcatcaataattagttgatctggggaaaagagacggattaaacactggggaagagagacttggattatagtgaatcagtgtctatgtatattatataatttctataaataggactggccgagtagtagcaaatagcacacacaggaccatgtttcttgcctcgtttcggtgtacatagtggcattttattgtggtactctggaccagtgactagagggtcccaaagactagagctcatactaggaagacaattcctttacaataggtggttaccattagttctgcgaatagaacggagatctgagtctggattccaaagaatactggcaaggcatatcatagtagtaattggtctaagctgagcagggcccagtactgagagggtcaagcctaggagaagaaaaaaagcagaaatggaaccagaatgacaacacttagtaatgtggataagatcatcacagacatacagctgtacaccagtgagctccttgtggacaggaattgaatgcagtataggccatgtagctgtgggtgctcaagatgattgtggaaggaatgaatggttctgcctggcacaaaggaacatgggaatggcatttggtctggagagtccagtactaggacaggttccaccctgctgcccaactgaatctcttagggaatttgctttctgcctggctcaggaagctgtgatctccttccttctctgtgagttctataggagtgggccactgttatggagggctgcggcccctggaacatttttaccattgctcaaagtaaacatttgcagggccggggcggtggctcatgcctgtaatcccagcactttgggaggctgaggtgggtggatcccttgaggttaggagttcaagaccagtctggccaacatgtcaaaatcctgtccctactaaaaatactaaaaattagcgaggcatggtggtacatgcctgtagtcccacctacttgggaggctgaggcaggagaattgcttgagcccaggaggttgaggctgcggtgagctgagattgtgccactgtactccagcctgggagacagagcaagaccctgtctcaaaaaaaaaaaaaaaaaattgcaggccatgtagtcaatccactagatttcaggaccttggttctttgtcagtaaaattcaaaggtgagtagttagttgttrggaaggtgaccttctgagacaggaccaaggaagcaggcragagggacagatccttcataaatcctgacagaggatcctgtagaaggtaaaatatccttctggtttggaggagcattttacacaaggatattttaaatcaagttagagagtcctaagccaaggacagcattttatattcagtactgggaaggtattttctgtcaatggtagaaggtcatacttctctgtttggaacaacagtcttgtttccagaaatgaaggatatggaattctaatattgttcaaacattgaaaagaaaacagtgtgagagagtcagtttatatggaaatcgatagtagaagatcacaagtatactgacctattttaaataagatttcatgtagttacagtaaaactttggggagaaagttgtattctttcacgtatacatatttgagagtccaaaattttacatttgagaaagagaaattgtaattcagctatgataccctgtaaaattaggtaaaaattaaacatttcaaatagtattatcagttttgctgactagaaacgtagtatttaatgcaagtactattataaaatattttttaacaagacccccttttcacaaagctgaagctgtttaatgttattaacagagtggtatgtaattattggggtaattcagtttttactagcactacagataaattgtattatagaagatgccttaatatttgaggtttataccaagaaatatagccttctttgataacaatatttacttgaataatttatttgattttggtcaaatattttacttttttcaaagaaagtggagaaaaactcctcaaattattccatgatgttgctgttttctgagtgaatcctggaaccccgaccacatacctctttttttttttgtttttaaccgtttgtgccttcccccaagcccacatcagtctttaaaacttaatcagaggacttggctactgtaatttttttggtaaatcatactatttattattacacagttgtcactgtcaaacctttagagtagtttcagctgccaaataatatgaaaaatactgcagagaaaaacttctgttttctcaaattggggcaatagtacatagcccagttttgagctgatcactctagttttaaaaaaacaaccagagtataactacttaaatgctaaatgccttagtgattggtggtggttcaaactttagtttgaactttaaacacaactggctgacccatccttaagagaagatactggccgggcacagtggctcatgcctgtaatcccagcactttgggaggcggaggcaggcagatcacgaggtaaagagtctgagaccagcctggccaacatagtgaaacctcgtctgtactaaaaatacaaaaattagccaggcgtggtggtgagcgcctgtagtcccagccacttgggaggctgaagcagaagaatcacttgaacccaggaggcagaggttgcactgagccaagattgtgccactgcactccaccctggggacacagcaagactccgtctcttaaaaaaaaaaagaagataccactgcagttctcctggcttttaattcatttatgacagcagaacaaccactgcgacagcatatctgcatgtgccacmccttttttcaaggcagaaggaagagggaaagcaaagatacccattgaccttgacaaaagtcccattggctggaactttgaccaatagccacttctagctgtgaagaggccwggaaagaacattaggcttttacagttgtcagtttcagcaagaagcaaaggaaaaagagktttggttgtggggtaaatatatctatattatctgcagtasgtctaatatatattcatatttttattattgttttgcagctttgtgtagtcttttggaataataaaacaatttcacctctgctgacaaacttgacatttcttttacttcctaaatttatggcggtctttgcccaatttttaagccataaaatagctgaagaaaattggaagtcattgcattcaaagctcatattaagtaatgcagtctattttaacaggttgctgaatctggcatatatttattgctggccacttgccatccatcaacaatagaatgaatgatgatgatgatgatkatkatkattattattattattattattatttttaccattttgaagaaaaaaaatcaggctctatcagattttaaaaccctaccagaagggttagagtaatgcatttkcaggcccaggaaatatttgccatcacttacaaaatacctcagatgatcttcagtccatagaaaatatgattttagggtggtaatratacaggcatattagatgttagtgcttgccttaaagatggtactgtatcacatatagtctaaaataatcatttgccatttttagtgataatcttagtaatgtagaagtctagatgaaaccatagaagagagctttgaaaaataatccatatctcagtactttttttctgcatgtgtttaatgagaaatctgatattgccatttagtggcaatgtttagagtattattgacattcaagctagtaatattgagcaatatgtctcttttcagtaacacaaaatgaaattattagggtgttcttttggtgatgaaatacaatcctcaatgaaaccaagactcatggtgatgaaagaacccrtgtaggatgcccaagtagaggtgaacaratacctttcaaaggaaagaacttttagctattaaaatgtatgtaaagcaaagttctgtttcagtatatgtcaggtaactttttccctacagggtacagaagtaagagatactcatattttcacttttttaatatagcagtacrtttaatgctttccctgtatctgcaaggttttcaaaaaaagaaagattggaagttggttttgcatgtcatgtttctgaaagcctcactcttaaacataatgtaaatttttccagaataatgagataagtaacagaaacatacaaagatrtatatcaacagcacatgagtaacactttatttggaagccaagtttcccccagattgcatgggtcacacatttggctcaggacagtgtacaaggtaatatatgttaggcttcagactcaatctgagttcatagccaacctccwccaccaagatctgatgttgggaaaattactttacctcttgatttcttcatctgtgcaatgggactctctctggggagactaccttccttgcagagttgttgtaagggatgagcggagaaatgctttacatacttcctgatgtgtaagtgttcagtaaatgctatttctgtgacaaggatgatgataagaaaatacatttttgggacacaccaattatggattttaagtcttgtggaatcactagttgctactccaagattatccttaggaaccagcatttctggtagtattacatttcataagtaaagtccttttatacatttttattattgttatgcccagataataatttgtaaaactgttatcagcagtatgaaaggattactttcagaatcttacaagatcatggattctagatgacaacggatattccacttattaataatggacaattttaaggacagttacttcagaaggttttttttgttttttttttaggaaaaacaaattttcctataatatgtgacattttatggccaatctatttttatgaattctaccttcaaataataataacttacagaattacaattcataatcctttaattaagaaaatagtgatttctggccttaattcaaaaaggaaatgcttatactgtgcaagtctcttctttaacagctttattcrtaattgccaaaacttggaagcaacaaagawgttcctcaataggtaaatggataattaaactgcagtatatccagacaatggaatattattcagcactaaaaagaaatattattcaacactaaaaagaaatgagccatcaagcaataaaagggcatggaggtaccttaaatgcatgttgctaagtgaaagaagtaacatggctacaatataaaaggctacgtattttgtgattccaattatattttggatgaaacaaaactatgcagacagtaaattactggggattggagagagggatgaataagcacaacatagaggattttcatggcagtgaaaatactctatgatactatggtagtaaatacatgccattatacattgtcaaaaccattgaaatatacaacactaagagtgagccttaatgtaaatcatggactttgggtggtaatgatgtgtcagtgtaggtccatcagttgtaataagcgtacgattctcgtgcgtaatgttgatagtgaggaggttgtgcctttggggtacagaggatatataggaactttgtactttccactcagttttgctgtgcatctaaaacttctgtttaaaaaaaagtctgttttagaaaacrtacacacacaaaagaaaggataaaagggaaatacttgtgccctacaattctcctcttgctaactgaagaatggggcttgactctagggatagcttgtttcaaaaaaaaaaaaaaagaataataataataaaaaaatgtaatttaaaaaggtaactatatctgactttgctcattttaatgaaattcaagctaattcattttcatcgatcactaaataattagtaactttattaactactagtaatactagtgataacctcatagtatttgtaaagtttaaaaaaggaatctaaaagaaaaagcttagtctttataaggttgacaaatctataaacaaatcttttaaagatagcacatttcaattttaaaaatcattttgtcactgctgcaaaaattaaaatgtgaaaatttgaagttgtggaatgatatatgtatgagttagaatgtttgggcttacctttttattacaagtattaaaaaaaaacttttgagattagacattacatgaaaatagtatttgttttctatggcacacttttttagctctccttaggatattaagggagcatctgtgatatcccagcaaggaatacctttttttggctgggcatggtggctcactcctgtaatcccagcattttgggaggccaargtgggcagatcacctgagctcaggagttcgagaccagcctggctaacatggcgaaaccccgtctctactaaaaatacaaaaattagccaggcacctgtaattccagctgctcaggaggctgaggcaggacaatcgcttgaacgcgggaggtggagattgcagtgagccaagatcgcgccactgcattccagcctgggcaacaagagcaaaactccatctcaaaaaaaaaaaaaaaaaaaacccacaaaaatgaatatctttttctcttgatcactaaagatctgtagttgctgatgcttcccatgttgggaaagccctgtaagatcttggcctggggaccaagtgagggagatcacctgtcaccacaggcctgcaaggggtcacttgctggcctcacattgaccacagaggtcttagcasrgctaatctaatgaattcaaagtttccgtgttaattaaaaatctgcsgaataaacagaccaaaaaccctgaggttaaacctttaaacacaaagtgacaacttctgaactcagtgacagcttctgcctggagaccatagtcatcaaccacaagacagatatttttgataaggaaataactacaaatggtagaccctaagctgatgccaaactgttctatgtaaggaaagtgttctcagcaatagtgcttccttccaaaaaggaatggactagatattcacctatgaataagcccttttctgacctctaacttttgagttgctaaattataatcccttagaatgttttagagaaatggacttatattttggtcaagtatttctttattctttttcttttcccctgtaycctctgccatttggtaacagcacaagagtttttataaaataatgtcaaaatttggccataaaaaaagagaaccattaaatgcatatgatccaatttttttagctagaactggaaacactgggttttccttaggagaacgagatacttcttagaaacagaacaatctktccattacaagtagtgattactagaattctcattttttaaaactggctttatcagtcattctgactctttttctaaagaaattgctattgctaaccaygctttcatttcactggggaattaatgctcagtggcacattagaattcatgcaatagcattaaataattactgtttctttatatatctcctgccaacttagaagtacattaaaattgkctgtaggagaattcaggacacctcaatctgaagaaaatccccatccatatatatatattctccactcagtagataagaggcaacctcgagtacctggcaacaaacgaattgcacacatagcaacaagaagtckagtaatacagaaagaggaaagagaagctggtccacattagctcccgtggtggtagtaaacttcagaaaatatcagagctgtagacagcagcttggcatgaggagaggaattcatggttttccataaatctagtgacaggycaggtcgaatargacaacaccatcttgtctgccccagtagcatacagggcaggaggagaaaagttaggtacagagctggagctgagagccgaagtggaggaggaggaaggctgtgagaattgaaggatgtagggcaggcaaggaaaggtggtgctgtgagggtcttcagttgagccagctcccagtcctgattcggcatgtgtcattttggtgccaggcctggscacagcttctcagaccccagatagagctgccttctgtgcatggaggagcaggagggctcagaggcctcagatgactgtctgaggtttgcaagcagcaaaaaagtgagggctctgttcagtgtatagtggagaaaatcagcgtgagagagtttccagccttgctcttctctacactaccttgggcctcagcttcatatgtaaaacagggataataataccccagagagggtgttgtaaggattggatgtgttaaattatatcaaattcccctcacagtgcagtgtggtagctgtttgacaaagttaattcacttcctcctttacagcctcggcctccataacccatgatgacgacagctcctacagtttgatttgtagaacaaaataatacttctaaaatgtgaaactactgctcatccagtgaaagaattgttgagaagcttacacataatgctttatgcacctcagatctcaaagacttttgctaatttgtggcaaagagatagcacatatgttgctaccagagcagtccgggaagctggccctgaagggcagcctatgctagaagtggaatagaagctcctcacagagctatgggaaccagggctggtgggaagccacatgcccacagacctaaaaacagagtggttagttctagacgcgtgcctgtaaagtagaggttgcagtgcaaactgctgggctgtgggctaactgtggctcacggatttttttttttaacccttagccagcgtagttttgattttttttttttttttaaatagctttagtgaggggcttgactctcgttttgtcacgtttcccattcacttctagttgccctagacctggtggttctgttcctgtctggcccttcaaatgttctgacccctttttcgagcctaccacagaacagggcacaaaccagagagcagacagtggactcagaaccaggaactgaatgtgtcctatcccattgtcctagggttgccagatgaaatatagcactttcagttaaatttgaatttcagataaacaactttttttttttttagtataagtaggttctgtgtaatatttccatttcctaaatctggcagtactgctttattcccatttataattctcatcctcgcaaccgtagctactaagtagtgattgtcattgtaacattggggtaaagaatcttgaaaatagaacaccttgacagcctttgggaaagagagaaggggatacatttatttcagcatttgaaagagcaaagcatgtgaatgagtatttgaatttcatatggggtaaaattggaaactatcatggctagagggctttttttcacatactgggtgatgacagctagaaggtgactggaggtggccctcgctcactgaggaatgatgtgaggacaaggatcattcctaagactgtcttgggtggcatcttgatacctgttgcatgagagggtgctaaatactttcagatgtaattgtggtagactccaggcaggcagtctttgtgaaggcggagtcacatcaggctctgcactgtcacctcttggtgacattagcctcttttctttcctttcccgtaattgctctgcccactctgagttcagctaaaggtcaaagcatcaaaggaaggagaacttccttcctaagttctcccttatctgtttaacctcctgaagcctaggmggactctgaggaggtggcgtgagtggataaaggtcagccaggctcattgagtgtcttctagtcaggtgccctgtcacacctgatctcctcactgtgctgtaagggagataatacttacttttttagtaagctgtattttctgagcagttttaggcttgtagcaaaattgaacagaaagtatagagagttcccatatacaccctgtccccacacaggcacaacctcgcagtctcagcacctcaacccacagtggtgcatttgttaaaatgggttattctttttgaaagatgagagaactaaggggtagaagggcagaccctgaggcagctggcctcaggcttatccactgtgacctgctctgccatgtggctgtgatagaccggccttagtatcaggtctcttgctgcccagttgtccttctggccctccagatcttcattcccataaggaaatgtaggtggtggggatagcattagataagcggtggaaggggtggttagattgccgtcttttcttgatccatggagaaattctcttccaatggataagtgaaggtttggagaaattgtgaattaatttcccccaagttgctttttatctrtgtctctccgttctgttttccagttccaccaaagattgaaagaaataaggttarttcaatgaccctaaaaatattttatctgaaagctctagaagttacttttatatgacagccaagtaattttaagcaaagtttgatggaaaktgctgtcaggcttttaaaatcactgtttttcaaagcatcaaccctaagtgtagttttaagagaaatggcacatcactttcaggtttaacaatcagtgagttagattgctcttccacctcagaccttgcctgaaycagacacagccccttgtgtccccaagaacagcagggacatgagtatcactggaccacagaacttcttccctttcatgacaaacagcggactgttatataagtgagccaaacatggcctctgtctgttggtctctaggttatttcctcactgcaggctgagacccgttaattcaagagcccgccaacaccaaactaatttttaatacatctaattattttaaaaatagcccgaacaagcagatttttagcatttagagcctgccttacacgttctgtgaaaccttacctagcatctgttggccattgataagatagagctttgtggttttaagacaccgagctgctactgcccttcaaggtcttctgataatagagttactccatcatgctgcaaagtgacatcacttagtcctaagccctcattccgatgcacctctcccttgggagttcctttgtcctcctccccttctgcatggtgacctcctcaccctaagcctctggatgccctcccatgcaaccctgtacaaagcaccactcattaaagcttgttgtgtgttaactgcctctgtggtcctgtctttttcccagatcaacctcaaatccctcgaacaaacccccactacacagcagtaccttggcacaactaagattttatgaaagctagtgtatgaacctscatagctaaagattaccccacattgccttacacctggagaggacctttctactcttcctttcttcctccatcttttggataccaaatagttgtgtatatttttaaatgtatatattgataaagagcttgtgtacaatgtaagtttgcctggtttcacatatatttgtccctcctatttatgtgttatactaggaaaaattatgaagctcttttagattgcaaagatcacagacattcttaggtttttaataaaagtaattataatgcctaaaatgcattgagcacttaatgtgtgtcgggcaacatgttaaactctttacatgccttgttttatttaatcatcaccacaaccagtgaggtgtttttattcacattttgtgtgtgcagaaagtgggctcagagagattaattgccttgcttagagtcacactgacgatggcagagctcagatatggacccagtttctcatatgcgttcgcccgtgacccgcttttacgccttactcctcagtaaatgagaagcttttctacaagtacacatagggaagtaaacaaacagtctcagcaggcaaagaggaaaagggaagatgattcaccaacattcaggactccacagcattgttgatagttctatagctgctgtacaggcctaacacagttccactggggaaccatccaagtggcaaaatcatctgtacctcagcctcctcttaacttttttctccttgcctttcttgtcttctttctcatggcttttactgcttcacagccctttctcctgtgtatttgtacttctctgtttctgtgtcactctctggcctctaggttctctctgaatgtttcccagttacacttccctaggtagagtggatggttgggttgactcatcccatccattagtgagaactacacaccagggcgccccacsttggaggctcatggctagctctcagcwatctgcctttgagttgggcaccaggccctggttcattcasctgggccagcatcacatcctacaaactacggaaattttatgtaagaacccatagaaggaggccataagtgggacttgaacttgtaggcttcagtgaaatagggcaatgaaagcccaaagttttcctgagatctgtctggaaaaatcatgtaattttcaaagacttttgatgtgtctaatataaaaatttaaagattatgtgtttaaaacttcagcaaatggaagtatttgctaagagtagttctagcaataaatatgcaagatatgaagtctatgcatactagggaaattccaacgtatttctttcttcagcgtgcttgattagatcaggacattaaacttaatttgttagaaacaacaatagagttgtatacaacatytaattagttttcttactcttctatattcayaaacatttactgagtatgtaaacaggcagtatcttatgtttccatacattatcartgagatagtaaatgagacagcatyctgtatacttcccttttagtcctttagratcttttcatagtgtagcagatactcaataaatgacctggcctaattaaygagccctgatgccaattaagaagaaagtacaaatcaaagaatcttttcttataagcatggagtcaaggggaagtaatactatttctttaatgccttatacccaatttaatattttctgggttaaaataatgggttgcaattatgaaattttggtcctttgtttcctttcacacagygtgtcagctctacctttcaccaggagcaaatatacgtattcaggaagaaaacatctttggcttgctttcagtttatctttttttgtgagggtttcactactgcatttgaaatttgggcccattttacttctacgtggaatgtcaggctttagaaccctaattaagttaatgaaagactacaaaagaaacctaaggagcctgtgaagagaggtgatcaattctgtccttgttagtagttaacttttagaagtgacttccttgtcctgccagctcatgagaactgggtctagagaaattaaatgactttatcctcatcgccactcagctgggtaatggcttaatactacaaaattaaaagctggtagccttttgatgtttcaaatatttgtgtaagtcgtaaatctgagttaacaagttgattttatatgtgacttttaaattgaagcttatagttattctatgcatgtgtacacacacactcacacaatgtcttacagttagctttaatgtggtaaatcatttccagaagtgatcagctggtggaattggttaacaatatgactgttcctctttataattgctggataaacccctcccagtgctttgttcagggcattttgaccacatcattttcgtcttttctaactttaactcatagaaatcccatgggatcaggaacccattttgagaaatatgtcagcaacttttgaaatgtaggaaactaaccaattagtgtcagcttttcccttgagggaagaagataggaaaagttaatatatactacagaggttactttaggagatcctttactagtggtacattgtataagtgatcatttttgacaaagctgaaacaaattatcgtaacttttttttctgttttgatgttcagtatattccaaaagcttttgaatttataaagtatctttggaaatttacaggaatgaagaatttactaaatgtagtacatttaatggaaaaaccaaataaaatcaaatataatctctaggtgttctgtagattttttatatacctagtctttcagaggctcattggtttctatttttctgtgatgtgaatttaattagttttaatatagatttaaaatttaataaacgtgattacctgccatctgtcaagcagtatgcaaggtgcaaaaacatataccacgatcatgtattccttacatgcatcctgtaaggaattatcccaaattttcagataagagtcacaaaaactgtgactcatccttaagtatgtgactcatcagtggcsttgtagggattataaatcaagtcatgtgaccctcaaatctgttttacttctcaacaaaattaatgtataagaaaaaaatcctgaaaacactaccatatacacattcttttgattgttgaaagatcaayaatctgattcagtaaaggaagattttttttgctgactcattaaaggaaggtgatgcaatgtgttggttaatgccatgggctttggagtcaggctagcttggagatgaaccctggcaccttgtctgtggaaaaatgtggtgactgagtaaagttgttttttaacttccaaacctcagtttcttcatctccctaacaatggtaataaaacatatttcatagggttgtagcaagaattggttacaatactaaagttatagcatttagcagagtacttagcagatagtactgattcttggtaactgttggtagtaatagtggtgagttaggaaggtaatttacaagttggttaaagatgctgattgttgtgttcaggaacatakgaaaactttgttattaataaaatgatactgatctcaatgaagattttgagtggtaaatggcccgtaaataatatctataactttgtgtgatgctttaagatactctaaaatatggagcctgattggaacctttttcaattatgtccatattttgattactgagttctagacagttgaagagtcccaatccttttaaaaaatatgyatacaaaaataattatatgtgttctttgagtcattgaaaaaagtttatacaactaatttatggcagagggatttggcttttaaaaccattattggtgtgtagactctsaattaggaatatactggatcaatcttcagttacatacatatacacacatgtatccaattaaagattgattacattaaaataaacaagtttttccaaaatctaggcataatcacagtgttattttttatttcctgtaaatattttaaaatacttctccatatagtcttcgtcaggaaacatcaaagtggtttaaagggataacctgaatatttgtctgtatgctgtgaggccaacaaagtaagaagaactttgtgcagaaatataaattttaaagatagtctttgcagatttaatctgttatgaaaatgaactagataaatgtagacatggttcatgcttttaagataagctaaattcctgttgttgggaactgacttttgaaaatggtatttgcattaaataggattaaatggactcaaaaacgaaaacttcccatttgtaaacataaaagggtagtgtgtatgtgtaccagcatgtttgtatgagcatgtgtgttctggtttatataatcataaytcttttacttagtcatccttttaactaatgaattttaatgttttagcctttgctcttcaatatattacctattttgtagcaaaaacatctccattcaaattataatcctgtttttattttttttttcagatgatgaaacatgcttggaataattataaaggttatgcctggggattaaatgaactcaaacctatatcaaaaggaggccattcaagcagtttgtttggtgagtagatgtgctttggtttcttagtgacrataacttctccccaattgcttgagcttatggatggtggagaagtctgtgtaacatggccctccaggccatttggttaggaaacttgcacacctgatggaattagataaggattgtgcatagtgtgtccttcagctagagtagtggctatgtgttcgaataacctgctggaataacctgcrtaactttaaagagtactgacgcctggggcatacttctaaagattctcacttaatggttatagggtgcagtatcataamttttagcctctggggtgattcctagcatagaagcacttggtgggctgcactaactgcttcctgttaggtaaaagctgtgcctttatagataatctgggcaaggcagccagccatggtgatcttcactgtatctcaattttggctataggtttctcctgtttgtaccatggaagagaaagtgaggatggattaggttaattgaacttccatttatccacttttgcaagctttattgcatttggttcccacagcagccctctgtgactggtagtgtgggtattaataacattccattgtggaagtaaggaagctaagtaacacaagggtgtcatggattctttgggtcacagagctgcccagtatcctcctactgcacttgatttctttctaatcctcaaaatttgtctgtaagtaacaggatgaagggaatacagtgttactctggaacttctgaattcaacaatagaacactttctatactttaactgaaaatgttaaataatagcaattcacataataacagtttcagcacacatttattgagcacttactgtgtgccaagtgccattcatgcattatcttatttagcctcattaaaatatacattttataggtgagaaaaatgaggcccagagaatagttttcccagagatagccacctactaactggcagagctgggacttgaaccctggtgtgkctaacattagagtccatgctcttaattctgacattttgcttttccatttatttagaaccttccatgtgtttggctttacttgtagcactggtgataatgaaaataatacgagtctttgcacaggtctttacacaagtctttgcctagtacacagcatataatatgtaaatagtgatttatcaatgcgccaggtggttcaatatatacttccatgaaattctgaggaaccagtaggacctcaggttgggagaaaggcattgcagggtttgcaagaacaggtagaaagagctgggaaaagtagaagaaaagagactgttggtctatcagagtgacacagttttgagatgaagagcacctatacctgaagtagaggcagtagaagtaattccagacacttctaaagtagtgtttttaggacccagctaccagttaacatgggtaaggggaggtatgaattgaagagagaaactctgaaacctcatgcagagccagaggcctttattttttcattgtttattayaacattttttgaaaaaattataactccattttgcttttatctctataaaagtctttggtaccattaagaaatcagttaatgtgttaaattgccataatctttatcagagggactatttggttctctgttaaaacatttatgattttaaaatttgttattgaacattaaaaatatactaggtctcttaggcctgacgtttgctttttggttttcattggctttttcggtaaaaaacacttttcataatcaagaacttgctcttagaaaaagagcttcaggtattagcataaggaaatgaaatattaataattcaaatggtatttaatctcattccatcttcaaattaaaataagatacataatgattttyttattatagaaataccaatacaatggaacttgttacaaagacatacaaagttttcatttttatggatgagaaatgatttytttagcccacttytcagccaaatttyttatctgtgtaatatgtagtcccrtatattcgctcagcaaaccagggagaggataggaaaatgtaagttctttaccacctggcttcttaggaaatagtttttagtttgagctaagttattttgagtcttgaccctaaaaacaacctttttggagaaagtattaggcrttatgaatcttttcccagttattagccgttggggagctcttcaggtctgcttccttctcatggttgtttctcaccagctatgttgaagcatccatctttttcctagacagagtaagactggttccttcctaaacaactttaatgaatataaaaaaaatcttaagtattcatgatctcccaattccatcttaagcaggaaactagaactatttatttcaagatttcagtggtacaaaagatttcaagttaaactgyacctcaaagagaggtattttgtgcttgaccaattatactcatktaaagctaaaatacaagaaatamaaatattaacttaaggctcttaataacttagaaatgaaatgtcaatgaaaatatgaagctgatatatttcaaaatgcccactttaaaatattccctccagtgtctctctgaatccatagttctagcttcaaaaaatttaaaggaaattggattacagtaaaacatttcacaaaatgcaagggtcttcaggtttctttctcattattattagataagatttacaayttttatcttttttgaaaatcaagtgttttaatattctattatttatagtttcctaatgataacttcttaacttggcatttgaaaggcatgtgccagtgaaataattttcacttatatttatagatttggtcttggatcgtccagagtgctaattacatataggaagtgtagtgcccagtctttcagcagcaattcattgtgctcctgagtgcaggatcggctgcctgccacttgcacagccaataacaaggatgaagttcagtgaaaggaaaatgacttttatttccaaagctaggagtggcaggcttactcctctagaaactgcttcagacttgaggctgggaagagggtcttaaaaatgggacttggactgggaggcatatgggaagggtgcctgagtataagatctgcatgtcttgttctggtggctgtatctagctgtagtctacctggagtgcggctgacatatcaayaatrgctgggttgctgactaactgccttgaggtagtctctgaagttttgcagctgggtctccatgcttgatctgtcacaagattagcccctggaacttcttagtaagcacatattagatccaagtatacagttacgtaaatgttcatggggtgaaggagtgcatagtgggaaaggggagtgaagtttcaaagcatgtttcaaggggatattttaagactaaggaaaaaggtttctacagtttgtttcaaggttacatcttgagactggaagaaaggacaaagaaaaacattttaaactgcgttttgaagctaaactactcaattacaattgggcatcattgtcacaattccacaggacaccataaggaatctggagataagacatgacttgtttgttctaagtttataggctaagtgcatgcctcatgactctaattctagtactctggaaggccaaagtgggaggattgcttgaggccaggagtttgagaccagcctgagccacatagcaagactcatctgtacaaaaaaaattttaaaattagccaggcatggtggcacacacgtataatcccagctacacaggaagctgaggcaggagaatcacttgtgcctaggagtttggggctgcagtgagctatgattgcaccactgtactccaccctgggggacagagcaagaccctgtctcaaaagaaaaaaaaagtttatagactaaaagatgcacacgtgtaattttaatacaagatagaaggtgttgaatgccagggcaacaggaagtctccatgtcattggaattcagaggaaataaaccacagaggtcaggacttgtaggggatggagggtagttagcatcagtcagaattcatacgggggtgaaatttcattttagagtaatgtcttcttagaactatcactaaacaattttagatctaattatatttaaagttttgcacaggtgcactttgatgtaattacatcagtcttaaaaagtctgttgctccttggttttaggcctattcttttcttgctagagaatgcaatcacaggccgggtatggtggctcacrcctgtaatctcagcactttgggaggcctaggtgggtggattatgaggtcgagagattgagaccattctggccaacatggtgaaaccccgtctctactaaaaacacaaaaattagccaggcgtggtggcatgcgcctatagtcccagctactcaggaggctaaggtaggagaatcacttgaacccgggaggtggaggttgcaatttgctgagatcgcrccactgcactccagcctgggcaacagaatgagactccatctcaaaaaaaaaaaragagagagaatgcaatcactaatgaaatttctaagagaagtttctgagacatttatttttataactcagaagaaactttaaagattagtatatcagtcgatagcccgtgataatttttagtttggtgctgttttataytttcattgaaagaattttagactatgtttaatattattgcttattaataaatccagyattaccctctccctttcttagttatggtcaatttacatatattttatctaggcaaagtattttatcaaatatttttctgatcttttcaggtaacatcaaaggagcaactatagtagatgccctggatacactttttattatggaaatgaaacatgaatttgaagaagcaaaatcatgggttgaagaaaatttagattttaatgtggtaagttaaataagaatttctaattcagtccttaaatttcagttaacatggataaattctgtagtgggccctattattgtattataatgtaccctaacaaaaatattgcaactttagrtastacaaatactattatcttatactatattcttaaattgtcctcactacacaaatgtgtgtctttgttttttggcaaatkaagagtaagagaaaagaarttagtatttattgagacctacatgtgcctagtattcttgttcagtcccactgcaactctatgagatgggcattaatttcacacctttgtatattaaacatcttaacctcagaggcttactccagattgcacagctggttgtgtgtcaagagctgtgattctgatgtaggtccatggggctccagtgcttatgcttttacactgtgtcatggtgtatccagcagtagcagcagcattcattttcccgtaaagaaagmttcaaattttgtggatcttattcatctctcagtaaaaataaattgattatatatgtgatatattttttaaattctgtatgctatcattcttagcaaatatttcatggcccattgtatactgagggaaagaatcagaattaaggatagtgaatacttctaatacttcttgataattttgactggggaggactacgtcttatcagctctaatttgatagtcattgttttactttataatgatattgacaaagaacttatactaagaraagaaagcatgtaggccatggaagtttttagtcgttcacttcagtgtgtgttatcrgtattatttctaatctgagactactttgcagaaattctcgtaaagtctcttgtctttcgggtaagcatttgatagtttctgtaaatcccagtcaccacgcacaagtaacatsctgtrtgttgmaagtggacaaagagaatttccctgctgttgcctctgctttgtggcactcttgttctctcagagaccaaatgaggacaccagtgttaggtagaatattaaggatcagtaaagctaagtctttcccycatctatttcaattaaaaacttatataaattaaaagtttaatattttgtttctactcccctaattaattgctatatataccgcatttgggagacctaaaagacaggcagatgagtctgtgtttaatttgcctaataattgaatctagaatataaaggagagaatattccgatcaatattaagggaccttggggatcaatgtgttaaacccttctattttaaacatgagagagcaggcataaggagctagtgatttgctcaaggttatggagctatttgattagaatgacctgtggtagtgctgatattgatagagctaaatatgaaaaattaaagcactggaaaaaaacggtttcattttggaggcttgctttcttaataatacttctgtggrccgggcgtggtggctcacacctgtaatcccagcactttgggaggtcgaggcagttggatcacgatgtcaggagtttgagaccagcctggccaacatggtgaaaccccgtctctactaaaaatacaaaaaatagccaggcatggtggtgtgtgcctgtaatcccagctactcaggaggctgaggcaggaggatcgcttgaacccaggaggcggatgttgcagtgagccgtgattgcaccactgcactccagcctgggcagtagagcaagacgccgtctcaaaaaaaaaaaacaaaaacaaaacaaaacaaaaaaacttcagttctaccttcttattaaaatcagctcctaccttcaaaaacctgcaggcttttctttagctatgtatgaaaccgactgatatctgtcttttcaagaaagggtaggggaataataactaaattcctctgaaacactaatgatggaaaactggaaagcatactttagtaacacttgacttatgaatagtgtccaagtttcttactgaatcttgggttggtccatctggtaattgtagcattgttgccccaaacctcctcaaatataatagcggtttttttcttttcacgacctgtgcaacctgtggtagtctgaggagctctggacttggggccagaggttggggttggtggaggatgaggagcagttttatttaaaatgactaagtgcaaaggtaacagacaagatgttactgtaacagaaggcagttggctgtcctcagaccaccacaggatgccttgaatgtgttccatgggtcctggagacttgggagaaggaaagatgaatttagtaggggatatcagactatgtagaagagaagaatttactgggcttccttacttgtaaggtgaaaggattagactaacattgagttattgctaagatactgaactttgaagttttckttatttaaatttttattttagtttttaataaaattttactcaattagtatgcagacttttgcatatatattttaggcctgttaatgatagttttgggttatacctttcaagatataattttaaaatatatacaactgttatgtattcataaaaattaaatatacatatttcaaaaaattacagccatatttctcaaatgtctttattatactattttcttaatataagaggtcttgaaaaatatttgttgcaggtctctttgggtattaccatgttttccttttaaaaaatatgttgtcaacaatatccaaacaataatgtttcccatattaaaaatagtaacatacaaattctggagaggtatattgacttacttttctaatcattacattgtgaagttttccagcttactgtattctagttggttttaatatgtcacattagaatttgtcttatattcacccattctatccagaaatccaaatgattatttttaaaattacaggatttttcttcaaaaaacattgagaaatttttctcatttatatgaagaaaggagaaattgaaaaagccttagcaaaaaaaaaagaaaaattatactaaataacatgtagtatcattctagcttataaatattattacttatattttagttaacactttttcctgataaggtattctaattgacagtgtaagggtattatttaaaaagttggccaggcgcagtggctcactcctgtaatcccagcattttgggaggccgaggcgggtggatcatgaggtcaggagattaagaccatcctggctaacatggcgaaaccccrtctctactgaaaatacaaaaaatttcccaggcatggtggcacacgcctgtagtcccagctacttggggggctgaggcaggagaatagcttgaacctgggaggcaggggttgcagtgagctgagattgcaccactgcactccagcttgggcaacagagtgagactcagactcaaaaaaaaaaaaaaagaaaagttaatgcatctaaatttattgcaaagggaaaataaaaatgaaacaaacattattgttgagagtttgtttatcctatggtgctcctaagtataaacaaattttacactcaagaataaatttgttaatgtgaaatatccaatttatatcactgaaaagtataaaataaatgttttgtattggtttatactgtaattaactaaaactcatttccttttcattagggcataggaagtcgattcattttgcatacttggtagcacaaagttcaaatgactttaatatctggcttaaaataagttgggataatatgttctggggagtaaggaacaaggacttcacagaaggagcttgtattcagttcaagtatctgtagaggcacatagatattagcagaaaaccctaagtattgactccatgaatgcattttctaattttaactcaaagtaatcttaggacaaaggatctaaaactgattcttggttagtcactcttcattcactcatgtgttatttactaagtatcttctaaggatcaggcatttacccttatggagcatttagtctagcaggaaaagtagtcagagaaccctagctaagccaggctatctcaggagggaagaaatgaaaagaggtcaactactatttggccaggcgtggtggctcacacctgtaatcccaacactttgggaggcccaggctggtggatttcttgaacccagaagttcaagagcagcctgggcaacagagtaaaaccctccccaccgccgccatctctatttaaaaaacaaaacaaaamaaaaaaactccagcctgggcgacagagcgagactccatctcaaaaaaaaaaaaaaaaaaaaaaggaaactatttagtaatatgtgatacataccaagtattatgataggtgatttttttcatgggtgtatcgtgtttaatctttgtgacaagcatacagagtagtaactggtatttttccctatatttatagatgaataggtggttaattaggctgtcccaaattatgcagcaagatctctggtttgaacacagtctgcctaactcaatgaccttgtgtttttttaattggagaagaaatgcaaagagttgagaaatatatacgcagtcagagaatttgagtcctctgaggttaggcatgtcatcttaatattagattactaattagagtttattgttcaatagtgatttgataaatatttgttaaatgaatgagaagttaagccatcttatcctacttcctgacagtctgtgctatactcagctggaagaaaagctcaggtgcaagggtagctgtattgtgtcatctgtttatatagttacagatgatctggagttcaagtcacttggtctacctgttattacctaacctatttccagaacagatttgtagtggcccctgataacaggaagatcagttgcataagaacaaatgatcaagggtttcctatttgggcatttctaatttcaattgkgttcttttactggcacttaaaacattattggttacctagaacctcacatgagaaatattgaaaactatcttctgtaatgaattttatggaatatgtagaatttttctccagataacaatttcttrtattaaccctctgtaaaagctaaagctgtgttaaaattttccttaaagctgtatttctggactgcagtaaagcgatatctcagtatgagaggcagagccttgagaatggcaaaggatagatgatcagcctgctgtggacactaactagcaacaccctgtaattgtgatctttggcaagcatctggatcatgcctttagttgtaatgaacactttgtgttttggagaacagaagttctggtggcaacagtgactttttttttttctttaatgttaagatccagattgtttgcatacccagttggaatgccctcctacttttcaagaaagtaagttgtagggttccctgtcaggaggatatatgttgacttcaagaagcaactttggatcttctcaaatgcatgactgagtactggcttaggtccagagttccatgccatagagtatgaaagaagttacttttgccttagtgttgctcctgagaaaggtctgttttagagccacattacatcctgatgggcgcagataactaagttaattatcctgttaaatgaagttattgagtgtgttccatctgaatgctagggaatacctaccaagagtgatgatttgggttttggttttcagaggatactgtgctgttctctctgatggtaattaggactgctgcttgagagcctctggacctgcatggtaaaaccagtctattaacatagagaagagaggtatttgcatatctttgtggcccacagaacttggactttgttagcagtcttaagagatttgtcacgttgcttaaataggaaaccaaaggctgccaggacacactgtgacagactgacttacactgtgaaatattgcaatttaatcgtttaaaggagttgtatacttttaatcctcaaagtgttaatccagcacacactttgaagtatcatttataaataaaggtgtatgctaagcctaaacataggcaaggcttattggtagttaccagtctttaatcaatggttttgaaaagtctcatgttgcttctaacaaagccattgattaaagtatcgttatcatgtgttagtaatggagcagttgttatttacattggattttggtgaaacagttaatattaaacagaaatattgcattggtatgtagtgggcagttattaaagcttgcttgattctcatgtatgataatagtcccgtaccccaggctcataattcactaagtagaaagctgatacagagtttggaggaatagctagcaaaagagtagtctctgattgtagagatcggagaattgtccttttaaaaacaaaaactattacacttttagttcactctgaaaatcaaacactcagaatagaatttaaatatgtctgataagttcttttccaagaaatatttttccatttaatgcaatcaatcagatctgtcatgctgtatggaatcataagataataaggagaattctaatataagtgtgactctaaataaacatcataaggcttgaagatccaaagaaacaatttattatctgttcctcraaagcttgcatctcgatatagctcctcaagcaaaaggaaactggctgaatctgctccaaaactaaaatttgttattttcattgtcaagcctgttatttcacttagtgaaatctattaaaatacgtcatcgtatagctaattttggtgaataagttgcctataaaaatatcaaatttyagagttgtttaaagtgctgtcttgtctagtgtgaagaggttggtctttcaggtactcatttggaaacagattttgacgtgttcattttctctgttgcctagatggggttagatacttcctgtccatgatctcatggtatgttggtttagaaraagcctttctktgcagagagatggagcatgatgttaggattgaaggagggaagcatacaaaataatttatatattagactctctttttcatgttagcagtctttgtcactttatctcgtaaatttacatacatgtatagtaaatgagtagacaaaaacatatggaaaagggatagatctaaggtggaagttatcaatctcaaacacccaagacaataatagagattagtactgaggcataattttttcatgatttgtaatactcatctcttgattttaggtgtaaatttaggcataccatgtattttattcaatttatatgaattcaatttagatgaatctggttyagtgtgttctttgattaagtggtcattgctataagtaaatcaaaatgaaagaacaatttctccaattctgatttttttattggttggtcttaaccaaaaacttccaatctcctcttgcttatcagttgacattaactaataggtacatggaatttaaataaaagacgggatgtacttcttaaactgccactgatgtaagactgtgtactagaagccactgaatacatggggcatactggaatgcaatcctaaagatttaaaagggaagttacttttattttaaaacaaactcagataggtagactgcaaaattcacattaattgttaggataaatctcacaagatttagtgttacaggctgctttgtctgcctactgtcttccccctgctgcaaataccccctctgtcattagggtaagtcggtagaaaacttttagaacattatgactattaataagaatgtattcatttaaatttattatttaatggaaattagaatcagaagtttataaaaatggcctgagaccctcatttgtagaaattcacttttgaaaatccagatttcatacaaaatatatcaagccccaaaggaagttggtcaacttctatatttcaaaagaggatttttaagcccttgagaaataagacctcatatgggccaaagaagatgagtatttatgattctaaagtttctgattttccagtgaccctgggaaggtaggttttagttcgtttaggctgagctgcacagtggtagtggcaacagctgtctattgagtgtctgwtgagtgcgttaccagctattgtgtacattgctttacatcatggaggaattcattgtccctttctacgtatgacaaaaccaagactcagaataaattagttatctgggacctcaaactcagatggcttccaaatcagccttcaatcccaggtctttctgatttctgcaggatagccaaccaatttggtgtggtgggagaatttttatcttcttagtccttttcatctaygaatctataaagagttaactaaagggtctaaatttcaatcttttggcctaaaaacataatacaacctagaatactgaaagagacctcaaattaaggtttctaaattatttaaacttaactttgaaaaggagagagaaagaattatatgttggaaattcgaatgtggttctggttttcaaacagagaagatggtgacttgagaactagtgatggtggtggtgtgatgttccagagcaagatttattaaagacaaggacatagcagtcactggtatccttcatggattaactaacaaaccagatttgcttcttaaacaggctcactggacagactattagatccatgaaatccaaagccatagcaagtgaccttgagtatggcaccttgcagggtcatttctcaatatcgtacagtacaagataaatagaatttaggttttagaatatgtaattggatcaataactggttgaataactgcrtccaacagttgattgatgtctagctgaagatatatttctggcagtgtttgacatgactcagaccttcaccttggaataatttttatcggatgtctacataaaggtcttgattatccaaaattttcacggcaggaagagaaaatgcattatgtcaagaacctatagccagaataagaatataagatcatcttaacagtcttcaataggcagaaatgtgggaaactgttaccaggtttaaaaactgaaaaacacaagtactaattgagaggaatatgatttgagggtttaagtttattmgattttattattagatattattactcttaaacatrggaaacgtagtcacgtgaaccaaactaamtacatggrttagcttcgcttttccttatcagtaattttgtagaatattaaagcctttgccaatatttatgtaaaattcattcagagtgatagacctcaaagttaaattacacctatatatagtacttttaatcagattatatcaggtgcacattacaaattataaaatacagttaaacacaccagtcttattttgtgatgtttttgcctaactttgacttagtaattctgtctcctaacttgttttcataattgtccttttataggaatttttttgaatttttttaacttaagcaattacttgactttaattgttagattcttaaacctttttacagagagcatgtaaggataaaattaatacatacctccttttttttctggaaatattttatcccactaaaatgtagactcaagtgagcttgaggaccttatcagtccttattgccatttccctatcacctaggacagggtctggcacatagtagttgcttaataaatgcttgttaaaggaaataatatcccatgattttgactaagtttatttgccagatattgactccatatattataaattgctgtgagtcccatgattattagtgaatggtttgatgttaggcaaaagtgcagtaggcccaatgaacatgaaaagaagctaactaaagcttgaaatgtgctttataatctaaatagtaggttagctattctaacttacctagtaacagaatgtaagacagatctatttactaatcaagtataaaatattagcagtaattactaattatatgaccatgaataaagagacttggtgcattatcctgtgaggtatatagaagtcagaatagcagagccctgaatcaggagccacagtactcaagttcaaatcctgcttctaccaattattagttgtctgaacttcaaaaagtcacattaaccactataagtctcagcttcaacattttaaaatggatataagaatagtaattaattcataaggtcattgtgaggactaaaagagtctatataaagacattagcacaggacctggcacgttgtaaataataaaagcaagctattattggtgtaaataagggctatttcagcatggtataacatacatgattattatcatgtcctttatgcgaagatgaaatatcttctcagagatgagaagaacaatcccaagccaaaggcaaaaagttggaaaccagcactagaacccaggtcctcagacttcaaatcctatttgcagtccagttgtgcatcatgatgaaaagattcctagactaatgttgaagtaccagcctaagtataggctgaatagcctttcaggaagaaaaagcagacaaatgaataaaataaaggagaatgcagagcagaaaaaaaaaatgccctggccccattatgtttacacaaatagagaatatcaaatattgtatctgctgttgaagagagaggaaagaactttatttgacaaatatttttgtaattttgtttaggagtcaaaattatttttatctcttgcattagtccgttttcacactgctgataaagacatacctgagactgggaagaaaaagaggtttaatggatttaacagtttcacatggctggggaggcctcacaatcatggcggaaggctaggagcaagtcataacttacatggatggcaacaggcaaagagagaaagagcttgtgcagggaaactccctttttaaaaccatcagatcttgtgagacttattcactatcacaagaacagcacaggaaagacccctccccatgattcagttatctcccaccgggtccatcccacaacatgtgtgaattatgtgagctacaagatgagatttgggtggggacacagagacaaaccgtatcatttattttaagtatgttttttcctttatttttaaaaattgtcatataatgattgtacgtattttgggggtccgttagtgatgtttcgatacgtataatgcacagtgatatttaataccttaattttaaaagggagaacatttccccctgtatataaacttctctgggcaagcataagatttgaacaaaatttaagtatttagtataatttawcacaataatggttttctgaattgtgtactatcatcatgtttgaattttttttttccatagaatgctgaaatttctgtctttgaagtaaatatacgctttgttggtggactactctcagcctactatctgtctggagaagaggtaagatgaaaagtggtatataaatgtgaattataaagtgtcttaaactacatttttggtaaaatatgccaytcgtgacatatatttagaaggaatctatggaatttttatatttcaatgaagctgtagcttacactgartttcttacaatatgtactaatgaaatgagcaagctgggaaagtttggsagaacatattgtcagggaatgttaagtaatgcctttagaaactggctctattatgttatgtatggtgtgattatagctacaaattatatgtgcctatggacaaattaaagaagtttagtgtagtggcrggcttgtggatgaatttttttctttgagaattattttaatgttaatacaaataaaaacttttttaaatgaataaagcctggcaagtaagatataaaaattgtagtttttatgtaattaagggggtgagacacttagctaccaagtaaacagtcctaaaggccagcatccctgtatcaagtgctttggagctcttcctgagtcaaggcttcattaattatccactgcttggagcaaagcaggaattttaaatttagctgccttttattgatagattaagaaaggatttttgtatcatcctcataaaggtcactgatgctattttcttgaaaggttttggacaactttatgaatatcgtttgagtgtccactaagggttgttggaatgggcctcatctttaatgttgacagtgttaaatgttgacattatggaaaaactgtcacatatttcagttgcacgtcagtcagatttgagttagcctcagcattccggctggggaaagagtagatcttacccaaaccagtatttcatgtattgctatgctccttcaaacagatttaagcacagcaataaatgtttaatgagaaaagctgcttgactttgttcctgtctctcaagtactttcttaaccaaaacatacaaccttcacaatcttacatttcctctctgtttagattttattctaccttagatcttttcaaagtatatagatgacttctgtattcatctatatctctcctgttttagtgttaaatgttgttcattgtgaactctgttaccttctcagccagggtaatgtgatcccctggtctgttatgcctcttcctcccttttttctgtttttccactaccagataacttcatgtgttcagttcagtttagggtatactaaggattaagccaaaaccaaaaaaccctaaaaccctatatttttaaaaagttatgtttaaaattaactaatgttattttagttaacaggtttctgcttttagaatacttgtctttgagtatccaatgccaggatgttctcattgctttggacataatatgctaagatgaccttggttttaactttttccataatctatgtggaggtgagacaatttggaggaaataaggattgcatccttttgtgtctgggctcaattaggataataaagcatacaaagaaaaacacatatgtatctattctaaatatacatcatgtttgattaggatacgttttcactcagtgttttaagtttacatacatatatgtgtttctatatatgtgtatacttgatatgtatatatatatataattataatacccacagatattatagtttgcctatagataaaataatttgcctaagactttgtaaggatattttttaattctgtatagtgaactttagtaaacaaatggctacaaagaacacttccattgcaaataactattctttcagtctgttttgccattatcactacacaaacatgtttttattacatgtaggttttctgtattttaaattttatgataaaaatttaagattttttcttttatttttctatctgtagagtgctttagttatagggacccatattcttagcatgttttttcttatagtttccagaatgttgaacagttagattattttcagtatctttttattttgaataatattgctataatcaatgaatatttattctctgaagtggtgttggcaagtgagaagtgattaatactggattgttttaacatcatcacttgcctatttctcccagttacttagaccctgacaattgattttcatttgatgaatgcattcaggggaattggccattaggaatgtgatccggaaaattttttaccccaggtctgttcttgagctatttgtattcatatcaaaatttttttaaatgagcattcatttaatagaacaccaacatagcaaattatgaataagttggttttaaatagttgataaagttttataccacacactttttacatagatcagacaatttactaaggtgtctaggacaatttgtctttctatgtatctcatagagggacttttaaaccaccataatttaacattctgatttcatcactgaggctcaggagtattttaagaacaaatcaccatcagaagtagatagaccccacattgatatcagctcaagattgttaaatttgtatgcaaaagcaggagaagaagtactrctgatttgtgatatgtgtttcaggaaagttacagttagaaacactggacaatagttaagaatcccagcagaagtctaagctaccaaaaaaataatagaaacatgaagtacctgtagtaaactttgattacaggcacatattcaaaaatttgaaacctcgtagctcagttaaaatattttgtagcaccataaaaaagtcaagcatcagtattttcaaatgctatataagaagctcaaccacaagaattacaaacagataggatggggataagatgaatattaaataggaagaatcagtattaaaaataaatttaaaaggtagcactgctctattataagctggaagggagctaaaattctcactggagatagtaaatatagcagcatctagaatatgattacccaaaatatgttctaaagaccactagtttcttttgatatggcaggataaatctgtatctgtatacatactaaaaataagtttgggaagagctacatcctgtattctttcttggaaattcagaatgcacaaaaaaagaagtgaattaacttttatttatccttgcattttccacacttacttaacaatagccttcctctattaaaaaaaaaagtgacatctgttaacagtaaattagaattatttttcagaacaaattttggaaatactactacagaataagagtaaagcaaagatgatattgaaattgacaagtgcaaaacgtgtaaaatatgacattgcaagagaagatgacacatgtagaaaagaatttatgtgactataccatgtaacattatttgttttacaacagaaaccaatagctatattgagcagaaagtgaatgtaataggacatagaaatgttacagaatcagagagagggctgaagagcaacttggaacaaaaagtgtcaagttggcataggggatctctatagctgtactatcaccttgggacaccctgcaattagtaacatggactatttcttccacccttctgttactctactcaagacacaaagtccctgaagaaagaggctaattgtcagagtttcagttacatgcagcctctttggggatcttggagaatgaaaaaggatatgctagaagtcttcctcaaagtttggattcatatcccgtgaagactgagtagtataaggaagtatagatarttcctgaacaggaaatcgaggccctgtgagaagagtagggagataggacgtgtaggagccaacaataagatttcgcccactatggtgaatataaatatggcagagaaaatagacaaaccacatggaaactgacagttgaataagatacctgaaaaaatgtaatctgatttgcaaaaatattttgtaagctaagagacgacatttagaatagaccagagtttttaatcctcaaagaaaatattctgccagtacattttaactttgtaaaatagaaaaacagtagccaactcctggaagccaaaatgattaagaactagctttcaaagaaaaaagatgcggaagacatcttatccaagactggtaaaagacacagaatggatttttacagtagatgagtttactatgataacctctcattttgaaggcagcaaaaggatttttcttcagattccccctaaaagttatccactgctgcaaacaccagtatgaaatactgctgaaagagatttactcaataaatataatactgccaaattttaagactaacaaggaggaaacacagaggggagtaggattgtggagtagggaggagagagagaagattaagaatgtcagttaactggtgggaagatgtagttgttttttcataatagggttaagacattcggagtatttgggggttagaaattgattttttagagtttgtttagttatggataatcgtaaaaatgtttagaaattctctagaaaattaggatatatgactggttacctttcaaactcaatgtctgccacaattcattagaaagtgagtcatctcccagactacccatctgtctcctgcctgattctgcaaaaaaatcagagtgccagaaaatgtgtatgattcaaacagagctgtggaaaaacagagaataaagttagggcatattaaagtttcagataaggttagcacatagcagtgtattctgccagtttgtaaatcatctgggctttggatggaaatgtatcttccggtttcctagtgaccagagcaaagaatggaagagcattaacagcaatctggttttgctatttttatgaatacaaaaaatttgataccataaaataacccacatatattgcttatattgaattttccataaaaggtagaaatatgtggtataaacaagaaaaatccaacaatacatttggatscaccagaaatacattagcaccctcccaaatcctgcctaaatactaaattataaaaattgagctcacatttatcctgctttcttatatatggaaagaactttaattatgatctctaattaggtagatttaaatccagaaagtagagatatcaacaaaaggcctaattggaaaaaaaaaaaaagaattgaaaacagtgatcacaataccttaaaataaaaatatatgttaatcccatacagtgaagaaataacagctatgcaatatagttaaaaggaagaattgaaatagtgatacagtgaaattaaaaatcaggtaatcgatatagttcggatgtgtgtcccctccaaatctcatattgaaatgtgatccccaatgttaaagatggggtctcatgagagatgtttgggtcatggggccagatcccttatgaatggcttggtgccttcctccagggtaatgagtgagttctcactctattagttacagcaaggtctggttgttaaaaagaatctggccggacatggtggctcatgcctgtaatcccaacacttggggagactgagggagggggatcacttgagcctcaggaatttgagacaagtccaggcaataaaagccagattctgtctctactttaaaaaaaaaaaaaaaagtctgctacctcctttcccttcccctgtctctcctgctccccctctggccatgtgtgacacctgctccctcttcaccttctgccatgattgtaagtttcctgagggccccaccagaagcagatgctggtattatgctgcttctatcatctgcagaaccatgagccaaaataaacctcttttctttataaattacccagcctcaggtattcctttatagygacacaaaacagactaatatagtaattaaattctttacaatatttttcatatgctgtagacaatgaaaattttaggaaaatatgtacatcatacctccaatcaaaatataacattagaaatgtacacatatttaaaatggtaaaactacttgaaaatttaaaaatctctcaaataactagatcaaggaatgagtatacaatattagacaacttaacaactacagtataagcatcacattaaatttgttggaaagcagccagagttatacttaaaaaaatacataattccaaaggtctgcattaagaaaaaataaatatgtggttaagtctatatttcaktaatttaggggaaaaaaaacaaaaagacgtaacaaaaataagaatataaatagattgcaaaatgaaagaaaagctgataaagctttctctgccccttctcaacagcgtccttattgagacagtcttctgggaaagaccttgagagcagtaagaaccatgtttttcacttattaagagacagaaagttttgatgaccgtgagtttgagtggccccctcagcaggaagacccttctaggcatgtttttatatagtgtcctcacctgtacagagtggcacatggaaatggtgcttatcagattgggcggtgattgggaaaaaaccgtgagagatgtgctccagatcacaatcactatttggaagaaatcaagtatcycttcagcagatattggatgagtgccaactatatgtcagacactgctcatggcctcgagatatgcctgagataaaatagcccccaatccctggccttgtggagcttacattttagtgattaaatgtagctcataaaccaaaactggaaaacttgatgagacctgtaagaaaaaaagttgatgttctggttggtcggttttgttattggaatgacaggccagtacacagggagaaaaccgacagtaatgttcatccaactgaccttcgtactgccagcgtctcccctcttcagtctcttccccactgtggcactaaggaaagttgtcatcactccacacagtcttcttgcaaaccaccactggtccrtgtggccttaaaagttgagtcgttttgatttggcctacaaagcctttgtaattcagcctcagcctaccttttctggtttccttcataacagtcctcatggaccttccactgtataacagaccctttttcttccaaaaaacgcaccaagcccatctgtgtgcttcttaaatctgcattccttctacctagaatgtctttcaccctgctccttccacccaccaagatagatacagcccctccgaggccttccctggctgcacaacactaagacaccccctccccaccttcacttccttttctgcattctctgcatacgatattattatagttcattgtttatggctctgtgagccctctcacctactcactcccttttccccagtaggatttgtacaactcaaaaatgacgtttctgctgttttcatatcctcatgcttaacactgtatgcctggcactagaaaacatttagtaaatgtttagtcatttagtcattgactaaaactcttcaacaggttttctgagacctttactttttaaaactgcaacagaaaattcttccagtgacttttaaagtaaaatctgtacatggataatataaataagcaactagcctggaaggcttggggtaggagatgagaaggagaaaatgtaatgtagtaaggtgatggacaatatgcatgatctctaaccacaaatagcctctgtggctccaccttcaacccccaccccagctagcaaaacatcatcctttttatctgttctgtacatcctgattctctgaaaaagaaagttttgaaaatcagctggagactatttgtagattatatcattactaaatacagtaggtcatttattgtagacctttaaaatagatttaacatagagcattctgaaattataaacctaagaagaaattataagaagtaaatgtgaaagtgattctacaaggtacatatatggtccttaatttgaggaaactaactaaaacttaatgacacatttatgccaatttcctagaaaggaacaattttaattatatttatcaggtgatactgattgttatattaatgtaaytatataattatgtaattgttgtatattaatatgtttggccctttgatttcttagaggtttagatttagccttacatatattttaaatgttaatttactatttggcattattgaaatttttataagaaaggaatgtaaaatactgaatagctaatattttcatttaaaagtttaattcagtaaaacagagaattgtaattttgcttattatgtttataattaaatttccatggttaatgagttatagctgttacacattgactattccattatgattggtaaatttaatttgtactttaaaaggaatataggagtgtacagagttgattcaaaaacaacacatactttagtcaaaagaaattactgctttttcttgtcctagagtgaattacagaaatcatacctaccccttaactcagatctgttctgtttgtccctctgcataagccctatcttgtactgataattgtttttgaaagcatagttttataagctgtaaaaattttatctccacaattcatgagcacatttctacatttcactagtaatcccagccctgaaacttatttatacttaatgtgtaaatggtagaagctggcctagcccttgatctcattgccaagtgagtgcttgaaacctaacggaaagggaaagtcagaaaattcagttgttttgttttgttttgttttgtttgttttctgagacggagtcttgctctgccgcccaggctggagtgcagtggtgcgatcttggctcacttcactgcatactcctcctctcaggttcaagcaattctcctgcctcagcctcccgagtagctgggattacagactcccgccaccatgcccggctaatttttttttttgtatttttagtagagatggggtttcaccatgttggccaggctggtctcttatctcttgacctcatgatccacccaccttggcctctcaaagtgctgggattagaggtatgagccaccgcacctggccaaattcagttgttttttaacgaaatatttttatcccttttagtttagcatagttccctacacatagcagcaaactacaaattcacatcagtgagaaatagacctgtgttatcattcagcaacagcctgaaatctcagtggattaagacagcatgttctaccttgactctgcttctcatcatccttccttcagagtccaacctgctggggcagctgccatctaggtcatttctagttgtcatggggaagagggagtggtggcaaaagagattctggcaaatcccacactggcttttaatgcacttgtctgaaagacccatgttacttcagcttacatgtcattggccagagcaagtcatagggccactacaacttaaaggggtgaagaggtggtgatgaacagcattcatgaccaccacagcgaccactgacttgggttagactgtgtagccctcttaactgcccagagtagcagaagataagaattactgagaagataactttgtcaagagtccccaaactggagccagccagtctcactggaaaaacccttcaataaagtggcaccaaagtagggtgacgagtgtgacttgggatatgaatcttcactaacacacatcttcactaaattttcaagtaaaaagcacttgtttacaaagtttcccctctcctgaaaataccttctactctgtaggcttctccccggccttccagatttgaaacagtaaagttgacagacagacatatactgccctctataccaccactgctgttgtctgtggtgggagccagttgctgtttggcagcggcctgccgtgttgcctggatgttaaagacctggtgcttttccttccaccactttttctttgatttcagtgctcactaggtcagtcacttctcatttttcaaaagcctaatgaaagagatgaggtaatatgttctattttgatttatattgaatcactttataattcataatgactgttgaaaccaatacttcaaatcatttttattgcctgagtcatattgacatggatttctaacacagatttttgcctgtgagtgaatgtttttcaacaaaagttatttttttcaggaatgttcttgcaaattatttttctttcaaattgtgatctcctttagaagggtatataagatagctgtagcaagaaatttaaaatttaatagggctagcagaaaatgcctcagaattgtgataatataccatctggtaatttcattcattaagtgaatcagcagatgcttattgaatacctgctttgaggcactgcagttggtgccgcagaaacaacagtgaataagagaaacacagtccccattgacaaatgttaattcaaatattaatttcacaacaaccctataaagtaggagtaggaactgtttttattctcattttatggaggaagaaacagaggcacagagtgttatttgcccaaggacatgcaaagtagcagagctaggcttcaaacttgggcattctggctcccagctactgagtagcagctagacattagagatctcaagcacagaagataagatattgataggcctgaacccatgagtcatcaacaactaaatgataattgaaagaatggacaggagtaagattgtccagggcattatacactgagaaaataggccttaatatttaagtgttgttgagaagaaagagctagaaaaggagactcagaagtcgtggtctgggaagtaggagggaaactagtagaatgtgacatcacagagtccaagagaaaatactattttgaaaacagatgttcagttctgtcaagtgctgctgctagaagttgtatatggactctctttagcatcttacaacatggaggtcatggatgactttatggagggtacttcagtagagtaataggatagaatccaaattgtttttgattgaagaagagaaggtggtaaggaaataaagattagttcaaggtctttaagcagttaggggaaggtggcattcacgaagacagatggcctttggggaggcatcctttgcaatatgagaaagcggaggagaaggtaggaatacaagtaggtaacttattagacttggtggcaaataaatgagatagttattctctggtggatcctgttaaatacaagacaaggatttctgctgagactcgggaagaggagagatgtttgatgtgaacgtgtacattttaaaattgtcattctaaagggttgagtacagaaacatggtagaggttctggacagtgtctaggctggtagccatgaatttatggtagcctcaatccttataaaygtatgatgctttttccaacagtgttcggcactttaggtacaagcatggagaaggcagttagttggttttagttraggtttggtagccaggtaacacagagagaaaggcatggattttaaagtattggcagaatttattgaatgtatagaccatgcagtccaagatgaatataaggcagtaggaaaaaggcaggtgagtagtggttagagagaaaatggactgattgaattgcttgaggtttagctgaagtagcgtaggagtagtagccataatttaataggttattggaagcttttaaagttaaggctatatggtgggatgtatgaattaaaagagttttttttaatggagcagttttaagtgatgtcataatctaggataacatgagattgaatggttgaggggggattttgccagagtctatctgcatggctgtgttagtccattttgtattgctataaaagaatactgaggctgggtaatttataaagaagagagatttatttggctcacggttctgcagtctgtataagcaaggctccagcatctgcttggcttctcatgaagcctcaggaagctttccactcayggcagaaggcagtgggggagcaggcatgtgacatggtcagagaagggaccaagagagagaagggaggtgccatactctaaacaaccagatctcatgtgaacttgcagagcaagaactcattcatcaccaagggaacgccaccaagccattcatgagggatccacccccatgatccaaacacctcctactaggccccaccttccaacactggggggggcacatttcaagatgagattttgaggggacagatatctattatcactgacgatgcaacatatttcaattttaaaaataataagatgtaaaaattgctgtttaaaaaaaaactaagtaccggtgaagtgatctttaatactgctaaaatataaacactttctataaaattcataaatccatactaaaatatgtactgagtaaaggttgctgcttaaacaaaaagcagagggaaatattcatgcagaatgaagtttaaatatgtgattgttgaacaaacattatgactctagagccttaagaagtaagtcagataattagagttggcagtagaaatgtaaacaaaatgaatatcagctaattagctggattttaatgcaactatacctatacagagctgtttcttctaaactatactggaattttatctgcatagataaatgtagacagtttgattgtggtgctgtgaatttgttttggatttttgtcattggtttttgttttgttttgttttttcagaattgagggtctctctgtcactcaggctggagcacagtggcacgatcatagttcactgcatccttgaactcctgggctcaaggaatcctgcctcagctctctgaatagctgggactatatatgcacaccaccatgcctggctaattactttttatttatttatttatttatttatttatttatttttactttttttttttttttttttttttttgagatggagtcttgctctgtcrcccaggctggagtgcagttgtgcagtctcggctcactgcaagctccgcctcccaggttcatgccattctcccgcctcagcctcccgagtagctgggactacaggcgcccgccaccacgcccggctaatttgttgtattttttagtagagacgggttttccccgtgttaaccaggatggtctccatctcctgacctcgtgattcacccacctcggcctcccaaagtgccgggattacaggctactttttatttttttgtagagataaggcctcaccattttgcccacactggtcttgaactcctgacctaaagttaccctcctgcctctacctcccaaagtgctaggactataggtgtgagccactgcccctggcctggatttattctataaattaagtcttacctaatgtatgaaactatcatttgattcataaaaaaatttgtttttgttaaaaatttttatggtctgggaattaggtgccttctaaaggaagtcctctaaagatttcatttgccagactttcttgtgttatcactttatgatgtagatttatggtttatgtatttttttaagtttttttctttaaaacattttagaaaatagttcactgacagatcatagggttaaccattttaataataataacgaagtcacttctgctacatgatgaaatgttttcccaagagaggtcatatatctgagtatgccacaatttgtttgcatttgaaagcaaacagctccagtcttgtaatttagctgaaaattcatttaaattgataataaaataaacataagccttgagggcaatgtttgtttttaacttaacaattgatatttattttataataatttgaagtatccgattcctctgaagtagtacaaatagagattctaaggtccttcaaaaacaaggaaattccagagctttaataggataggcatagaacagaagaatttttttcgtggctcttyattctaaacacttttgtttttcattcttgacattaggtagaaggctagggttagaaaagataagcagaagagattgtcatcttagttttataaataccatttaggttgatgcatttacttgtgtaatcatattttatgttatttttagttattgacaaaacaatacccacagttgctctaatttataaattactgctaacttatgtgtttcagttcttaagtctaacttgatattatgattattaaatagtgacttccttagttttctctgatgtggttactatagtcaggtagaaagaacactgtataatacagtttaggtttagctattaaggcaaataactccagcatttatgagtttctgccgtctaatgctttataactaaacttggaataatactaatttagaattgagccctgaatractagttatagtagacttctctctatcatctggtcaggcttccaatttttaacatgtctagtcccttatgattcactcctttattcagcaaatgtgttaagcatctgttatgttccatgccatgttctagtctctggaggattcagcagtgaacaaattagacaaagtttctgctttcgtaagatttacatgataagggggtaaaatgttaaacaagttcacaggatmattttagatggcaataagagctctgaagaaaatacaatataaccatgtgataaagtgatggagggtgggaaagggagatgatgaggactactttaggccaaatcggagccacagtctgaataacatagaagggtcaaccatggaagatttggaggaaataacattctaaagagaggaacttaagagttctgtattgatggttcatttctttctttcctttggaatgaagaagaagagaaggagggcagcaatggtgataaaactttttttatggtttattgtgtgccaagtacacagtatcagtactggggtaattacgtcatctccatattgtagatacactgaagctctgagaagctaattccttagccatataggacatgacagaaatgggattacactctgctgtctgtagcaaagcacatgaccgtgtccacatattattcccaaaaccagtgttgccagggttggtaccacaacttttcttccttttctgtttacttgctyatcagttacatacctaaatctcataaaaatgaactagcagttgccgggcacagtggctcacgcctgtaatcccagcactttgggaggccaaggcgagcgaatcacctgaggtcaagagtttgagacgagcctggccaacatggtgaaaccccgtctctactaaaaataaaaaaattaggccgggcgcggtggctcacgcctgtaatcccagcactttgggaggccgaggcgggcggatcacgaggtcaggagatcaagaccatcccggctaaaacggtgaaaccccgtctctactaaaaatacaaaaaattagccgggcgtagtggcgggcgcctgtagtcccagctacttgggaggctgaggcaggagaatggcgtgaacccgggaggcggagcttgcagtgagccgagatcccgccactgcactccagcctgggcgacagagcgagactccgtctcaaaaaaaaaaaaaaaaaaaaaaaaaaaaaaaaaaaaaaaaaaaaaaattagctgggtatggtggtgcatgcctgcaatcccagctactcaggaggctgaggcaggagaattgcttgaacccgggaggcagaggttgcagtgagccaggatcatgccactgcactccagcctgggcaacagggtgagactctgtctcaaaaaaaaaaattgaactagcagcaaccttctagcccatgaaatcttccacttcttgggcaacaaagaataattaagttatgaaaactaaaccataatcacactcgtaatgcttatgagttaataatagatttttgcacaagttgtgtttgaaaacatttattcattgcacttaagtctttctcaaaacacaaagctgtccttgaatttttaatatagttcattaaattgaaaaaattctcattttctttcycatgtttttattcttcaatctctgactcttttcatcaatagagtaaaatggttttcattatccagtgagtacatataacaaaaactttcaatatatataaagacagccatgtgatttcagctttaatctctctttttattctgaactaaagtcagatacacttcaaaatgttggtaaaatgtatatattttggtgtgacattgtgacagttaaggtatacattcagccttttctcaggcatattgaaaatggtagtagttgaggtagttgagacactgaatgaggtagatgttcacgatttagaaaaaaatattattttcaattttcaaatcatatctgatataaatgaagggaaaaggtaataccttgtcatttcagatgaaactaaaatattttggctttatcaacagacataaattttgaaggcttaccaatacaattggtatgcttttatgtaattagagaactccaaaaagcacttagaaatagctcgtaaatctaccatatgttgacagcactttaatgaatttctctagactgtgaataaaaatttggactccagtgctctttatattttattcacttagaaaaagtaagacaggattgctcagatttattgtcatatatcataaaagtaactacaaaatatctactcattatagttaaagatttacagtgaacattttatagtatgttttctcttaattatgttaattgttcacaaatgagaacactcaaaaccagtgcttctaagattaaactaagattagatccagtggcctggcatctctcaggagtttttcatagggatccaacccatagtgaaatctcaggaggtcctctcaaataatggagtttaattattactcataaatgggcagttttccacactaacagatgttctcaatctcatgcaaccccactacttggtgttgcaattcccactacttttccttatccattcaatactttcccctgtgtccagatagttgctgaatcagcatttacccactttatgaatactcagaataaaataccaacacttagactcctctcccccaacctttttttcctatcaaattaacaaagacagaaaatcatgttaatacctagtttggtaagagtggggcaaaaatttactctcaggcattgctgttgggaatgtaatatgataaaagtgttctggaaaagaaaaaaaacaagtgctgtatatatgagtagatccttttagctccagttactcttatcctgcattggggaatctatccaaaggaaataatccaaaaatgtaattatattatgccagaagcaggtcttggaaatattttatatatttagtaaataagaagaaacatctcaaatattcagcagtaagggagtgcagcagatcatggaatgctcacataacagagtaatatgcagccattaaaatttatgcttgtttattcaagggcatgggcaagtatggatatggtaaataatgcaggatactttcatgtatgatatgatttcagctatggaaaatatagagaaaaatgatgtggagctatttctaaactataaacctaatattcctaaatatttgcttccggttggtatgtgatccttccctctgcctgtttttctgtactcatctgaatttccatactgaacttgtaatattcttttgatcagaaaatattaaaggaaaatcacaacagatttggaaaacaatcattaactaaatttctgccccagtcttactcaggattcagtttttccaacctctaaagatttaaatttttttaacttttcatactagaattcagcttataaagtcttgaaagtcacctttttccctttctgacatctgtttcataaagaaaatgacttagtggtaactggatttccttctttatagtcaatttatagatttccatcttagaaggttgtttatttacaacaacatctattagctgttaatattatcctcagttcacatggaaatggaggtgacataaagcttaaatgaagattggtcataaatccttgcacagtctcagatccaactactttgtctttatattatccaaagcagttcaaaaagacaaaggctgctgatagtaacaagatttctccgttgaaaacacacacacattcataaatcaatcgaaagtgtggtacaaaatagtatgtattttgtattctttaaaaaaaattgagcatttctaatctcttcattttccttaaccatttagaagtcaaaagttgaattatttgtgataagtgtataygctctattaatatattattgctatagataagcatataataaagtttatatttattactaacatacatggaaattttgggctactgagatacctggcacagtcagtgactttgtctattcctacaggatctaattgaaaggtgttaggaaaggcatagcaaagagcctttttcctgttgttacaagcagtaaatggcccttaagaaacttcaaaaagaatgaatgcttgcttgagaaagaagggagtaagagaaaagcttttcrgtaatgagcaggagaaaaaagaaaacctggtctgagagataaaagaggtgactattaaaacggaaggacacagtctaccagaaactcrtgaggctttacaaatcaaaatctagactcactttaccatggaaactgaagacaattagaaagtatatgtttacaattttgtaatattttactttatttttaattatccaaagcaaatataagactattcatgataggaattgatagtttggttatgactacaccgatattgaagccatgtgtaaatttgaaatacttaattttttaaagctgtttcatggaatctatagatgtgacaaaaagctaataatgtattctgtcactttacttccttgtcaccctaagactgtgtttctccttccagtaataggatacgagstacttgtctgagaacatgtaactggagtagacttttatgtagtgatctgaggcccttactagatctctttctttctaagggaaatcaccaaattttgagcctataggtaaatcatttgtaaaccgggggttggctgggcgtggtggctcatgcctgtaatcccagcattttgggaggccgaggcaggcagatcacctgaggtcaggagttggaaaccaggctggcaaacatggtgagaccctgtctctactaaaaatacaaaaaaaaaatagctrggtgtagtggtgcatgcctgtaaccccagctactcgggaggctgaggcaggagaattgcttgaacccaggaggcggaggttgcagtgagctgagatcacgccactgcactccagcctgggcaacagagtgagattctgcctcaaaaaaaaaaaaagatggggctacttgaaataatcattgtattggagacatccagctaatgaacttaagaagtagctcttatagggtggaaagaacattacctttagaatctagaattctggtttctcaggctctgtttggttattaggtattacctagagcaaaccctttatcacattgtttttttttaattgatttaagtaatggaatatgaaataaatgtcttttaagcattcctttaaatccatttttctagaactatgatacactaacattcaagttcacagaatattataaattaggggaggggtatagtgggataaatttccttcctgtaactcaaaacttcttaacccatttttgtatctaaacacaatgactccttccagtgaaatgtagagttgtgtttcttgccatacaatgcttaggtagtccagatatgtatacgtgggaatgaaaaagaagtagaaaagttgggcatctttttcccctggaaaaatattgtgttctatggaagagaaagtagttggtggatagtggaaagaagatgctaagaagtagagaagtcgttcaaggaaaacagtaaactgcaatattcacagaaacagttgggaatatgtactgattctttacttaggggatgaccatagttttaactcatttcttaccccaaattcgcagattgcattctattgtattataaatagatctctcattttaatgaccaactcaagggatattctggcagccgtggtgagaatgagaaacaaagatttttatacccagcaaaactgactttcaggtgtaaatgacacaagcgggctattgtcagcatgcaagaacttgggaatattgtttccaggaccctttcctgatgaatatacctgggaacaaacttcagacmaccaaataaatactgtatgatgtccaaaataggcatattcatagagacagaaagtagatcagtggttgcctaggacaagaggggttggagggaaatggggagtgactgctgatgcacacagcacttcttttttgagatgatgataatgttctaaaattgtgaatcaactcagtgtgagtatactaaagccactaaagtgtatactttaaatgggtgaattgtatgatatgttaaaaagaaaaacactatagttctgagttttaattgaaaatattaatatgagcatatgatatattgtattttaaatatacataaatatgcatatatatgtatgtcccctgaaaagacctagaaacagtatgaaaccagtagctatgagcatctctaacacacagagtgcgggcttgaattaatattttccactaaccagggcttcttggagaagagactgaaattggaaatgtacaagatkagtctgaaatatcaaaccaggtaacaaagaagctaacaaagactgctagagtaaggtcaaaggactcaggagccaactggaagaggcttccattggccaaaaatgagaattttgagtttcagtaaaaataagaactataatagattaaaatccactaagtacgtttaaattgataagttcaagccatgggcagtgaagcatgcatgtaatcacagctacttgagaggctgaggcaggaggatagcttgaacccaggagttcaaaaccagcctggacagcatagcaagaccctatctctaattaaaaataaaaatcaataaatggataagttcatcataatgaaaagcaaaaataattggtcaccttcaaagaatgacaggaaagcagttatcttgaaaactggtattttcccaggcagctgccaaagatggaggggcrggtcctggtgctcactggccaaggccaccttctggtctgcctgacagccgtcctggataggcaggtactgctgggccagaaggtggtggtcgtgcactgcaaaggcatcaacatttttggcactttccacagaaacaggttggagtacctggccttccttcacaagtagatgaacaccaacccttcctgaggccccccatctgcatcttttggcagaccgcttgaggcatgctgcttcgcaagaccaagcgaggccaggmcgtccctgaccaccccaaggtgtttaatgggatcccactgccctatgacaagaaaaagtggatgatgcttcctgctgctcccaaggttgtgtgtctgaagcctgtgagaaaatttgcctatctggggtgcctggttcacgagtttggctggaagtaccaggcagtgacagccacccaggagaagaggaagaaggccaatatctgctattggaagaaaagcagcttatgaggctatgtaaacaggcccaaaagaatgtggaggagaaaacaattacacagaggtcctcaagacctatggactcctggtttgagcccactaaagactgtttattccttatgattggcctggcctgcccttccaccgttgctgccgtggggtgtagaggacccaagggtggcaatccaggtgccacagacagcctggtacttaggaagctgggggtaaggaaacggcattattcaactgcctttctatattgttactttaaatgactctaagaattgttcaggcgtagtttgtctatggcctactcgttcatgagagagttgttttagaaaaatgagggccgggcacattggcttacacctgtaatccgagcactttgagaagccaagagatcgcttgagtccaggaatttgagaccatcctgggcaacattatgaaaccccatctctaacaaaaatgcagaaattagctaggcatggtggcacatgcctgtactcccagctacttgggaggctgaggtgggaaggtcacctaagcccgggaggtcaaggctgcagtgagccaaaattgcaccactacacttcaacctgggtgacagagtgagaccctgtctcaaaaaaaaaagtaaaacartagtaagaagagccagttaccttggtttcaagattagcaaaagggagctggaacatgcattggagggagccctaccttctgagtgggccatctgttttaacttcccaccttatcctatactctgcagctgtgataatgtggaaaaaaaaaacacttggggacagtatgagcttgctgttttacaaagagtatgtatagaagcatagactgggaagatgtgtgaccagggcgttacagggtagcccttgctccttccctgtattttgtggtccgaatcaaataaattgcttttaaagaagaagaagtctggtaaataaaggaaaagaatcaggcatttatcttgcccctcctgtatgaactatatcactggtaactaaatagtagataagcaatgtttctcttaaaattatacctgcttacaaatgaaagtgaaatgataaaagtagaaaatcaccatttttacaacycctgatgaattaatggatctggaccatggtcaccaacagctgcttgcttctcaaaaggagagcaaaccacatagtgcctcctgataacatatcacctatagtcttgccaaaggcatcaagtctccacatccagcttccaatttgtcataaatacagaaggaagaatgtgccaaactccaccatacatatgcagtcaggaacccatagaataagtctcccacagttcaaataacccagatttgtccacataaattataaggaaaagaaaagaaaaaatgagatgcctgtggtttaaaataagaggcttcaaagtcatccttttttgaaatgatcatgactgtctatagtgtctaatgatgtagatttggttgctaaaaccatataagatagtaaatgccaggatgtggttactttgggggagagagaaggaagtatgattgggacaaggcccacgtagggttwctagggtggctggcaaagtcctgtttcwtgatctggatgctgcttactatggcatgtgtcttataatgttacactaggctatacagctgtatgtttgtgttggagagttcatatctgtgtgtgtctttttaattaaaaatattttgaaataactacayaatttttaaaaggttatttagaaagtcaagcttagtggaatctgccttacatcttgagatatattttggatctctctctgtaaataatacttaatgtactgagttatcttgatgtatgtaaattacagattatatttcaacataaaacaagcataattcaaacatgtacatgtaartattctataatacatgtctgaaagtgctgctgtaaacatctgtscagttttttgtatggtcataaattttcagttcgttagtttaaatactaaggagtgctattgctgtatcatatggtaagagtgtgtttagttttgtaactgccaaactgtcttccaaactatctgtactattttgcatttccacctgaaatgaatgaaagttcccgttgtttcacaccctcaccaacatttggtggtgttagtgttctggattttgaccattctaatcagtaggtactaattagtatcttgttgttttcatttgcatttacttgatgatttgcgatgtggaacatctttccatatacttatttaccatctgtttgtcttctttagtgaggtgtctattaagatctttgtcccatttttaaagttggaatctttgctttctcattattttgaagagttctttgtataattttcattaacagttctttattagatacatgttttgcaaattttctcttaggccttggcttgtcttctcattctcttgacagtgtcttttgcagagcagtttttcattttaatgaagctcagcttgtcaaattttttctttcatggatcatgcttttagtgtcatacctaaaaagtcatctccaaacccagggtcatctagattttatcctgtattatcttctaggagttttatagtattgcattttacatttaggtctatgatccattttgagttaatttttgtgaaaggtataaggtctgtgtctacattcattttttttttgtatgtgtatatggatatctagtttttccagcaccatttgttaaaaaggctatcttttcttcatttaattgtctttgttcctttgtcaaagatcaattgactgtatttatgtggatcaatttctaggctctctattctgttccattgatttattctttcaccagtaccacaaatcaagacaagattatcttcatttctgtatctctatagaaagtcttgaagttgggtagtgtcaatcattgtcagaaattggctattttgaaccttttgcttctccacataaacttcataatcagtttgtgtctacaaaataacttgctagaatttttattgggattgcagtaatctattattccaagttgggaagaactgacatcttggtattcaatcttctatctataaacatggaatatctccatctgttctttgatttttttcatcagaattttgtagttttcttcatatggatcttgtacatattttgttacgtttatatctaagtatttcattttttaggtgtgtgctcacaatggtattgtgtttttaatttcaaattccacttgtccattgctgatatataggaaaacattgattttctatattaaccttttatcctgaaatcttgcaatactcacttattagtttcagatttcttttgttgattcagattttctgcatagaaaatatgtcatctgcagacaaaattttatttttcttctttcctaatcagtataccttttatttccttttttattttttcttataggacatctagtacaatattgaaaagcagtggtaagaggggacatccctgccttgttcttgatgttagtgggaaatcttctatttctcaccgtattatgatttttcaaatgtaaaagctgaaccagcacaaaaccaatatgtttattttcccctgccttctggattctaattaatcattggtagaggaagtttaggctgtgtgaagagtttggaaagaccttaggaaatttttttaaatgtttatttatttaaaatttttattaaactttattaaaatgttcaagtttcctgaagtgtttagacatcaagaaatatttacatacatctctagtttatatttccatcctgttgatttccctattaagaattttaatgaggccaggctcagtggctcatgcctatgatcccagaacttttggaggccaaggcaggaagatcacttgggctcaggagtttgagaccagcctgggtaacaaaacaagaccatgtctcaaaaaaaattaaaaattagctgggtgtattggtgcatgcctgtagtcccagctacttgagaggctgaggtaggaggatcactggagcctaggctttcaaggctacagtgagctatgattgtgtcactgcactttagcctgggtgacagagtgagaccttgtcttaaaaaaaaaaaaaaatttaaaaaaggcacttaaaagaagtccaaaatgtatctcaggaaagttgtacaaaatgtatctcaggaaagttgtacataaaataagacaggcctcattttacagatgtttctcaattatgttattccaaatctacagtattggcatagctttcactgttgaaaggtgttttcatttcttaaaaatgtttttaacctcctatcaccagtcctatgctaaaacagggtattttacccataaactaccacaaatagataaaaatagctactttacrtataaatggccctttaaaactggatactattgtatgccaatttgcaacatagtctgtatgaaaagagaaaacagtaataaatgctgtgttatggaccaataattagattctcaatgtggtgtaaagtactcacacaaggttcattcttggcctcataaatttgaccatatcttttcattctaatgctcttaaatgacttagagacatgacttaacagtaaaataagctcctaaacaacaaccgcaagcacataaaaaacaaaattatgcagtgatggcatgccatttgttcaggaattggctgtcctatttactcttaaatataacagcaaatggagagttgattgttaaactgcacattcaggacctcatggtttaatatctcatgtgctatttgccagactaaagattattaacaatttttgctttgttcactgcaggaacaatacagtacttgtattatacaaatattttgattaaagtattgtttccaatcaatttatttcccattcctttcgaattacctgagttaacctagttcagtggttctcaaatgtagtgtacatcagaatcccaaggagagcttgttaaaatacaaatgtataagccctgctctcagagcttctgattcagtaaatctgggttgggcctgttaattggcatttcttagtttctccataatgctgatgctgcctgtcttgaggaccacattttgggaaccactgacctattaccatgaaaccattctctctacaatgagcagaattcttttttaaaaagttagctaaaaacaaaaaatagaccttatgatttggctgtcaccactctttaggaaagcatgttctaatttactgggtcaagaactgaaggaaacatttcttctataggagatcatagtaaagcttcttcttgaagtcttacaaatgttgtatttatcaaatggagtgttaaactmttcgaggtttcatttatatttgggaaaactcttgttaaataaaacaggtagaagagccctcttaaaatccctgaagaatgtatgacacaaatttctatcattaatatataataaagattcttttttttgtattttgtttgttgttgttttttcctgtattatattttgcttaatctccctggctgcataattgagttacctttatttttaacttttactttaggttcagagatacatgtgcaggtttggtatataggtaggtacatggcgtgtcatggaagttaggtaaacagattattttttcacmcaagtaataagcatagtacccaataggtaacttttcagtcctcayccttcttacacccaccactctcaagaaggccccggtgtctgtggttcctttctttgtgtccatatgtactcaatgtttagctcccacttacaagtgagaacatgcggtgtttggttttctattcctgtgttagtttgcttaggataatggcctccagctttattcatgttgatgcaaggacattgtattagtyagggcgctcttagagggacagaactatatatctgtagatctacatatatcctgtaagtattaaattaatacttaataaaatataattattaagttaatatttaataaactataagtattaacttaatacttaataaactccccttttacatataaaacttacacgatcacaaggtcccacaataggctgtctgcaagataaggagcaaggagaaccagtccaagtccccaaactgaagaacttgaagtctgatgtttgagggcaggaagcatccagcacgggaaaaagatgtaggctgggaggctaagcccatctctccttttcacgtttttctgcctactttatattcactggaagctgattagattgtgcccatcagagtaagggtgaatctgccttccccagcccactgattcaaatgttaatctcttttggcaacacccacacagacacacccaggatttatactttgtatccctcagtccaatcaagttgacacttagtattaaccttcacagacatggtctcattttttatggctgtgtagtattccatggtttatgtaccaccttttctttatctagtctactgctgatgagcatttaggttgattctgtatctttgctattatgaacagtgcacaatagatacatgcatgtgtccttatggtagaacaatttatattcctttgggtatatacccaatactgggatttctgggttgagtggtaattctgttttaaattctttgagaaatcaccaaactactttccacaatggctgaactaaatttacattcccaccagcagtgagtaagtattcctttttctccacaaccccaccagcttctgttatttatttatttttttttttactttttataatagccatataatgaagttttttaaacaggcttttgaaatcttatttccttaaagatccatgttgacctttaccagaattgtttatttgtttttattatcactgcctaaaataagatagtttctttttcccatggttatcagccatttgccctcaatggtactggtttggagtgactaaaattagggccagagtaacagtacctcacttttactctattttatagcaaatgaaatgttcagtattgacattaagtttttaaacagtgtgttgctgtatttgtttagtgctgaaacagcttgactccatttcttttgcaccttgattctgtgggttttatagacagccggtgtttggtgcctggccccaggacgggactctgcactgccacccatctgccatcacttctgttactcccttttacccttgccttgccatccaccatcacttctgttatttcccttttaacccttgcccgcctatgttttttccacttagagctttggatcttttttaaacacacatgctgctatctcactctttcttttagaactagtccttttcaacaaatctaatagatcagttacttcactacttaggatgattcttgtctgaacaataaccttcaggatgttggccagtctcagaagaaaacatatacatgtaatgtacataaatcatattgggtaaagtcagttttatgtaaaactgagtttaagatcgtcaaaaacacttccatgaactttctttacagttttgtgctattctctttctaaatttgccaattgtatgtggtaaggttgatggtgaggatttatctgattaccttgtggagtattcatagtatttgtcttcattttctttttgaagaggagtggaagttattacttgatccttttcctatgtatcacatttttccagtgttacacttcaaaaacaagtgttattatgagtcattgaccacagctgtcatgtttacttacgtatcccaagtgtttgtgcaacttggtgcctaagtacataggcactaaataaatatttgttgaataaatggattaacatttttaaaaggtcaattatgcaagcaattcctttttgaaagtttgtaatttagaaagtttcaactatgttgaaatatgtgcgtgtgtgcaatagctttaaaaagcaataggcggggcgcagtggctcacgcctgtaatcccagcactttaggaggtggaggcgggtggatcacgaggtcaggagatcgagaccatcctggccaacacggtgaaaccccgtctctactaaaaatacaaaaaaattagcygggcrtggtggcaggcgcctgtagtcccagctgctcaggtggctgaggcagragaatggcatgaacctgggaggcggagcttgcagtgagccgagatcgcaccactgcactccagcctgggcaacagagcragactccatctcaaaaaaaaaaaaaaaarcaataaaaaaacaagacatttagatagtgcatgagtagctacaatggacaacataaattatgtttcttgttattatttgtgtttgtattctaaagaggcatttgcctgccaaactatttcagtctgatattttcaaaactcttctaataaaaaagatactgagttatgtgacattttgatgttctgatgatgatcgttattaaggcagggcattgtttcattgagttgtttatagtactgtaagaatataacactgatctattaaaaacagatgcagtgttgtcatgaaatgggatatatgaaaatatgttaaagcctctaartgaaaaaaagataaagatgctttcaagtaaattagcaaaattcagggattagcaaagtatagccaagcccattcattcacattttgtctatggctactttgaccctacagctatagttagtgagtgagtgaatgaattgaatgaatgctgaccagaaattgcactttcaaacatttaacctgaggaaatagttatatatacaaataagtatgtacagggatgttcattctaagctgtttgtaatatcaaaacaagggaaacctaaatattgactaatagaagactggctaaataagttctggtgtatccttattataccagaactagtgtatgatacagctatttttaaaaagatgttacagaaatgtatccagtgataggaaacaagggtcagcaaactacagccctttggccaaattggctcaagacctgtttttatactaccagagctgtgagtgggttgttaaattttaaaggattattaaaaataaacgtgagacagagtatgtgactagtaaagcttaaaatatttactatctaaccctctatagaaaatgtttgctgacccctgatatagaatgttgtatacaatgtagattaaattggtagggatgggtttaaaacattatgaaatagtatatatagaacaatatctttttttaaaaaaatgcaatcaataccatttagacacttaagatgttaatagttatttctgggtagacaagattaataagattctatattttatgtctaattttgtgatttttcaataatgagaatgtattcattgtttaagaaaataaaaatttaatattggcatggggaaaaagagaacttctctaagtttcaaggtgtacaaatatgtttttccattttgtagatgaggaaactgagactaagagtttaattaacttgcctggagggacacaaacataagacaaaaattgcattgatgccaaattttctgtccagcagtgtcaccatttgataatttaaaatgytcatctgtcagctgaaataaaactatatactctgtacccaaaggcaatttaaaggtatcagtgtataatatatgataaaggaggattatgcagaaataacaaaccacctgcctaatggtattaggtgtgtactggataggtttacatttgcttaaatagaatgaaaaaatgagtagcttacattttacattttttaaaagaaacaaaacctgtatacataggtattcagttgactttgtaaatttgcaaactattactactacataatatggtaattaattgctctttcatacctatagagtttaattgttcaaattcaggcatgtgacacaaaaagggaccatgtcctgaagcttgtgcccttcaccgtaagatagaggaaggacatttgacttatcagatccttgtgcaggtaactgtttacaaaatgagtcagcaactcagaaggagaatgaatacaacagtgagaagtctcattgtaatgaactgatagctagtaactcaaagaagcagtaggactatagaaagcagacatgaaagctcagcagcttttggaccatttagtgtgtggacaaaaggcctagtatccttctattattcctgaggaaaccactatcttatagccaagaataataactattgttgctcttttaaaaaacacttgttcctttaattataaccatcttgtgatttgggaagattattctctattcacttatttagaaactgaggcacagaaaggaggttaagtgagcgttcaagatcgtacagactgttcaagtgataatggaaaactccatcacctagtcccagctctgtatgcatatgatggtgatgctgagtaaaggcaggatcattctacatttcaccgaatcataaaaaaaagataaacrtgtctttaaaacttatataaattattaaactataaatattttgatgctcttcagagatgaggttcagttaacaggaaaaaaattcactagtgtagaatgcttcataactaaaatatgtcagggaattatgatatgcagtcatgcctaggtatctgtgggggtaggtttcaggaccccctgaggataccaaaatccacagatgctcaagtaccttatataaaatggtacagtatttgcatataacatgaatacatcctcctgtattctttaaatcatctctagattacttataatacctaatataatgtcattgctrtgtaaatagttgttatactgtgtagtttaggaataatgacaagtctatacgtgttcagtacagatgcaaccatacatttttttccaaatatttttgatctgcaactggttgataccacagatgtggaacccacagatacaaaggtccaactgtatatgcacagatgaggctatcattttttcttttgtctttttcttgaacaaagatcaccaatcctggattttgtatattttaatgatttctgatgtctgaaagcagtagtaaatagaacatccccaattttaaccctatgatgtcacatattaacatctatgtagtggagtccataaattcagttagaaatcatagccagatagagtatgtgtgctttcataattcccatctctttagtaggcattatattttttaaaatatgtcttccttttgatgtgaaatgtattttcagaaattatttgtcatatttagtgtaaacattattcactatatactgcatatttttctaaatgtcatgttggcgatttgcccattttttaaacctaaaattgagatagaatgagtagctttaggcactgtataatgacttggattactgtggtgttcttgctgtaatttattattatttatcattcttgggcaggtattttagtaattagaaagcctacaataacacatgtggtacacttaagaatagtttgaagcactagagctgtatagccattgggtttcctctccsttttttaacttccatattgaatgcatattagaaggacatgtaacttttatcatactatttccttgctcccagcccgctacttatttatgtgtacaaaagcatatactttcttcttgaggaaaatttttttaaaggaccctaattatttcttaagatttattttccttctatcaggtagccaatacagtattttttttgatgttgtcgttcatatatgtttgcctcttacactcagaaaagtcccataaccaatgagagctactgcctttcttcctgccctatttctcataaccttgatgacccagaaatctctccacttaccataaatgggaggcactaaagtagtgttaggacttccttaagacatctgatgtgctcttttaaccatcttttaaacttctcttcctggtatttaaggccatgagcttatcttatttaatctgtctctctctcaccattttctagaccctagtaatctagctctccacctgctcgctatcatgaaaagcacttcctcttcccttttgctttatctcttgtcttcctccacattaatccagagcacatacacaaacatgtacataccttctcccaaataagtacatacctgcatctatataagtgtmacgtcttcaaccttacctctccccctagacctaactcactttttaaaaaaaattcccacagttacagcatgtatcacttaatttattctctacctatggtttgtattgttttgtgttgtatatcttatgcttatatggttttatatggctgacttaccttcctggttgtaagcttcttgagatcagggatttaattttttctcatgtatctctcgtatagcccttaccacgttggtaaatatgtagtaaatgcttattaagtcttaaaataagcctgtcctgtggagcagaaacgttcctcaggaagtgtcttatcgagtgttcccattttacaaaagagaaaattggaacagtgaagtgacccattttctttatgacataactggtgagtagcaagccctgaaccagaacctagggctcctgactcttagttcagtgtgcctgttcccaggcagccttgaccacgctgatgctcagggaaacactgccacgagaacatggcatttactgctgctcacgtggacagtggtgatatccatgccctgaacaacagcctgaagttcttcccagcattccccatttttcatcttgcctccttaactttataaaaccctctctattcaggaactagggaatgaatgagagtcctctctcatgaaaaaaaaaaaaaaataatgagatacaattttattcattcatttatcaacatttactcattttgactaggagatagcataaaagccacttctcttcactacctcttattttttcatgagaataaatatctttaaaaagctagataaatctaaagtgcctattcactagaacattctacatttagatttttaaactatgcttacaattggaagtgttttcctttgtttaaattttatgcttttatatatyagtaaactcaagactaaaggacagctaccttgattcttcttggttataattgatggttattggcaggatagcatgtgtagcctttttattttgaaaaaaaacaagttgggaagatctctgtgctttaatatttcaggaaaataagcaacactcttctcatctaattgcctgaaggctaaaaattgaattgtattgaatcacaggggagaaaaacaaagtaattgacaaaagcagtcatctaattaaatatattttttttaaaaaatgaagtttgtaatgaaatttgacaaatacaacacataattttttttaatttaaaacttcggttttaggttttgatcaattacagaaacagaatgagaagaaagaaagagacggtgaaagaaagatgtgtgcccacaggggagagtccctctggatcaaaaggatcacccgtctctgagatgacaggaagctggtattcacttgggtgtagctggcagtaaaccatcccacatcagagcatttaactaggagaataggccctctctgaacttcagtttcctcatctgtgtatcagattatggaactagatgacctttgatgtcccttccagctctaagtttctgctggattagttatttttacatacctttattctgatatttaaatctttcaagggtctactctaaaaagccagaatagcttaataagtacttactggtttagtgattgattttggcccatattatgtgcaagtttatcaactcaactaacagtatatgggtttagttatttgcagccaaagatatttgttgtgtctatggcatcttgtgctgaaagctttatgtagtgaaaatgagtaataggtaaactgtacttgtacaaatggtgaactagtgtttgatcttttaatggtgaagttttcaacatgagcatttgaagaaaagctttgatattgattgtgtatttcaaactgaagcatgtctgaactgaaaatatttccttccaaagccatctgttcttattcatttcttttttccttattctttgctctggcatgtatatattcctacatagttctttagggaactgcaaactaggaaggcaaagaaaaccatatgtcttgtttacagccttgtctgatactatctgtcagggtaaagtaaaaagataaatgtgtttatttgatagattttaaattttgaagtttttaaaacgttgatcaaaaacagcaataagactgatgatgttacttacgtgtaaagaaaagatacagttttcatgtagttattttgaaattcttaactttaggctataaaagtttttatttaaagttatttgttagttacatgctcgaaagaactgttgcatcgtattttaccacccttctttcagcaagttacattgttttgacttttgttatgaatgtaatcagaatccttagaatgcaaaatcttttagaaaattcttgttggatcattagatgtctgcccatcccaaactrattgctagttgtacaaaaaccatattttcttttagtggacatttaaaaatatcttctattagcaaggattacattttatgaactgtaatttttcacctgactctcttaactttataaaatcctccccaccaaatagaggtaccaacaaacaccagaaaccaagattggtgaacaattggttggcaaattaacatttcctatcttcaaaagatgatatttgtcttgcttttttcccagtcacattttagtactagttttgtagcttctgagtacttatttttccagtgataaatcaaaaacagaaatgatcagccttactctccctcttttttctrgggaaattgagaaccagaagagttaactgaccmgctcaggcctcacatggaaacagtagtacagccagtccaaggacctgggtccggggctctctccatcatgcctatccccatttgaagtagcactaaagtgccatttagtgtactttttgtaaaaatttgcttttcagcacatcatctaatatgtgctacttaaaacttaattgccctttagaatgatttgtgatatgcctccttcattctctcaacaattttaattttacaagctagttttattataagctcaccagtttaggtagaaggatgttctctttcagaatctggattcttcctctagtaacctcatcagagctcaggaggagataacaaatcaaacattgagattgaagttgattcagtctcgkgtatgatttgactcaagtatcaatgagctaattaatatttttatctaaaaatattttgtaattgtgccaaaggttgagactctagaatactggagataattattttcagacagtagcaactagtggaacgggatggagcactttgcaaacaatgtaatatcaatggcttcttattacaatgccccaggtatgttattaggttgatgcaaaagtagttgttgttttggaccatgaattttaaatcattataactaggctcaaacacatctttattaatcaaataggaaccattacaatcaacacatttttgccaacaagaaataagtttgtttattcctgtagtgtacaaatctgtgctttgggattcgacaaactcttggaaagcattttctgcatccttctgattgtggaaatgttttccctgcaaaaagttgtcgmgatgcttgaataagtggtaatgggttggcaagaggtcaagtgaatgtggcagatgagacaaaacttcatagcccaatttgttcaacttttgaagcggttttgcaacgtgcagtcgggcgttgtcatggagaattgggccctttctgttgactaatgccagctacaggcattgcagttttctgtgcatcttatctatttgctgagtgtacttctcagatataatggtttcaccagggttcagaaagctgtagtgtatctcaccggcagcagaccaccaaacagtgaccattacctttttttggtgcagatttggctttgggaagtgctttggaggttcttctcggtccatccactgagctggtcatcactggttgtcatataaaatccactttttgtcgcacatcacaatccgagaaattgttcattattattgtgtagaataagagaagaagacacttcaaaacgacgattttttttttatgttcactcagctcatgaggcacccacttagccagttttttcacctttccaacttgcctcaaatgcaaaatgaccatagaatgatcaacatccagttctgtggcaacttccgatgtagttgtaagaggatcagcttcaatggttggtctcaattggtcattaccaacttcccatggctggccactatgctcctcatgttcaaggctctcgtctcctttgcaaaacttattttttttatttttttttgagacaagagtctcactttgtcaccaggctggagagctgtgacgcagtctcggctcactgcaactgccgcctcccgggttcaagtgattttgctgcctcagcctcccaagtatctgggactgcagccatgtaccaccacgcccagctaatttttgtatttttagtagagacggggtttcaccatgttggccaggataatctcgatctcttgacttcgtgatccacccgcctccacctcccaaagtgctgggattacaggcatgagcccccgtgcccagccacaaaacttcttgaatcaagactgcactgtatgtttgttagcagttcctgggccaaatgtgttgttgatgttgtaggttgtctccgctgccttaccacccattttgaactcaaataagaaaatcactcaaatttgctttttgtctaacatcctttccatagtctaaaatcaacataaaataaacaataattcattaggaaaaaattaataaagcgagaaatgcccattaaaattatatgtaacataaccacatttaagaatgtattccagtatcaaacggccaattccaacaatgcaaaaaccacaattacttttgtgctcacctaatcattaatcttaaattgattcatttatttattaaatgaacatctattgagtgccagctgcttccatgccctcgttgagatcgtatctagtggagttatcaaacaataaacaagcaaataaaataattaagacatgataaataatggaaaagaaacaaggtgatataataaataaggatggccaactttgtgtggggtggttaggaaaagacctctcgaggggacatttacacagattcctgaaggtaagaatgagcaaggcatacagarggctcaggaaagagcattgcaggcagaggaaactgcaagtgcaaaaaccccgatatgggaaggggccgctgttcctgtctgttaactgagaatattaatatcttcctgcctactactcataggagccctgtggtgatatcagtaaatttaaataaaaaatgacttaatctgggttagatctgtataataggcagtgaaggagaaattggggtctttttctctacttctaggaagaaaaattattgggggatatgagagaaaacacaataaaacgttcagagatctctctcttgccttctgtatcttgatttagagatctgtatcaaagactgcattgtatggtactagttatcagtgtgggagttcacagaaggcaaagatcttgacctggagtcttggcctggacttgactttggccttaaagaatgggtaaatttggatcagccaaaaggaggcagaagagagtgatttaaaatgagagaatgtgtaaataaagttgctaagatggactgaacatgaatgagaacttaagaccatgaagactcaaaagctggagctggagccagagccagatggacagaaaataattgaagggtctgattcatagaggtggttgaaccgttagtagagcagatttgacccgatgttagacaacacaggaagtcattatcatttcttgaacaagaaaattgtgtggtagaaagttggtaacgtaaatacagattaatggaaatgaggaaaaattattaatggaaataaggaaacaagcaggctaaataggaggaccttcttttttttaaatcgtgcatttcatagtacctggcaatgagaacatggcctatgctcctatcagagaatgaactgcatacaagacatttcaaatgagttaacagtgatacttagtgactgrtggaggcggtaaatcaaaaatcaaaatgcctgttcacttgagtccaagggactgaccagaaaataatgtcagtgatagagctggggaagtttgcccagaatattaaatgattaattccatgttggacatgttaagtttcagaaaataacaagacacccattttgtgatgtgtgtacacaggtagaagtactgaactagagctaaaatagaaggttgaatttgagaatgcaaataggtggtgagaactgaagccttagctcttgagaatgcacacacatgattaaaagtgtgtatgtcggggaagaggcaggtggggagtaactgacacgcacacacacacacacacacacacacagagagagaacaagagagaggagtctgaataagtagaaggcaccaaaacaacagttggataaaagccaccttcttgaggaaataccattatcattatcaccataaaaactacaactacctgttagtgtttactacgtgtcttaaagtctttaaatataayaacttattatttctttccacagcctttaaaaaagtaaatgctgttgttatctccattgtacagatgaggaaggttaggacagagaaattaggcaagttgtacaagattgcccagtttggagaagctgagctgagattcaagcacaggcattgtgcttcaaagccctcaactgtgccatatggttatatccaacttggtgttttaattacgtggtttgacttcgatcttatgtaagtttcttgaaaaggagttaattaacagtttttacaagttgggtagaaaccagaaagtcaacagatggctgggcagtgattggataaatccttgtagcagaagacaacatgaaatttctctggggtaaggcagagaaagggaaagaagaatataccctttgctctacttttttttctcctctccatacactacaagttattgatacagggaattgtcccctttgacaagagttacaataatttgtggagaaaatggcacctctgttttttagcattttctatatactacaaatgtatttccttatttgtatacaaggaatgtcaatttatctaaattgactgtcaaccaaagtcatttctttattgacttccactactaaatgagagttagattccaaaagatctgtggtatgcatgaggaaaattttaaatttaaaaaaaatttttttttaagattccaaaagatagggcttgggaagtagcctcaacattggtattactggattaccttcagtctgggagcccaagtgcctggatgtctcagtggagaggctcaggacttagagcaggagttagacactgaagcccttccctctggagaagccacacgtgacttctttgtcgattgctttagtgaatgcttccccagtggykgacagagaactttgcctccattttccatgctcttcagggctcctccagcctctctcacttcttccttgtttgaggaggaaatggtacgcttccagtccaccatgctcagtcatacggcttaaaggagaggggaacaggtacctgcttggtgccacaactatagcaggcctttcttcagtaaataagctagagcttttctttggacctaaaactgaggatgggcctcatctaattaatcttcctaaaacacagttctgcacactagactttcattatttttccattctaaccagaatgaaagttttagcctcgcatttgtggccctccatgttttggcctgagctgtggatgcctgacctcatttaccagtatmccctttttgtcagggaggctgccccattccctgtttattcygtagggccccacttgccgccttctgtcgggaggaggctgatccctcagggattccctctttacttttcaatcttcactccggtctgtggtattatcggccccagttcaatgctgcgtacagttctcatctaaatgccatctccagcatacagtctcactgaactcacctagtattttatctccagctctcattatatctgtgttctagatatttatgtgcatataattatcttccctagtaaactctgggcagactctgtacctaatttaacttagtattttttatatcacttacacttaacatcagagaaagttaaagctgcaagggctgaggagacacacagacctgtgataatgtctttttcaaacttctttctctgtgctctagtaaataatagtgctgaaggtaggatagaccagatctcctggttctcagtccgggtcttatcctccaacaacagtggttctcccactggcttgcacattgaaatcacctggcgtcgcctgtgatgcttttaaaatcctgatccagaagcttacaaccatagaaattagaatctcaagagtaagacgttcacatcagtagcatccaaatctccccacatgattctaatgagcaaccaagattgggawtaaatatcccccagtatgatggcccctggaccattgttgctttactgggtaattctgttaatttggtaaactttttgtcagatattaaaagtagaaaatactaaaatattaaagtagaaaagtggtaactattagataatagtatagttcatcttgttttgcttgcaacagtagcttacagttaactgtttgacttttcagatttttcgaaagraagcagtggaacttggggtaaaattgctacctgcatttcatactccctctggaataccttgggcattgctgaatatgaaaaggtaaaactcttcattttcaacaacatgttttaaggtgaaatattccagattgttgcctaataagtatacattagatagataattacttatatgatactggtgactaacagactccactgggagtcttgagatctgtctttttgttggcagctattagcttttcagtgttccatagcctcagatatgtccccattgtgggatggcgtgacctcaacagagtcattcaggccagacacgattggaggtttacactgtttcatagtgactttgcatcaatgatactgtctccataaataccaaaagagtcccgttatcttttaattgtcatcaaagcatttcacttccaaagaagcaaattcctaagaacctttatttaagttcagctactggtcagaaatatggcagaaatacaatatttggcctaatcagatcccccataaaagcagctggtataacggagactgggagcacctgtggttacccagcccccagttgtaagaagggaaggcagccaatgcactcacccagatcaatccaaccttctcatcctctttggtggagaaccctgatatgccaagttcttgagaatgtggctccaattggaaaagacacacacacacacacatcccaggctgaacagactttctggtgttctcccagagagtagttggagttttcataacttaagcatttcattaataaacgattttgtcttaagcttccttcttaacgccttcctgcccataagttattaattgcctgtacctctctgtcataatgatgagacagtgatgatagctattattgtcactataaaatgtgatgggctctttagtcctcttaccacatattatcctcacaacaacccagtaaggtcaatgctgttatctccattttaccaataggaagctctagtcacagagagattaattaatttacctaatatcatacagtaagtaaatggtagagctagaatatgtacttagatgtctatacgcacatcgatgcatatgtacaaatgaaacagctttctggtttagaaacaccaagagaatgcatagcatggtttggcaagattaatgcacatttcttcctaattatttattttagtgacattctgtccaaatattaatcataaaaccatgaaattaatcagtttattttatttttcctttaacaaatttgtgagatgccatgctttagtttcatttgtatattatatatctacaccttgaaatcatcctgtacctatctataggtgtggggagtggggtggggagagttcacacctctgggccatgttaaactgagatattaatcgttctctattgcagaatgtgatgcctcaggatctgttcttcctttaagggtcctcaggctttctctgtcagcttgaagatcatacatgtactgtagggccttaatgcaggggtggctctgagcttggcttggaagcagcttggtttgtgtttggaggcccatgagtatttgactcctgtagaccttctttcttaccttttatatcttcagaatttgtatttataggtagtattctgaccaagatactactctcttacctaaaacaagatctggtcacaaaagcaccgtgcacaattaactcatttttttccctactgagaaaagtgttatgggcatagtagtacactaaactaattggttatcaaaagacctgaatctaggtctttacagctactcgaggtttgtcttgcagcagtcatttaaactctcttggctaatttgtaaccaggaaggtaggtgaactcagtagttactttgtgaacattttggggttcacagaccactttcagattccgatgaacatatgcctctcataaagtgcatattcctgactacatggatttttacacaatttccaaaagctaacagtacaatggaagaccaccaatgaccgccagtttacaatcctagagcagatgatcactccagccttctcttaaattctgtgaagctagtttctctcgtttcctggaaggtaatgaaattggagaaaggcctactaaatctaatagaggtgtgggctacatctttgcaaaagtcgagtccatttttatgagatgctgatattgcttaattagtactggcctcccttgaaataagcataagaaattggaattcaaaatatactattttgaaatatatttaactttactgtttatttccaactgccaagtagatttttccttagttaaatctatccttagtgtaccatggagatatttttcagtacataaatacttaatttattaaattactaaatcctctagtatctttcatacctatgtctgtcaagaatttattaaccagggcattcaaattttttataagacttcattttgcgcagtattttacattagaatttatttaatttcagagattacagaaaaattgcatgtggtgaaaaataatgtgtcattttcatttatgtattcactgatgttttgaagttaaactggatgaaattgagcaaccatttggcagctgataataatttcttcttggcaacatgcatgaatttttaattatatattgtatccactctcaatcccatttactaaataccagtgacttacccaaattcacacaataagcactggcaaaattaatagtgatattagttcactaaaattccccctgttcctttgcctaatcaagtacactccttgaatcagctgtacttccagctgtgagactgatttatcatcttaagttttcctgtagggcaagaagcgacatttcatatttatctacaagattacttttcaaaatgtgctgttggtgtcatttgtacatatatactgttttgcgaatcactttattttcacagtatggtccaaggtatagggaacagctggcctagagctgctttcgtagttttggaaggctgtcaccagcaaaagtttcaaaggagtggggaaacatatatctggcaaaatcatattttcttaattaccttctcagaataagagaatgtagaaagctgcccaggagaagaaaaaaggagggcttaaagatgctttttagactagctgtgcattcattgttgactggctttgaaactcttggcaagaattaccactggagagacactgaatgtgctggctgtaatatcataattctgctcttccctctcaattttgaatgtgtctctttgtcaacatctctatgttaacaacagtgtgaacttattggtattatctgttcacattcctctggtattctggttattgcctaaagataattggtttctttaccttttctttgtcaaaactaagcatttatttgagtctctcctgtgataaagatttcttactaagtcctgggaagagtttctacttctcttcactttattcaagaagataacagacatgttctttccctcaggggactcacagcctggttggtaaagcagaatttatttttgtgtgttacacactcacacatgtaattgacaaacctaagatggaccaaggagagataataagtactcaccaggttgaatttgaagcaagcagcattttgaattggggaggtttatgtatttggagacaaaacatcaataagtcaagttgtatttcagtatttgtgcaagctgaatatatgcagagaacctaaataattcactcatatactacatgaggaactctatcccaaaagcggttcagaaaaaaaaattttaattgtcttttctgccacatctatttaaattgttaatccaataagaattcttaattcaatagattctgaaattgtgatttaatggaaagtactcatttaataacctagatgctatacagttcctcactagactaacatgtttccttcaccaatatgatcatagaatgagaatrcataagttacacacctctgctaaaagaaaatcattgcctttctaatattaggttttggtagaactcaatttctctaatgtgaaaatgtcaaagtttggtgtctattcttgttattactattagcaagaggcctatgcttttttttctcgaacttgaagcagaaaaattacctctgtgatttgtaaaatcaggcatttcaccatttctgtatttgcaaaggtaattcaagtctaggtagagtagacttagattttgggttttttaaagtgtgttcttaaaataatgtagttaatgttcccattattcatttctatcacagggcatacagtctgggcattcctaataatttttctgtctttcttgataaatgagttagttttagctatacactattttatcacttctctgtatggatttttctgacgcctgcttggtgttacatttagtagagctgtctacagtgtgtgcttttattgcacaccatgaaggtgygtataggaaatgactgatcttcattcagactctcattagtcagtgaggtgatgaatgaggcacaacccctcacctgttttatttcctgctttgtaaagctttatttactgactattctaattatctgatgaaaatacatacgatgtcattggttacattacagtttatattattataattaaattgcaggttgctctactttgactgaaatagggctttaattaagaatagtacatagctgcctgtcttctaatagtgaaagattatcctagggaagcatataatgtgtatattttaagaaaaggtgatagcccccttgttgggtttattaatactttggtggtataaaatgtttaaatattacattatagttggttaattttaataaacacaaactatgaaagatgatctgataggttaaatattgttaaagtgttttcctatatctccctatgtttttacttgacagttaaagcataaatttctgcattattaaatttgctaacagttttttaaagttcctggtttcagatttgaaagaagtatattatattttcaaatgaagcagaatacaattccatactttaatataatagaaataatatgaaaatatcaataaacaaattttctgaacataagatcaaattgatttaatggtgctagtattctatgaggcaaaaatattgcttaattatcctaaaaatgttctgtagcagtgatataagcctgagtataaaatcagagctccatcttacactttatgttttatttatatactttatggatctattaagaagtcagagacaagtttagaaactgtagaaaagttttttaaaaagaagttacatctttctaagtattttaagttaaccttctttatggtttctttttcttcccccagttggattttttttaaatattgggttccccacttccctcttttatctattttaattcatttggccatttgtagtcttctggaactagtaatcaacaatactttaagattttaatagtggtatgtagttattaatgtcaaacattagaatattattaccatagttaaagctgctattagcagtctgtctctggaaaattcacttaacttttcataagtaaaactaaaataatagcaataataatgcctatcttgacctcataaggcttttatggaaatctggttaatgtgcagaaggttaaaccttgcagagtgctatgaaacagatggacattggaatttttcttaatttatggttctattctcaatatttcattatgaaagagtatatatgaatatggtatatgataaaatagtatatatctagaactgactaacttggttctgatgtcctttcgtggacatcatttcatttttaagctatcagtgctcctgacctgttcaagctggagttgtattttcctctggcagaaaagagatgatggaaccaattggatgtgtggagagaatgtctcaatgtggtttatgtaggatagtggtggctccgtgctcaagcttttattattttttaaattatttgggatccaacctataggatcaaaactaaatttgctccctaaaattatatttattagtgaattatgtactaaaaactagaactgttcagccgattaggttttaaaaggatgcgaggcaatccagagttatgttcttatcctaagtcttacatgctagctagtgcctaattaatgtggtacaaacccagtctatgaaagtgtgtgtgtctgtctgtctgtctgttataaatagccacatagccctgtttcctagttcttggactgttctgctaagggtctgactgttctggttgctttgtatcagtgactctcaactttcccatgcctcagaataactgggattctaatatatatatacacacacatatacacacacacacacacacacacacatacatacacacacacacatacacaaacacacacacacacacacacacacatataattgctgccttcatctttcccttcccccagtctgtttcaattggtttggggataaaattctggcattttttaaaaacctcccaggacattctaatattcagctagggtcaagaatcattgttttaaatccagcatttatatgctgaggttagctttatttctcatctcagttgcatttgaaaacattgggtttaaaacgtttccctattcactgatggtcaatttaattattgaaattttaaaatcctagaaaattactttgaaaatacccagctttaatagaacagtgcttctcaaactttagaatatataacaattgccaggagagatcattaaaacataacattgctggatcataagcagagagcctgattctgtaggtatttactaagaattgataatttgcttttctaaccagattccagctgatggggaagctactgctgctgctgcttgcccaacgaccacactttgagaaccactgtaataagaaatgactgagccatcagagccatgtagttaaatctcagagccgttcagtgaggcagccaggtccactgttggggaagcaggagtagggcctgtgttctgtttctatcatttgtttactttcattaatagttacacaaagtttccacttaactctaagcagtttgttgcttcttctggaaagcagccaattccaagcagtaattacccaaacagagtttgcatgtcctttttccccttgtactttttttttaatccagtgagactagaaagtaaactttaggcatttttagcatagaggggaaaaaataagcatttttaattagaaacttctgggttactgtttaaaagtaaagctatttccataaagtcacactttgtagcttcaggcaaaatggctttactataaacagctggtaacctggccctgtacctaagggtactgtgaagaatgaagcagaatcagggattaccctcccaccagatgagcaggagggaacagaggtcacttctgtgatcatttaatcctgtcaccaaactttggatcactacagctctgccaggcactcaataccttgaccaaactaaggacatttatttattgcaagtggacagttataacaggatagcaacacttaatttaaatgtactttgtgtatagccacctttatggagacattacggacaaggaagtctgaacaaaggatgttcttagtcatgcattgtgaggcggtaggaatttgaagaacctcaggatgcctgaacctcaggatgcctgaacagtttcctttcttcccacttctctggtcataattgaagttaacactcaggtaaatgggttttttaagtgttttttattctctgaaggcaggagcagaccatatctgcctctgaacacaggctgtagcggtcctcatttcttctgcaccccaccctcccgccttttccttgaatttccatctgctcaggctcctgctgtgtttctgatagggcaagagcaggaaattgacatgaatggaatgaccaggttcacgttttactcaacaataaattagatattttaaaatatttttctatactttcagaaagttctacaatttaagggtaaattgtagcatatgaataattaaagtggaaaaatttatccaaggtgatgtgtagagaatttagaggcagtttatcccgagagttgcttaaatccctttttaaatgacttgtatgtgggaagtctgttaagagggcttcctcacccttcaattttgggcaaatagaaccttggttcaaagcagatgggactggattgttaaatatgaccactacttttcccatagcatctaccacagtttaagcagttaactcaccaggaaaatttcatgtaaggacaattatagttattttaatgcaacaatttcaaagtggctttcatctcaagtttttcaaatgcacagaactagtgttttacagattcagctttgttcactctgttcacacaattggttgcgaatcagcctcagcaatttgaaatttatgctgtgtacagaacttagattgggaacaagtcagaatgcgtaaattcatatacctccctcacaagctaacaatggaataatcttttcaaggaattgaattccccaggtttttaatgacccagcaatcaattttcctgtgattaatctcaaaactggtcttacgttgttattgtgggacaaacctttcaaatatctaattagtaaagtttaattttaaaatttatgaaatagtttgaatacatggttgaaaatcagcgcaggtatcaaggcactttatcagccctcataattgttaatcattgtaaatattcaactaactacattgaatctttgggaattggagggtcaatataaaatatttaggctacagccaatagttttaaaggcctcacagtctcagtggatacattaactactccatgtttcctgcttgtgcagtaatagttatagttgatatgttctgaaaaatgggatgaagaattattaattgcagttctttttattaactagagaaaaaaagtgatggagcaatactgagaattaattgtaatttacaaatctggaaattaatgtgcagctgcgcgtaagtacaggcagtgcaatttggtgatttagcaatcatgacaaattatcttcatctataaggtggagaattgttaggattcctttattcatcttttaataatagacccagtttcaggccgggtgcggtggctcacgcctgtaatcccagcactttgggaggctgaggcgggcggatcacgaggtcaggagatcgagaccacggtgaaaccccgtctctactaaaaatataaaaaattagccaggcgcggtggcaggtacctgtagtcccagctactctgcaggctgaggcaggagaatggcatgaacccgggaggcggaacttgcagtgagccgagatcccgccactgcactccagcctgggcgacagaacaacactccgtctcaaaaataataataataataataatagacccagtttcaggaagactttatgtgaatgctcatgttgcccttttatcctgaaaatgtgagtgggagtttaacattataaattaaatcttgcttcctctctttgtcatgtcatgctatagtttttatggaacatttgtacaaaacagtgattactgcatatgttgaataatcttaagatgctactgagagtttaatgtaccttgtaaattgagaggcttccaattaagtcaagttcttaagataatcactttcaaaactgatcaagtaataggacattagtaaagctcttattgacttaattgtgacaaattaataaacagaccctgtgcaattactataatggtgaacagtttttcaaaatttaagcataaatctattctaaccccccaaagtacattaaaaactatatatgccattttaagatgggtatcatttcaaatagctgtgttcgagttcattatacaagtagtatgaatttgtatgtttctttcttttaaaatatgattacatttgtttatttcaaaggtcaattaatctacttgcaaagcccttagagcatataattttacaagaggtcttccgtatgccatggacaaaacaattacatgttcttatgtgttctctcatctctacttttattatgtcctgtgtccttggtgttatctcttcactgagaactatagaatatcttgtcttattgtctctttgtcccctttggggacaaagtcagcatggtacctttttatacattgaaaaatgaatcaattatgaattacatatttgccataatttttaatatctgacagtgccaattcctataactgtgctgactgtgtttaagaaaaatcagcagaaaagaaaaggcagaaagagcagggatgtaagtcttgcttccatcactttaagaataatgtgacagttacatatatttgcctaggtccatctaactgtgtgtatttaaagtgctgtgctttattgaatataactctatctttttaagtgtgatcacatatctttttttatttaaaaaaaatgtagcatgctacccagccattagtcaacataccttgtttaagcatggattttcttatttgttaaagtaggactaataagtagtatcagttttacaaagatcacatttatgacaggacctagaaagttgaggagctgagcaatattttacacccaagagaatggatcattatggaatttcaggacttcatacaggttgctgccagcatagtgcccatccagatttcctgaaatcatcaaggggccatccacactatgtttgatttagaccttagccagagagggagagggagagggagaggagaagaaaagaaacgcaagacaaaaccaaaaagcaaaaaaggaggaagtattactgactgacggcagcagtgactccctcttaaaagtaccacggacgcaaacttgcagtggggctgaaaaaaatgtaggagagggagttccgtgtggtccagggattacaggtgtgagccaccaccacacctagccaataatgaagtttactgctttaattcttcccttcatgaaagatttctctgtaacatgtgatactcttttatggcattttccacacggtaaaacttctttccaatttggagtcagtcttctcaaaccctgctgctgctttatcactgtgtttatgtaacattcttaatcctttgttgtcatttcaacagtgtgcacagtgtcttcaccagatcccatctcaataaaccattttctttactcctccataagaagcaactcctcatccatgaaagttttatcatgagatggtagcaattcagtcatgtcttcaggccccacttctaattctagttctcttgctattttaccacatctgcagttacttcctccactgaagtcttgaacccctcaaagtcatccaggagggttagaatggttagaatcaacttcttccaaactcctgttaatgttgatttttttttttacttcctcccataaattacaaatgttcttaatggcatctataatggcaaatcttttccagaaggctttcaatttgctttgcctagatccatcagaggaatcactgtctatggcagctatagcctaatgaaatgtactttttaaataataacacttgaaagtcaaaattcctttttttttttttttttttgagacaaagtctcactttctcgcccaggctggagtgcagtgtcacgatcttgactcactgcaacctccacctctcaggtgtaagccattcttctgcctcaacctcccgagtagctgggattataggcacccaccaccccgcctagctaatttctgtgtttttaatagagatggggtttcaccttgttggccaggaggtcaggagttcgacaccagcaagtgatccacctgcctcagccttcctatgtgctgggattacaggcgtgagccaccacacccagctcaaaattactcctcaatccatgagttgcagaacagacattatgttagcaggcatgaaaacgttaatctccttgtacatctccatccaagcttttgggtgaccaggtgcattgtcaatgagcagtaatattttgaaaagattctttttgtctgagcagtaggtctcaacagtgggctttaaatattcagtaagccatgttataaatatatgtgctatcatccaggcttttgtcttccatttatagagcacaggcagaacagatttagcataattctttttttttttttttttttagayggagtcttgctctatcatccaggctggagtgcagtggtacaacctcagcttactgctccacctccctggttcaagcaattctcctgactcagcctcctgagtagcagggattacaggagcacaccaccacacctggttaattttttgtatttttagtagagatggggttttgccatgttggccaggctggtctcaaactcctgacctcaagtgatccgcccaccttggtctcccaaagtgctggaattacaggcgtgagccatcacacccagccagatttagtgtaattcctaagggccctaggatttctggaatcataaagtcaccagctgcatttagaccctaacaggagagtcagcctgtcctttgaagctttgaagctaggcaatgatttctcctctctagctatgaaaatcctagatggcatcttcttccagcagaaggctgtttcatctacattgaaaatgtgttagtgtggccactaacacattttagtgcggtagtcttagccaagtcttctgcacttctagcacttgctgcttcaccttgcacttctatgttacagagacagcttcttctcttcaccttcatgaaccaacctctgctagcttcaaacttttgttgtacagattcttcacttctgtcagtcttcgtagaattaaagagagttagggccttactctggagtaggttttggcttaagagaatgttgtggttggtgtgatcttctgtccacaccacctaaaactttctccatatagccataaggctgttttgcgttcttatcattcatgatttcgctggagcttttaatttcctttaactgtttggcacaagaggcatagcttttgttctgttttcacttttgatatgccttcctcactaaacttaatcatttctaggcttttgatttaaggtgagaggcatgcgattctcactttcatgtgaacactcagagtccattgttgggttattaattggcctgattccaatattgtagtatctcaaggaatggaaggtcctgaggagagggagagaaatgcgaaacagctggtcagtggagcagctcagaacacacatgcttacaagttaagttcatcattttatgtggacgtggttggtggcaccctaaaacacttagaattgtaccatctgatcacagatcaccataacagatatcatcataatgacaaagtctgtaatgttggaagaattaccaaaacttgacagagacacaacgtgagcacaggctgttagaaaaatggcaccaatagacttgacacagggttgccacagaccttcaatgtgtaaaaaacacagtatctgtgaagtgcaataaagcaaagtgcagtaaaatgaggtatccccgtatgtaaattttttaaatgtataatttttaatatgtagaattatgtggctgggtgtggtgactcatactctgtcatctcagtactttggaggccgaggcaaaaggattgcctgagcctgggaggtcaacagcagcctaggcaacaaagcaagacctcgtctctacaaaaaatttcaaaaattagccgggcatggtggcacatgcctgtagtctcagctactcgggaggctgaggtggaaagattgcttgagtccaggagatcaagrctgcagtgagccatgattgtaagactgcactccagcctaagtgacagagtgagaccctgtctctcaaaaaaaaaaattttttttaatgtttattttgcatacatacacacacacatatacaaacacaattcttaaaaatgagttcagaaactcctgaaacttttcctctggaagattttaaaataaggtagaaaaactcaatttttaagttaaatgcaaacatgaattttaaaggtgaaccactttcacaaatattttcattaaatttagtttccaagtaatcttttcttagaatgagtttctttcaaaatgcagatttgttctattgttaaattgtcacctcctttatcttgaagtgggagatcaagtgtgttgttttcttcttttcaaattatctggtaggaagcatacttgctgacaaccacttgtcacagaaaaaaaatcagcaaatgtggggatacctttctattttgtgaaatgacaactcttgattaaatactttgcctcaagacaatccaaaaatctgtttggtgcagatattattgtggtcactgtccagctctttacaaagtattgtgataatgtaataattctactgtgcaaaggttttggattttaaaattaattgcattggtggcactctataactcataatccgcaatacatcaaaagcctctgaaagctgtagaacagtgagggtcccattgccaacttcttattgtggastctctgcaagaatctctagcatctcttgtgtgtcacctttcacagaagcaccaagggatgggagcaatgtatgtctgaagatttaagaaagccttttttcttgcttttagatttaagaattagcagctttgatagtttcctcttgtaccctgtgcttattgcactctaattaagagtcctgcatttggcttcaaaggctgctgccataaacaataaatatctaaatgtcattcacctttaagcccagaccagtttcttatcatctgacagtttataatgggcatattgtctcattacattaagtggactttgatcctctttagattactcttgagaatatttttttaattggcttaaaggaaaattctaaattatttttaactagatgtaaatattacaagactaaatttgcggcacactcttatttgtattaattttctccactttaaagtaggccaaactgtgttcatgtgcccagagaggttattgattagataaagaggttttcttaggtggttttcatgtgaaatcgcttggaaagtacttaaacacattactctctaatattggttgggtaagcaataaagtggtggagggtgtcaatctgtactaaaagagtgataaatgaacaacatatttggtgctagtatccaaaatttttgctagattcaaagggattcaaattatagaattcactaatctgagtttctgagtctaatgagcaagaaagtgataatttcatatttatgtttgataaagaagtttcaaaaaatggaatttgtggtgtaagcataagcactatatagaataatccttaagaattataaatttgcttttcaagtttttctaaagaagggaaaataggtcccttttcaaactgaagacgttacaaaatacattattgtgttgattctaaaggaaaacagagtaaaagagaagaggcaggagtcaggaaaattatgaatttagaagctataggcagccagataagctaatattagtgccttatgcttctgtaattttctatagcctacaaggatttccaaatatmcacacacacacacacacacacacacacacacacacacatatatatgtgtatatatgaaatctcattaatttgatttaatctaatctggtacaagcatgaatatccaattttataatttgaatttccttttgaaatagtttggaactattggaaccgaaagaaataattttatgcttttaaacttcccaatactcagggcaaaggcagggaagataaaattatcttagtattttattggcattgtaggctatcactcattggcattgtaggctatcactctgtctatttgtagtatattgatcattaagtaattccaatgtttttcttttytttttttttttttttgagacagagtctcgctctgtcgtccaggctggagtgcagtggtgtaatcttggctcactgcaagctacacctcccaggttcactccattctcttgcctcagcctcccgagtagctgggactacaggtgcccaccaccacgcccggctaattttttgcattttttagtagagacgaggtttcactgtgttagccaggatggtctcgatctcctgacctcgtgatccgcctgcctcggcctcccaaagtgctggattacaggcgtaagccaccacgcccagcctccagtgttatttttaaaagttttccatgggtcaggttgaattctacgtacctaccagaactatatttcaccagtaatcctagggtttgatatatacaaccacctttcattaagcttattctcactatttaaagataaaaaataaatgtaaagttcaaaatctttctctaaagagttaaaagtggcaactatatacatagcacctttcttgcctggatgtgaaagctaggattatagaacctgaattcttttaaacatgttttgttagaactgattctccttcctttatgccatctttttgactccactgctcttctgtcttctccccgtctttgtgatcatgtgatcaaacgtgaaactatattcagtgagagcctcagtggtaagagtgaaagcatttccccccagtccaggggcttcatccttccttcagtgccttggccaggccctcagggaatgaggagacctttgctcttccctccaccttgtcctgactcctcaagcctccagccttgaggaggcttctctagatgaaagctcctcagtaattgtattagtctgttctcacaccgctatgaagaaaaacccaagactggggaatttataaaggaaagagatttaattgactcacagttccgcattgctggggaggcctcaggaaacttaaaatcatggtggaaggcaaaggagaagcaggcaccttcttcacagggcggcaggacggagtgagtggcagcagaggaaatgccagatgcttataaaaccatcagatctcatgagactcactatcacaagaacagcatgggggaaactgccccatgatccagtgacctccgcctggacccacccttgagacgtggggattatggtgattataattcaagattcattgtctcaaaacatattagcactctgcttttcatactttttccctttaatcaagaatctttaatagttttccaaaagcttcagggcttgtctttaagtaggcactgcactctgtaaccctatgttcatccacatgtagcccctttgaaggactttacctccaacaaaaccctgctatttttaaaggttcagttgtgtcatctcatctgtgaaagatgtcatcatctctttctctcatccttgtcccttccccactttggaaaagtaatcaccacctccttctcataacacttggtttcccattgccagtataagctatactatggagttgagggactccacaaagttccattaatacataactgtgttgaaggcaagaaaatgaaagctcttgggagaattaaaaagtaatatgttcacttggggttttttccccctaaaacaaaaaaatgttcatattcaggaaatatcaggtgaacacccttctcctagatcctggaccaggtgcaggagataagtggtaaacgttttcttggtgactctcacagagtttatagtctagggaagagacaaacattagttaatcacaaaaacatttcgaattgcaggatgtgaagaagtcatttttgagctgggatcaaggggatgtgtagatgagagctaggggaagagaagagagtggatggtccaggcagcagagcatgtggagtgtcaaaactctgtattgaaaaggaacaggacaaggccaagaggctgaaggatggcaaagccccctggggcagagagcagcaggctggagagcgaacactgacagactctgtggtggggtctcaggtttgtcttggcatcagtgggaagcactcaaggtcctgaggaggacatggtcgtgtttgtgtttaattaattcaggttcctgctcatccctgtctcaagagccataaagcattatgaccaaatcatgccagctatcaggagcgatcgttttagattgtcatgttttacctctttgatatttgtttaccttttcccaaaaacacaagcctgcaatgcaggttcctagctggataggcccttgaaatgttgggtatagtattaaactctggttggtctcctggaattggtttcaccatcaagcagtaaagatttcatttgasatcatctgtcatcagatcatttgactagaaactgctaccaaaacaaaggcctgacttgtgagaaagagcaggtatttgacacagctagcaagtttgtattttttagttctgttcacttgtttcagatagtcaaaaataactttaaaaaaagaatcttcctttaatttgaagaagagaatgtcgtgtaaaatgggttcaggttcacaattgctacagcttagaatgagtccagttaccaaaaaactgaagtcagaacgggcagatatatgtacatatctttatctgtttgttttctttatttttaaaacagagaagaggggattgcctgagttgaaaacatgacagagggattagcactgtaggaaaccaagagaaaggttcatgaaaaatgaaatgttctgtgctagtattgttaaagtatttacactcagaggacataagtggatgccattgattttcagtcaaaaatgcttgaagctcaactgcatttgtgaaatatatacctacatatttaagctaacataacaatttatagataagtaatatttcccaaattgcattacccagaatattatgtccatgaaatattaattgatgatctatgaaaagaaaacagctctatagataaataagtttgtcaacactggatttaaaaggtttcattactgtaaacttctcagaactattaactggctaatgtgcaatgtacattgctcatctctgggatggagctttattataacactgcttcccaaacttttttcaccatggaacctcttttatccaaaacaattattagtatttctgatctgcattttttgttttttttttttgtctcagaacacagtttgatagtcactgattctgataattgttgttatatgtccttcaaaatagtcatcttaatatcattaccctagtaataaagttcttgcctcaaatatatttgaaaataatttgaggtaagtcatttattacacgtgtatactagttactaatgagaatactctgtggtgtgttatatgaaatcttaaaaagtacccactgcagaaaattagcattattgctgtgtttatgcttctttttaataaaaataaaaaagcaggcttctgtttgccctcaatgagagaattgaacgctgggaggccaagtagtgagaacaagggagggtcacacagagttacacatatgaagttttgcaatgggccgctatataagggcccacactttttatgcctatattttgtcattttttaaaaagtataagattgacatactataattataactatttattttcatttatggataggtacataatttgtatctttatttagaaaaattctaacatttccttccaaatttgtttttttaagttcttcagatttattctgaatttcatatcattgtggctaagaaattaggggtttttctttaaaaaaaatagttttctaaaagagtctgagctattttgtgataaaaatttaggatgtatagtcatagaattctttttctgaattacaagggtcttttgtgttctaataacgtattccattatgtatatttgaatggcaagtctagatggttgagtttctcagtgaaaaatttggtgaaakaattattaagatttttgaaaattatcactatatattattaaagaaaaccctaagtcaataataccacaatgtcatgatatttgcattatgatcatttgtgttacccaaagcttcggattcattataaayacatgaaataccactagggttggagtgaagttaatcacattctttgctcttaaactaaaggtaaaactttcttcagttaagttattgaggaataaatatgctggtgaacaatcaataagtaattactacaaaactgtattacaggggtctctctgaaccatatccctttcacaagtctaataaatttcaacattgtttaacttttagttgaatatgttaaacyaagaactaggatataaaatgttttgtttcttgtctctttttctctccagtaaatactttcatatttttwaaaaagttttggtttcctaagcatttcaatgaacagagcaatgaaatattattgcagatgtatttctctatatatagygcattctcttaaaattttagtgagtaaaactttttgttaaattcactttataaaacagtttcttttttctgattatagaaaaattttcatgggaaaaaataatcactcgaaatttcaatccgatgttaacatatgcatcactcaattctcatttttaaaaaacaggccaagtgcaatgacacatgcctgtaatcacagcacttcaggaggccaaggcaggaagatagcttgagtctaggagttcaagactatcctgggctatgtagtgacacctcatctctataaaacatttaaaaatagctgctcatggtggtgtgcacctgtggtctcagctactggagaggctgaggcaggagaattgtttgaggtcaaggctgcaatgagccattattacaccactgcacttagcttgggcaatagactgagaccatgtctcaaaaacaaacaaaacaatgaaattgtatacttccgttccattcgtttttgctttgtatccactttttggaggcataatttacctgaagaatacacccattttaagtataaatttcagtgtattttgacaaatgtatacgtctgtgcagacactgccacaatcaagatatacaacttttcgttactcacraaactttcctagtgaccctttgcagccattcatttgccatcatctgaccccaggcaaccactgatatgttgctgtcagtatacattagttttgtcccttctaaattttatacaagcaaatgtgcaatatgtactctgctgtatagttttttttggtacagcatggtgtttgcggttcattagtaagtattctgtgtatactagttcaatcctttatattgctgagtagtatttcattgtatgaatatactatagtttattctcctgtttatggatgtttgtgttatctctaattttcagtgatcataagtaaaactgcttatgaaaattcacgttcaggccgggcatggtggctcacrcctctaatcccagcactctgggaggccaaggcaggaggattgcttgaggccaggagttcaagaccagctgggcaacatggcaaaactctgtctctactaaaaatatataaattagccaggcctggtggctcacacctgtaatcccagctactcaggaagctggggcacaagaatcgcttgaacccaggaggcagaggctgcagtgagccaagattgcgccactgcactccagcctgggcaacagagtgggactctgtctcaaattaaaaaataaaaagttcatatccaggtctttatatgaacattttatatattcttcttgatagatgcctatgaatggaattattgatcatatcaatttttattccctactgtctttttcaaggatgtttattgaacagcgtgggaagatgtgtctaaaatatcatcttttaggacaatgggcagttttttgtttgtttgatttcatttgtttttagtttgtttgctgtccacaataatgatgtttccttctggaacaaagattgggcatgtttcctagcagcaccttttaaagattagggttccctcggctgtaacacaagccagtgtcatgtgcagcgtccacccaggctgctgtgcgtcacccttgtgtaaacgtgaaaggcaaggggcactgatgcatggatgaagctcatgctgcctgctgttcctttcactcctttcctgtgctttgtgtatgtgtgttatggcaatcaaatatttttagtattcattttgagtcctctttagacatgttagttgtctgtcttcatattagtttcttttctcatggctgctctagggattacaatttacttagagttagtattgtatttcaagtaaattataggaactttaaaatggtagagatctttttaaccatcttaccttttgcgaaamaattcagatagatgcatggataggcagacagatgtactttatatctacctacataatttgccattttcaatgcctttagttttttcctctgtagctattccctgcaacctaaatatgttcttctagtatttcttttacagcaggtttgctggtgacaaattatctcattttttgccaatccaaaaatacttccctttcacttttgaagaaaagtttcatcagatatattgttgtttaaaaaatayataaagaagggttrttggttttcagattttttatcaaattttgaagatgccattcttgcgtcttatggctgttcattgtttctgagaagtcagccattaatcttgtcattgtttccatgtatgtaatgtgttatttattttctgggtactttcaagattttctcattatctttggctatcagaagtttgagtttgatgtccatagctagggtggttcttgttatagttatcctgcttgtgtttgctggttttttaatattggtaaattcatggctttcacaaaatctggagtttttagccagtacctcttcagatattttttctaccctttctcctcctcctcttccttctcctccttctcctcctccttctctttctctctctgtctctctctctaagagacaaggtttcactctgtcactcaggctagagttcaatggcacttcatttcagcctcaaactcccaagatcaagtgatcctcccacctcaacctcccaagtagctgagactacaggtgtgagccacygcacctggctccagttatacttttctttgacccctaaatgttatttcacaagtctccaaagctctgttcatttatatttaatcttttctgaatattcttcagatacaattttttttttattgagacagagtctcgctctgttgcccaggctggagtgtagtggcgcaatcttggctcactgcaacctctgcctccctgcaacctctgcctcccgggttcaagcagttctcctgcctcagcctcctgagtagctaggattacaggcatgcaccaccatgcccggctaatttttgtatttttagtagagacgggatttcaccatgttgagcaggctggtcttgaactcctgaccttgtgatctgtccacctcggcctcccagagtgctgggattacaggcatgagccactgcacccggccccagatacaattatttttagtgatatcttcaagtttactgtttcttctgcccatttatttagcacattttctttgaattctttgaatgtatttaaatagttgctttgaagtcattgctaaatccagcatctagacccactcagagtccatttctgttcattgttgttcttcctgagcatgggtcacgttttcctatttctttatatgtctggtaactttgtgttaaaaactggatattttagatatgttaagtagcttttgatatattacgttcttctgagaattattttgttattgtttacctagccattaactctcttggattcaaaccataaactgtgtcccctgccaagtgtgacagctggtatttctgctcagttctttccatttccagctgttggtttttaacctggcaccctggggatcttctccgtacctgtgcaatttagcattcagtcaaggattttggcaaattttgtagacattgctaagctctgtcttctgacacttcagtaaggatttcgcttcctgtatcctgagtagagcatggattcaggagtactcagtctataaaagtagcaaacatgaaatcttgtctagtgcagtctttctttcaaaggtagctatccctctggtttctctcagctattttggtgatccccagtgtctcccttatagcatgtcttatttagtggtcatccagggatttcagcagagattatacccagtgttttggtcccacctcttctatggcttacttgtttccaggattccaccctgatctttcagctaccctgccagcctttaactctgtcctgtgccatcttaaaatataactgcaattttttaaaatcagatttttttaaaaagcctttaactcaaattcttactaattgctgttggtgtctttcaatggttaatgctctgttagtttgtgcctgctttttggtcactttctaatgcctttaaatagttgagttttataatatatatatataatgcccagattttataattgctattactggagtatttggtaaccaattttcttcaccattactagaggccagaagtccctccatttttaaaatatcctcaataattttctgtcattaagcattctctgacctttagtagctgcataatatcagatctcctaaataggccataatttttaacctgtctcccgtttttagatatccaaactcttttcagttttataatagtataattagtactataatgtataaaccatttttacttgggaatataagttttattggggataaaattataatttttagggcaaatttctagaaatgaattcagttagtaagtatgaatattaatacatttgatacatttttccaaacatccctgcagaatagttgtgccagttttcagtgccacctatgaaatgtaaggttacttttttttaagtcaaataactttaaacttatgagatttggtggtgtttggtttctgctaaaagaattatttgatttgttttataagcaaaaaaattattcctgattgttttataaactgcataggctatgcttacattaagaaaaatatcacttgtaatatggttatataaccaaaatagtagaatgagtaggagctttagtttatttagtttaattattagacttatttcagtaaatacaaaaacagaaaatttttaaattccactatagggaactaattttgttcacaaaatattttagaatgaatattctaaatattcattctaaaatattcttttcctgtttcttatttcttcccttcccccctttttaaaccactttgagatataattcacataccatacaattcatccacttaaaaggttcaattcagtagttttgagtatattcacagagttgtgcaaccatcagtacaacaaatttcccttcccttttgaataacaaaatgggagtaccaaatggaatcccagtggcaaggtcaggaaggagagagattatggggcaaggagaagagagattctgccaccagagaagctggatttttctcctcctcactcccaaacactgcccaggatttcagctgtgattatataaataacattttaaaggcaattttgtgcatttttcaaactgtagaaaactagtcatggtgaagaagtttctctgtgctaatgtgaaaatgaaatcaagatcattttgtgttgtcattgtttygtaaagatgaaaggtggaccgggcatagtggctcatgcctgtaatcccagcactttgggaggctttggcaggaggatctcttgagctcaggagtttgagaccagcctgggcaacatagcaagaccttgtctctataaaaacttaaaaaattagccagccatggtggcatatgcctgtagtcccagctacttgggaggctgaggtaggaggattgcttgagcccaagaggtcaaggctacagtaagccatgaccacaccactgcagtccagcctgagcaacaggacaagatcctgtctcaaaaaaaaaaaaaaaaaatccttaaaaaaaaaaagatgaaagatactataataacaacaaccaaaataaaaaacacttcagggtgtttattagctaaaaagtattatccgtaatacgttttatattagccaaaatataatatttatcttatgctaacagtactgtagcaaaaatgaactctggaaaatatggctcttcacattttgaagtcagttggggaagtttgaatatggacaacatactaggtcatttgaggaaattattgttctttgtaatgttctttgttgccatatggtattgtggtcataaaggaggatttccctactctttggagatgcatagtaaaatatttagtgaattgatatctgtgacttcttcaaaataatttcccaaaagtatattaatatggagaaagaatattatgctttatatagataggtgaaggcactacaacaaaataattactaatatttgttaaatctaagtggtgggtatatgagtaaatttaagtgtttatctcactcttgctgttactttttcatatatttgacatttttcattaaaaataaagttttggaaaataggtctctgaggccgggcgcagtggctcacacctataatcccaacactttgggaggccaaggtgggtagattacttgaggtcaggagtttgagaccagcctggccaacatggtgaaaccctgtctctactaaaaatacaaaaattacctgtatttttttgtattggggaggctacggcatgagaattgcttgaacccaggaggcagaggttgcagtgagccaagattgtgccactgcaatccagcctgggtgacagaaatgagactctgtctcgaaaaaaaaaaaaaaaaagaaaagaaaatgggtctctgaatattctagacacaaaacaagaatatgatcttaatggtatgtttagtttgctagtattaggtaacatgaggaagatatctattcatatttgtcagtatatgcaaaaattawctttaaaatgcgattgaagaaacaagtaacagtggttatctgtggagagggaataggaaaagtgtggatggggcaggaattggaagtaaaatttgtggttacttttttatgctttttaatattttgaaacattttattatctaataaaaattacatattgaaagagagaatattgtcattaaagattggagcctaaaaaaatagaaaaatttattttatgctcagaaattttttcagataatgctaaagcactgsgcttgtaactgttgttgacctgctgataatacatttagaatttgcttcgggggtattaaaaaattggacttctttttctttgttacaacatgtcagcattgtttttcttttattgtctttttataacatgttttcactggggacttttaaagaaaaaagtatattatgagtcagttttgtacatattgggtttttttaatgccgtgttgtttcaaataaatatagattggtgatatctcaattttcagtgctaataaatttcctttgctctccttggctcaggaaattggctaatttaactgctaacctatatagaagtatttatatgaaaaatgacatcctgtagtatctgaaaaaagcagagcacacattgttaaactagtcagacctggtgtggaaacccacccacccttgccacttaataactggagcaagtcacttaaccttgtagagacccagtttcctttgctaaacagtaatatcctaccatctacgaggttgttgtggtgattaattgaattacataaacaactcttacttgtagtgtcctcatttaaagaaggtgcctgtttatttttttaatgtggattaccaataagtatgaagggctagaagtttaacattggttatatgcattgccttatttgtttacaagtcattctaaagagaaggaaacttaaaccattttacatataaaaggatactacgtgaaagtaatgtttaattaaattaaaatttaatcaatgtatctttaaactcaccaagtaaaataaattcctgtgttatcaagtttttacctcttggaattaagctttaaattttctatttcattttaccagtgggttcactggtgattggatcagcaactcyaaatatcatgatgtcctttacaaaccttatatattgtccatagtaaagtagttgtcgtaatgaacaagttttggcagaagaaagatttctatggtagtcttttgaaaatcattctaaaatgaagattgtggtaaaaktcctyttatgatggaataaagagaacaacttttattaatttcctgtgcatgtggatattcaaaagtgtatggattttttaaatgatgattctgtaagaactcatagttgattacttagccacctgcaagatattcctttgaggaaaaaaaaaaaaatcaccagacaagattttcctagcttttcttactaagttgtataatgtgtcattgatgtctgtggctgtctcttactattagaaatacttttattacctttttctagaagacgtatgacatgtaagagctttcttaaaatactacatatttggtagttgtgtagcaattacattgctttaagaaagttggctgttaacagtagcaatttgttacacttttaaattttgggaataccttacattgtttcattactacttgtgttacaattctatctccaagtgaacatttggtgaattttttttttttgagtagatgtctaaaattgaagggaaaaaaaaacaaaaacagatctcttttggttagctaaatgtcagttgcttaatccaaaaagataaaaatgttttgctggactaatccctgtagtttcaaagcattttcatgtgtattattccatttgatcccactaaaactctataaggtggggtaggtaagtggtactttgttttatagatcaggaaattgctgtcaaagacttgaagggacatgcccaagataacacctgaaaattctgtaagtgcataaatgctgcttaatgattatctgacmcattccctaatttacctttagtctctctattgtcaaaactcctctggataaaatgttctctgttgtttaaatgcaatgattttcccttctctttatggagaaatattgatgaaaacactaaatctctataaagaaaaaataaatcagtgaaattttgcagtaagatgggaaaagagaaagaaatgccaaagtgaaaattaacttcagaatacagtaagtcctcacttaatgtcatcagcaggttctttgaaactgcagctttaagcaaaatgacatataaccaaaccagttttacccttggctaattgttataaacaagggttaagtttctgcagcacattcatggtcacaaaaacatcaccaaacttctaaagatcaaagcatttctaatattaaacattgaagtacatatgagctatacttaacatttaagaaagattaattaaaaaaaaaacagataattatttacccagttattccagttcaaggttgctggttgccagagcctaccttggcagctcagggtgccaggtgtgaaccagctctggccagtacgccatcccagcgcggggtgcattcatacatacatattcattcattcattcagactaggaccatgtagacatgccaattcacctaacatgcacagctttgagatgtggragaaaagctggtgtactcaaaacccatgcagacatgagacaacatgcaaactcagtacaggcagtggccccagcctggaatcaagttttttgtgtttttttttttatcgatgttataagtaaaggacattgaaaagaccttatttgaggatcttcggtggtttaatatttgatagcaataattagctaagatattgtagaggtgagcctaatacaatgtgttatctgatgtgaaaaacaaaaatatttatagcttaaaacagtaaactttacatactgtatatactactataactttctctcctgaacctaattaggaaaaaataagttattgtacagattttcagggtcttttaaacataatcttaggtgagaggagaaagctttctaaatagggtacagaacccagaacacatatggggaaaaattgaaaatttttatcaaatgaaaattagtataacccaaaacatgactaaaatcaaaagacaacaaatcaagaaaaaaaattacaaaacataggacggataaaaggcaagttttcttaatgtataaaaagctctttctaaaaccattaggatgaccactggtggctaatgtggcatgattgtagaatttttaaaaattaggagatgtctacctgtttgtcaatagaggattggtttaatgaaatgtgattcttcacttatggaatgtaactatgcagctgttaaaaattatcctagaaaagtgtctgtgatgagctactactaattgaaacaggcatgttgctaagtaatgtatacaatgtaatcctatttattagaaaaacaacgaactccctttctagatatccatatatgtgtgtgcatgtggatggataacattggtgaactaggattggcaggttggaggcgcaggaggaattgcaatggggtagggatacagtgttagatttttctctatcatctttacattatttcactcattacaatgagtatgcattacttgtgtaaatttttttaattataaagcataatagaagtgaaagagggagtaacactcaatatgtaaatgagacattcataaacaggtatacttctcagaaaaagaattccatttgctgccgagcgcagtggctcacgcctttgggaggccgaggcaggcagatcatgatgtcaggagatcgagaccatcctggccaacatggtgaaaccctgtttccactaaaatacaaaaaattagccaggcgtggtggtgcatgcctgtagtctcagctactcaggaggctgaggcaggggaattgcttgaacctgggagggggagattgcagtgagccgaaactgggccactgcactccagcctggcgacagagcaatactccatttaaaaaacaaaacaaaacaaaaaaaattcaatttgccattcaacactggaagcttatgattaaataaatgcaagttaaagcagcattaaggtgttacttttaacctaaaagattgaccaagttttaaaagtttgataaatgcccagttagtgagcaactagaccattctcatgcccattaagagggaatgtgtattaggacatactctttggaaggcaattgggtaatgtttattaaattttaaatacatactttatgacttggaattagacttgtaggattttatcctggagacctatccatgcatgtgcaacattgtttatcgtagcaaaacttgaagcaaaagaaaaatgttgaataagtaacctactgtacatccacagaatactgtgcagctgtaattaggcagagcaccaggatactttctgttttcagcaaacacagtatacaacaacatgtatggtatacttccattcatgtttactctgagaaatgacagtgggatctggagtatgtggcagattcatttctgttacataatcttttgtttcttttcaatttttyaccatatgtatgttattgttatactttttaatgatttcagaaaagccattgcagaaaaaatgttcctcaaattgaacaaattgatctttataaataactaaaaaaggaaaattaaaatgcatgaatttggctttttccttgtaattgtgggtgatagttattatagcaaactctgaaaagagaacgcatgcttgtctttaccacacctgctcctacttcactcttccccgtcttaaatgctatcagtacttacccagctgctagagctagcaaactagaagtcatctttgatcctgtcttcccttatccccaaatccaattcttcctgacaactcttacctcccgaacatcgctccagttcctccacgtcagtccatctcyactatcagcacccagaccaggccaccaacgatctgccttttgcctatacaatcatttgcttgcttgcctacactcctccttttatgtaacctattcttcccacagtatccagagtgaactttagaaatgtgaatcagactttatcatcccctgtttaaaagcctggaatgcttttccactgcacttagaataaattgaaacgcttgatctggcctagtgtccctgtgtaatctgcccctgcatcagctctccagaggccctggcactggagtcccctcactgactgtcagctacaccagccaagcttctgttttcacactttgcagactcatgcctaacttaggacacttgtaagagccactcccaggtcttcactggcaggttcattcgatcgtttctggtctcaccttgaagatctctgcttctacatgttcttcacaacaagccagtctaaagaagcttctcatcagactccatcacatcaacctgttttattttctattttgcacgtcacacattacaagacagttttgccatttttcacattggcattccacttaactgaaataagtartcttaaattctaagaatatctgttttcccccttgggatccaagaaaacattttcattttgartaaagagaaaaatagcccaaaaaatattgttattatacttaaattgacattcaaggaaaaagaaggaactcatcccaaccataagatatattttgtgccaagtgtagacccaatctataaattgtggaatcttcccactggctcattgctttatttctcaacagttcatttcacaccagatctatctggaaaagtctggtattagtctagtgtaaacagtctgaagttcagcctctctcctgctgtttcagattcatctatctcgtagagactcttcttatcacattaccagtctctaaccctaatgattccctagaagtgagagttttgggcctaattattacataaacttttctgtatcctttgccatttacctcatactgtatgcttgatgccatgtaaagcccagattccattagcagaacataaagaagaaaggtttttattttctttcttccttttccttaaagataaaatgagaacgattagtatctctaatttgttttttgttttttttttctttttatactttaagttttaaggtacatgtacacaacgtgcaggtttgttacatatgtatacatgtgccatgttggtgtgctgcacccattaactcgtcatttaacattaggtatatctcctaatgctatccttcccccttccccccaccccacaacaggccccagwgtgtgatgttccccttcctgtgtccatgtgttctcattgttcaattcccacctatgagtgtagtatctctaattttaaaatgctattctgagatttttattttagcattttataatgctttctaaaaaatacagtttccaaaagttaacagttttcttgtgtcagcattcatttatctgagtatttccttaaaggcaaaataatgacggtaatttgtttcaaaatactgtagtgggccaagtgtggtagttcatgcctgtaatctcagcactttgggaggccaaggcaggcagatcacttgagctcacaagttggagaccagcctgggtaacatggtgaaaccccgtctataccaaaaatacaaaaaattagccagccgtggtggtatgcgcctcaggaggctgaggtgggaagagtgcttgagcccaggaagaagaggctgcagtgagctgagatcatgccactgcactccaacttgggtgacagagtgagaccctgtctaaaaaacacaaaacaaaaatacaaaataccatagtgatgtttttactttttgcattttacaatttaaaaacttattttataaactgcagttatttctgtcaacactgacatattttgaatatttcttctagaaaatatgtagttttactatcagccagttactttgttctttgaaacattttttaatgttagtatcattattaagaggctaccagaagttcagagcatgaaaaatagccccattttgattattcttactttataaaggtttttagggctgggcgcagtggctcacacctggaatcccagcactttgggaggccgaggtgggcagatcacgaggtcaggagttcgagaccagcctggccaagatgttgaaaccccgtctctactaaaaatacaaaaattaagccaggtgctgtggtgcaygcctgtaatcccagctastcaggaggctgaggaaggagaattgcttgaacccaagaggcggaggttgcagtgagccaagatcgtgccactgcactccagcctggctgacagagcaagaatccatctaaaaaaaaaaatgtttttaggcatttcattacatttgcaatatatttatctaataatataatcttaatcactgaaaatgtataaacatgtaaattaaaggtaaacataaattgaaagtatcaatacatgaaaatattttaactcttgagtaataaaccttgttttctatttcatagaaaatataatggattaccgtgatatgttagaaatggatttgtcgctgccttattacaaatgcagcagttataaaatggcatctattatgtaactatctttttgagggagcgstggtggtagtaaaagaaacagaattgtttttctgcctttagatcggcatgagaagttgaaacacagaagatgtcgcaaggcagcaaagagctgattatatgcagattgtcctttaacgctgactatattttatataaaggtgtttctaaggaccaaaacagggtacacattgacttcgttgtagtagtttatgttctgttgaaaagattatctatctttattgctgagttttcctcattttttattctttattgtcctttttattcttttgtctttttctttaatctttatgtttttaaaattttagatgccaaagtgtttcataacacagcatccaacaacctccaaaccataagttgtaggcagaaggaaggaaaatgagaatgaagtagtttggtagctttattcttcagcatctgtttgagagtaatctctgaatctgtttgtttttatcacaagctatgcgcacatttttatttgtgcattacttctttcataaaaaaaaccaaaagtaagaaaagctaccattttaaattataagatggtttaattaactgtctggtttcttttggttgggtagatgcatttaatttgaagagaaatatctaaacttacctcatgcagcttaaaaattacaccctaattattgatcctgattacctagacatcatctgttttcctaaactcgcttcatattaattcatcatttgggaatttgaataccattttctcccggtgggttccttaatagcatccattttactgatcctgccttaaaacagttgattacccactctgaagtgtagtgataaagaatgtattaggcatcaaggaatgaatccgttccatttaatcctaagtagtttaatatccggaaaagacctacagtaaggatctgctgaaatgggtaataagatatcagtgtgtttcatataccagtcagatgaagttcagtttattttatagaagtttaattagaccctcttgatcttggctaagtaatgcccagaggaggaacagaaatggttttccaaaaactgtttttcctctactcagctgccagaacaaaatttaattgagttgcaattgagaccccaatcctccagcatttcagggtaggatatcttggtcatcaaaaataacctgagcatatttcctagggtgtttggtgtttggatggcacggtaaygggcatagagtaagcactcagtaaattatgcctgactgactggctcagtcttaagttgctgagtttggcaagatgcatccccgaagtgcttactttttaacctgttgaacagaatcacttaatattggcctttatgcctcagaatttctgccaaaaactaccattacttttggtataattgatagtaaactgttctttccaatagtaattgctctggtaattcagctgggccctgagactaatggtgccagacttgtagctttcatgggcaaggtaaaaattttcctaattattgagagattggccttaggttaccaatgtttttatttcatttaaaaagtataccaaaaaaaaaaaacctactattggccgggcacagtggctcacacctgtaatcccagcactttgggaggctgaggcgagcagatcatgaggttgggagatcgagaccatcctggctaacatggtgaaaccccgtctctgctaaaaatacaaaaaattagccaggcatggtggtgggcacctgtatcccagctactcaggaggctgaggcaggagaattgcttgaacctgggaggtggaggttgcagtgagccgtgatcgcaccactgcactccagcctgggtgacagagcgagactccatctcaaaaaaaaaaaaaaattcctactattatttcatttaaaaaaaaaagataagcttaacatcacaaaagtaggaaggacagagattcagaataaaagacaatcatttaaattgaataaaatttaagccttcataagaagttaccaccctgttgttattttcctcatttcaccttttcttgactcttagaagtcacttcagaccattgcaaatttgtgatggtaaatcatgggatcagcctggaagaggaagttttccttaaattggctataagaggggcatgtatgtggtgacactaaatatgggattagattatctagatgtaagtttagggtgggagccaatgacacaacctctttgtttttgcttttcggttttattaaattaagcatgtattgagcactgctgttttcttggcactgctgtagactttgggataaaacatgtgcgtgatgcacagatatctgttgctgatgatcttagaaactaggagaagcaagtaatactggccacactggctacagtaagagaccataggacagaatttggagagttactaaaagcctgaagtctgtactgatttcatgtgtcttaagccatagatgatccacagacccatagaatgaaagacagagatggaaaacatagccaaatttcactatggtgttagtgtcttaagtactgtcttgaaatgaaaatatgtgtttaactcttacagtgatgggacagttgtatctaaaatcaaagtaaggggaaattttaagagatgtttggcaaactaacttcatatattattattatttccgaagatggaatatactatgcttctattccaacttgaagcttattagaaaaatatcttgatataaatgattgtgtgtagatttctcctccccagttttaaaaagactcaatatgatgatttacaacaggtggatgtgcaatatcccaagggctatggaggctaccatatgaggtgggatatcattggcccacactggaaagagaaatagctctgtaagtagtggatgtttatgtctctaatacacattcccaagtccttcctcattatcagtttagataattaaactgacatcttccagctggcatctttgtagacmtttttgtctgaacataagttagctttaaaaagaaatgattcataaacatgacaggaatgaaaaaaaaaagaaactagacaccactgaattgtttatagtggcaaaaacataaaaataaattagcttcagtgtccagtgctgcagtgagtttaaataaatcggaatatatccttggaaaatttttttaaataatgtatctgtttagtcagatagtatgcactcaacagcaataatgatgtatgttgattggcatggaaaatgtttgtgaaaaatgcagtatatatttaaagcagcatgtaggactgatttttttttaagtggtgtatatgcatgcccatctaaatacaccaaactgctttttcatcagttctgctcgcctttttggtggtgttctctgaagctattgatagaatatcccaacttgcccagtaactggacagaaactgcactcgacttatctgcaatttgttgatagaagttagcaaggagatmttacccaaaagatagatgggaacgagaaatgtggcatctttgaacctctcaggagcaggttatttgtggaatcagaragtgcctctcrccatctttgtcttcataacccccgtcttcccgcacagcccaagrtagtcagatgtaagaacagcagtactgcgagtcaagagtaaactaaattgttacatcttcggtttcagctctgtctaaaacaactacccgtgatgagatggagcaagatatgactaattttaaacattattttggcccttagttaaaaagttgtgtggagatttaccctgctgctgtttgaaagcaggaagctggggtttatgggttaattcagtaaatagctgccctctrttakccacctttccccagagagatagtcattgggaaatagtcctccacagtcagtttctgcaagctgcaatagaatcgtggctagtcttagaatgccagtcccctggaattgttattccaggtcttagtgaggtcctaagagtgtaaatttgaaagatcagcactgtgcaaaccttttcaggaaggacgcgtttgtaagtgaagctcaaattgctttatctaaaaatcaattcactttgagaatacagctaaatgacgcaatcgttgatgaaatttctgattattctttcccaatctgtgctaaaatccaaaaggaataatgttggattatctgctcttttgaattaaatatccctgtttgccattctgtttgcatacatgactgaacctttgcaataattgtatgggatgtgagggagtatttttcttccaaaaattgataactgtataaccccaaggagtcagctatattctggactatgaacttgaatgaagtttgtttacagctcagaaattattcaaaccagaattctcaagaaaattatttttggttcatttcccattttgcataaaatagcaagcagtgaggaagaataaatcgaaagtcatagctaatcaagactttataactatttaatgctttgtttatatattcatctggcaatttttagaattgcttcagttctataaattatctggtacatttgatgataataggtagccaratatatttgttaatgatccaaattgtatcgggacagtcactgtaacctatacctttttttttttttttttttkgagacggggtcttactctatcaccctggctagagtgcagtggcaatcagctcactgcaacctccacctcccaggctcaagtgatcctcctgcctccacttcccaggtagctgggactacaggtgcacaccaccatgcccagctaatttttgtattttttgtagagatggggtctcaccatgttgcccaggctggtcycgaactcctgaacccaagtgggctggctgcctcagcttccgaaagtgctgggattactggaatgatgcatcacacacagcaacctgtaccttgagttaccttaatttaagattattttgaaagaatacaccatcaatccagagcaatcctccaactagttgaatcattacgggctctaggaaaagagttagcatctctcccataggattcagatatgaatagactagcaccattagtactgtggttccttcctccagccctattaaccattcccagaagacaggaggaaaagcacataaagcccattgctatcagagctctgaggtctgtaaataattatgccttcttgtttttgagtaaagtaggatgaaatgtattaccacagttaataaactacattcaaattatagcctccaaagcaacaaaagcattccacactttcaaaagatcatagtgactcaattcctttaaagagatgtttctaattatagttgccaaaatctattattttagttgtgatatatttctttttaaatatttattacctttatagaatactgaaaatttaaaaattgaaacatatacattaagtaatactccaatttaaaatggaagaagtaggaattggaagaaacagaaataaataattagagtgatgtagaagttggaagttctgctgcagaatcctttgaaccaaacacttggcagctccccagaccacatttattgcctttttgtgtatatatttccactggccaacttgtcgtcttggcttgaaatgtagtcattgtaacaagattggtaatatttaaatatcttttcctttcatgcctgtcttatggaactaatggtttctgaacacaaattattattttatctttaaaatatttttctaaatattattagtttttataaaatagaccagataacaccatagctgtctttaaaatactgtcataatggaactgaagttagagacattttaaatctcccactgccatagataaaattcgtttttggcccagcctcacctttggtaaccgggaatgcccgagacactgtgaccccctctccaccagaccaagggagctgaactcttactctggcctcatttccctttgtcaccaacccccccatttgagtgtcaaatgcccatgtccatacatcattctaaacattaaagccttataaacacatagattcctcagtagatttatagaatttaaaagacaaaaatgactttagaaatcattcagttcatctccctcaatctgtgagtgaccaaagcttacatgcttgctatgcaagacaggaggcagccatytctctgagacacacagacacatttcagctgtggcggcatgtggtagatagatgtgtgccccatgtcctcatctaatgtctatagttgtgccatctytaatttcttgaaccccttccctgacttataaagagccagtagaaccgttgatctcataagtaatctaactgaaatacattaattctgcagactgaatgaatggtaaccaaagatgtcctttcatatgaacatactttatattctaaatccagttttctttctattagtataacatttcctctgctagtgattttaatgttcttgcttccgtggttgggggttggrggggtggtgacagaaaagagtaccattttccttctgatatgaatgtgtacaaagaggraggaaggataaatttaaccctttttaaattaaatgttaaraaatgtttctaaacgtattgaatgcttttccagtatatctctggatttttctcgattcaccacattaatggcagagaacaaatacatggatacaaagtaatttgaggtttcatttagtacatatatattgcttaactttctcatctgagtgtgctaccacatgctctaatccccaaacttaaccagtccctgaagatctggaaggcgggctgggcttcctcaacactgtgttctctttcttttccaggataaagtcatcatctcctcttaccctgatattgccttatgtcgcagctttgtttttaatatttctccagaccacagaaatttgtagttttgctaaataggcttattgacgttagtcagtgatggagtgattggaataaaacagtgatatgtcatgacaactagttaatgaccaattaccatgtgcatttgccatatgttagtaaactttgaaagtagctattcatcctatttggatgattggaaattcttttttataagccaactatgaaaataaaacctgactcacattcccagagcctaataaatttagggcattttgtaaaataaatgaatatatcattttcagatctctgtgtcttatttctctttactttttcttagatgtactgtatatcagtgttttggaggaaactctaggttttgctgtagaaaggagcaggaagtgagagtgaggcgagcccaggactgcaagcgccagtaatcctcatggtttctctcttcctcagcagcctggcagcagacgccaggacaggactgaaagggtttacccagagctgtgactgatacatggcaaaaaacaaagtgggggtggacaccaagagcattttgatggggtctaccttagaaagagaggaaagcaagaattccacaagccrttaagacctggctccarcctgtccttccagccttctctcccaccaaccttcctttcctccattctgcagtgtaacagctgcctctggttcctggccagcccctctgctcgtgtgttctcccttgcccagattctcatcattttttcctcaccaactcgtacttgcccttcaagaatcaactcaggagtctcttccttgaagaagtcttctgtgatccatccccactacgctggattgtgtgtcccagctttagatgctcagagaactcttcacacatttatctcggcattcatcatgtgtgattggaactatttatgcttagttcttgttctgtcattgcactattaggtctttgagaaaaagtgattgattatcataaccatgcttgtaacccaatgccatgtatagtcctagcaaatagtaggcatgcactaaatgtgcatctaaactaaaagtgtaggattttagctatcagaaagggaatttattaggagaataacgaactttattcttttgaattaccacatctttcttgaagtgttaagtggctcttcagaaataaactgtacccaagagtactgccatgtctcaggagtcactttatgtgtatttgtatgtatgtatgtttataacttttttaaaaggcctagttttttaaaaaagcatttctccaagaaaggccatgaagcagtaatttctgaagctcatggctttcacctttccagatttttataacataattttgttgagattcttgatcataggttatatagagtacagaatgagttagcaccttaggtaatatgcttagaaaaagataaaatagtgtgaagatacacgtaagaaaggaagtctggtaaatgcaggaagatttggagagggatgaagtgagtgtataattagtgaatctttgaaatttatcttctatccacataaaattttgtatataatgtgaatgtccaaaattccttggtctcttaggctgaaattaaaatgttgaagagctttatgtggcatttgggcatggtgggagtgttttggtcagattttcttttatattytatgtggaatggttatgcatctatatagcacctgtattttccaaaagatttgtgtgttcaccaacagcaagtactcagcagcttttttctaaattaagtcaacagtaattttcaatttggagataggagacaaaccctaaaactggtagccaaagaagacagtgcttggttttataatatctagagtggactattagctaggatgcctttttttaaaagctgtctatttcatgtctgctatttagatagtgaaaaacggagttaatctgacccataactcttcgacgtcatctcttctttagtggtattggaaggaactggccctgggcctctggaggcagcagtattctggcagaatttggaaccctgcatttggagtttatgcacttgagccacttatcaggaaaccccatctttgctgaaaaggtgagattcttcaatgtgccttggcctgcaaagcaacacttatgagaaacagtattgtctctgagaaggtttaggaatttttgaagtggaaataataaccaaatttgttatagctctttctgaagttttgcaacatgcagcatttcatttagccaaactgtaaacctacagcctttccagtgcaccactctagttcaggatgtgagggcacagcttccacctctggttccctttaccttaagttagttacttaactcatctgaagtttgtttccttatctaaaaatatttagtaataaatgcactgcatgagccaactatgtgaaagacagactgaaagtgtcgtacaaatgtgatgttgcagctgaattggtccctcgttttccgaaagcaaaccaaatatttggataaattcatgttccccccatcactctacttttattttcaacctgctttttggcttccctttacagtaaaattgcttgaaagagtcgtccctgttgtctacttttcaagtctcttgaacctgctccagtaggacttttcccccagccacacctgtcacagtgaccagtgagcacaacagtgccaaagccacttaccattctccccttcatcttccttgccctcttagcattcgacacagtcagttcttcgttcctgagatacacttcgcgcttggcatgtaatactctcccagtttgtctcctcttttgctggatgctccttctgtcttttttgtgtcctcctcaacaccccaccctctaaatattggaaagccctagcactcaatcctgtgcctctgcttgttgatattcactccctacattgttgcatctagtctctgggctttacataccatctctatactctagactccaagtttattatttcagtcccaacctgtcccctgaactccagactctatatctgtttattaaacatctccactaagaggcccgatagacaagtcccacttaaaatgcctcggacttaacgcctagacgtgcttctccagtctttgctatcttggtaaatgacatctcactgtacccagtggtctcctcctggttcttcttcttggtaaaccccaggcccagtccactaagaaatcctttgggtgtctcactgcctctactgctgtcctgatctgggatccatcaggtcacctggtgtactgtatgtacaccatacagtagccacctgaccaccccttcctcaccccctcagccttctcatgrcactcagagtaaaatatgcccttattgtggcctgtggggcctgggtgacctgggccctggctctcctctcctctacctgctgacattctcccctttgtctcctcacctctggcctcagtagcattgcaaacctgctgtctcctcagggcctttgtacttgctcctctstctgttccgagtgctcttcctccacatttccacgtggcctactccctcacttctttaatattctgctcaaacacctccgccttgccaggccactctgactaacatgggatagcctctccacatcaccctgtcccgttaactctcaatcagctcgggttaccataacaaaaatgcagccagaaacaaccgaaatttatttcttacagttctggaggctgggaaatccaagatcaaactgcccatgaggtaggttttattctgagcctcttccctgggcttgtagatgacgagaactgtcccagtgtgtgttcacatgatgtcttctttgtgctctgagggagagaaggagtcacagagagagagagagagctcttgtgtctctcatgagggcactaatcccatttaaggctctaccgtcataacctaattaccatctccaaataaatctccaaatacaatcacactgggaagtagggtttcagcatatgaawttaggggtatgcagttcaatccatagcacccttttatttttttccacagtatttatcatctcctgacatactatacagttaggtgttacttaacagtgtttattcaacagtggaccacatatgtgacagtggtcctgtaagtttataatggagttgacaaaattcctacggccttgtgacatcatagttgtcataatgtcgtagtgcaatgcrttacttacatgtttgtggtggtgatggcataaacatactctactcccagtcacataaaagtatagcacatataattatgtacagtacataatatttgataattaaatgactgcattactgatttatgtactactatggtttttattgttattttagaatgtaccactttttttttaagttagctctagaagcaaggtccttcaagaggtattcctcttcaaggcattatcatcacaggagttgacagctccatgcgtgctactgcccctgaaagaccttccagtgcgataagatgtagaagtggaagacagtgatattgatggtcctgtggagtcctaagctaatgtgtatatgtgtcttagtttttaacaaaaagtttaaaaagttaaacaactttaaaaagaaattttaaatagaaaaaacttataagaatataaagaaagaaaatattttggtacaactatacaaagtgtgttttaagctaatggttattacaaaagagtcaaaatttttttaattaaaaagtttatmaagtaaaattacagtaaactaacgttaatttattattgaaagaaaaatacttttataaatgtattaataatggctaagtgtaccatgtttataaagtttacagtactatacagtaacgtcccaggccttcacattcacttattactcacttactaactcatccactgcaacttccagtcctgcgagtttcattcatgataaatgccctatacaaagtgccctgtatttatgtatagggttataaaatgtataaccctatagaaaggtatcatttttcatcttttatagtgtatttttctrtgtttagatacacaaatacttcagtacagtaacatatgctacacaggtttgtaacctagaaacagtaggctgtgccaactacatttgtgacagtgtgctctatgatgtttgtacaagaattaaattgcctgtgtttcccagcatgtatccctgtcattaagggacacatgactagacttattgatttattgtctgtcccgtcccactaggatgcacaattctaagagtgyggtgactttgtttatccactggccccttgttcctagtatggcatctggctaatggtagataactaatcagtgtgactatattcacttactgccattatgtttgtaataataagctaacagcagttatctttgttctaactctgcatcatttaagtcaacttgtatgttcaagaagaagaagaatggcatgaaaattgytttttagattttcayggtaacattttattttctattataggtaatgaatattcgaacagtactgaacaaactggaaaaaccacaaggcctttatcctaactatctgaatcccagtagtggacagtggggtcaacgtaagtcagaagatttgcattattatagctctttttggtactgtactcgtggagagagaggaagcrcaaaagcagcacagattttgttgagaaatgtttagaaaaggagaaargggcatggctcctttaataaacaggcttctgtcatcagattgtgttattaggamactggattgtgtatttttcatatataactccaagtgtgatgacatataagcacatttacagctattaatcagaaagggaagatctggccagagtagtgtggggatgwtaatctgtaacaagctggtcatgtggatagaaaggaaattcattcctttgtactaatgactatgagggttttatagagagtaggtagaccattctgcttcctaacattctgtttctgcatggctatataatgagagaggagcctgaatttttaagagttgggaaattggaagagcaaacagcctgtttttctcttcttaattttaagctgccagatataaaggtttcttgccagtagaattacctttaggatgggagaaagtattgcacaagaacttttgatcctagaagcctgcacttaagactcttcagacgattttgagcaggggcataaagattcagagtagytgaaagaaatgttctcaagctgatttggaaaaacagtagtagattaaatagctgaaaacaagtgaagaatattgagatacccaactgtagcaagagtacactgccttaagattttactctaatttgggttttttctttatattttaatatcatgttcttagatacctcattattactttagaagtacttttcttaaagaatagtttaataggaaagtatatgccaaaatccatatgctaaaatatgtctgtagctctggaaggcctagctgttgaaaccttaggactataatcaaggttaccacttacctaagtgtggtcaacagatcactggaagtccttgagacctctgaggaggcccacaaggtcaaaaatatttttattataatactagtataatgatatataataacaagacatataatacatgtcttagtcatatttactaagccagtacacagtatcttgcacttagtggatgtttacttacttaaattttgtgaatacatatgtgctctgtatctcatctctctttctgcctctgcttttaatagtggtactttgaaagactttctgccttttctaatgtgttgatatttacacctacagtgttaggtgatactgctgaagcctcactgagaacaaaggcgaacaaacaccaaatagtactaatattcatattttttcttttttttttcttttttgtgggacagggtcccactgtgtcacccaggctggagtacagtgtcataatctcagctcattgcaacctctgcctcctgggctcaagctgggctcaagctatcttcccacctcggccccccgccccgagtagctgggactacaggtgcacgatgccatgctcagccaatttttaattttttttttttttggtagagagaaggtctcatatttcccaggctggcctcaaacttttaggcttgagcgatccctttgccttggcctcccaaagtgctgggattacaggcatgagccaccacaccagcccccattgtattcttaatagcattttaaaaaaggatactggtttcacttatgaatgtgcttactgaaacagtaaaaaaaaaaaattagtgattctaataaataccaacctgtgagtacacacctttgtcatgttctgtgaggtgaaatggaaaatactcataaatcactcctgctgaattatgaaaaatgatagttgcatcaaggaaaagctcttgggtgttttgagttgcaagctgagctagccacttactgtttcacagattcaacatttttacttgaaagaacaatttaaaaaatgattatttaggctaggtagtcaggagccatgttcttgaaaatgagcttgtcacttcaagaaaaagtcacagtatttgtgccaatgattataatccaagtttctaaataaaaaatagaattttggaaaacttgtacatgctaccatgagcttgacacaaatacttttcctgttagattgatgatgatattaacaaatgtggttttctgatattgtataatggaatgggtcaatatttgaaagatctgcatagttcagtgagccaggattttccaaatgaccaaagcatgatattataagatcatatatggaaaacaatctgtgtaaagtacaagatagaccagtggcttttaatgtaacaatacgaaaattcattgatgtaatttctaattttacaatgcaattaacctttaaaaaagaaaccacttgttgactattgttgtaatatcaaagaaaaatatccacaattgtgtgaaaagcctgttaaaatatcctttctttttctgactgtattactgtgtgaggctgacttgtcttgatgtattacagccaaaacaacatatagcaaaggattgaaagtagggcagacatgagtatccagctgtctcctgtcaaggcaaacaagaaagagatatgcaaaaatgtgaaattgtgtcagtcttctcactaattttttgttttgttttgtaaaatataacttttttgaaaaattgtatatgttaacataatgggcatgtaattattattttaaaygaggtaacgaaaatatttttaaattattttaattttccaatgtagtaaatataggtattatttacataaattatttggggtgtccatttcttttgaagattacaaaagggtgctgagactcaacagtttgagggccaccagaggactagggataaaacaacttgtgtatatttctgttttgttgtttgagatgggagtctcgctctgtcacccaggctggagtgcagtggcacagcctcagctcactgcaacctccctgtcccatgytcaagcaattctcctgcctcagcctcccgagtagctgggactacaggcatgtaccaccacacccagctaatttttgtatttttagtagagatgggggtttcaccatgttgtccaggctggtctcgaactcctgacctcaggtgatccgcccaccttggcctcccaaagtgctggaattacaggcgtgagccacgctcctggcccttgtatatttttctaagtataaggtgacaggatgtgattctctaaaagcacaagcatttttggagtattcctcaccacacatttcaaaagctgaagaaaagtctccttcatttactgtttccttcctatgatttaggatttagaagctgctatgaagggggacagaaggagccagttgtgctggaacatctccgcttcaccttctgggtcacctgtatgctatgtatttggccatgtttcctagtacaaagagccctttatatttagattccttatgggccaatttcctgatggaaaaaaaaaacaaaaaacaaaacaggattgatgagtcttagctctctctcctgccccaacccccattctgtgttctagccagaggaaaacacacttatttttttattcttcaatcgaggcctgcttggccatgttcaggtctttgcttgtgccatttccttagccctcccacctctcaagacccagctcaattgccatttcttccaggatcccctcttcagtgctccggttgggatttattagcatccacttttcctctattctttccctgccccagcgctttgagtgctttcctatcacaaaccttttcctgatgattcacatccatatgcatcttcctaaggatccaaagcttttgcgggtagtaaccatgtcttagtcatatttactaagccagtacacagtgtcttgcacctagtaggtgtttacttacttgaattttgtgaatacatatgtgctctgtatctgatctatctttttgccccttacctttttttttttttcttttttggagacggagtcttactttgtcgcccagggtagtgtgcagtggtgcagtctcagctccctccacctgccaggttcaagcgattctcctgcatcagcctcccaagtagctgggattacaggtgcccgcccctacaccagggtaacttttgtatctttagtagagatgagttttcaccatgttggccaggctgatctcaaactcctgacctcaggtgatccgccctccccggcctcccaatgttctgggattacaggtgtgaaacaccacgctggacctgcctctgcttttaatggttgttctgcttgttctcttttagcagttgcccctgctcctcagttgtggctgaaaggcagtatccggtcctggtcactgataatatgaactgatcttgttactattgaggccagatggcagggtttcctgtctgtacacagagtatttatcatcccttgatttctataacagccatccatctatctatatytagtctagctagctatgtgtagtgtcactagcatcattgggggattgtttcaaagagagaaattcagatgaagtcaacaaaaattttaaaagggagatattgagtattttaattcttctttgtcttgattcttttgctacttgctttttctcttttttagatattagaaatccttttatgggacctattcttatgaagaaaagaataaattactccttcagagaagagcgtaatatttgactgactacagtacacctcacctttagagcagttggacataaaaataccatattatgttatttccagaagtaggttgatcctttcctgctgataaattcgggcctgctctccccgacatccactaagatgtttacacaggactgtgttgasaaacagccatccaggcctgaaggaagcttagtgagtgacatgctaaattaatgagaagacctgtttctcttctacgttcctttgtcttgttttttttttttaatgtgaaatttttataggcaggaaattttaaaaatagaaaactagcacttaccaaaattaattaaaacaaatgtattcttatataacacttttttcttttttaaaaaaaatccccagctgctcaaacttgcttcttccgtctattagaaaatcataacccaargggaggaaaacatcaagctgcttctggccattggttttcagctctcattgctttaactccaaatgacacgtctggatcctggccatcrtttcctatcacttcatcgagtcagtgttgttttgacaatgccaaaccatgatttgcttttccacgcatcacttgcatgtgtctcctacaatcatgttgataacaacagggcttattattgatgagttcgtacttagtctatttagtttgtaaatgtcagaggtttctgtgttgatttaggaaactgtaaaggtcacttcaagaatcasacttagaatttttaaaatatatttttacactaaaatttaaactataattctacactttctgcaaaaagaaaatcacatacttaactactttaaaacatggctctttagcttgagtagttacagccctttattaaggttgacatagaagaattttgctttgttcgtcagttatttgttgagtacctaccatgtgcaagacactttccaggggctggggtggactgggaaacataataggtctggtctctgccctcttggttcataatcttgtggaggagacagaagaaaatgttaccacattatgaaattacaggtgataagtgtgtgctaccaaaaagtgtgtgacaaaggaacctagtggcattgtcagagaacactcctttgaggaagtgtcatttggtcccagatacgaagtatgagtaagaactactaaagaaggggaagggggtcctagggtccatttcaggcagagagaacaaggcctatagaagccctgcctgagatgagatggaacctgatgtttttgaggagccaaaagaagggctttatagcaagtgagcagagagcaagtggagcaagactgaatggcatagagaagattgagatcttgcatggcaccaaacacacaggattgaaaggcttcgagtaaagggtgatctcattcatgtattaagagggctattctggcattaatgtggggaatagattgaaggggcactgtcattagaactctgggccaggcgcagtgcctcatgtctgtaatcccagcacttttgggaggctgaggcaggcagatcatcaggtcaggagttcaaaaccagcctggccaacatggtgaaaccccgtctctactaaaaatacaaaaattagccaggtgtggtggtgggctcctgtaatcccagctactcgggaggctgaggcaggagaatcgcttgaacctgggaggcggaggttgccatgagccgagatcgcaccattgcactccagcctggtgacagagcaagactccgtctcaaaaaaaaaagaaaaaaaatgaagataccttatcctacagttgtgagattgtraatacrtgtagtggatctggcatgataaatggcagtgaaggtggactataggaatggagtattaggaggaaaaacttcttcttctgccccatatcctttctgactgcccctgtcccataggtatttgacccttcagattcatagcactagaaaatttatcaaataataataggctgagcacagtggttcatgcctgtaatccctcttctgtgagaggcccaggtgggaggattgcttgaggccaggagttgtatatcagctgaggcaacatagcaagatgccgtctctacaaaaaatttaaaaatgagcctggcgtggtgatgcgtgcctgtagtcccagctacttgggaggctgaagcaggaggatcacttgagctcgggagttcgaggttatagtgagctatcatcgtgcctctgcactccagcctgggtgacagagtgagtttagaaataataataatggcaagaacctgaggagcttcttgttttatttattacaaaccaccttctaaaaaagatttgctaatactcatagctttgccagaattttatattattcagaactaaagcaaataaaaatgtatttaaatatatactgtgaacattttagttgggtgtttttcactagagaaccagatttttagaattaggggtaattacatatcttttatcttccatgtttacaaaactactctggtaattatttagagtatgttacattagttaatagcccatctgctcatttcagaatatctttctgaaaataagagatttgttggaatttaaatgtaacagtgacttgcagttgacatagggttgcatcctagttgctaatgtgattttgctgcrttatctgaattaaaagctgaatcactctaaaattcatttccctctctttccagatcatgtatcagttggaggacttggagacagcttctatgagtatttgctgaaggcctggttaatgtctgacaagacagatctggaagctaagaagatgtattttgatgctgttcaggtaacccaatatttaaatcatctttgccactcagccctaacttataatttgtatattaatcaagttttaatgaataagtggtatactacatgagtgagttacaaagtatttccaattaggtagagttcgatatctgctaatatcatcgtaataatggtaatcatatttgatgtttatttctaatagggcygttaaagtttttgcatggtttaaacctcagttaagagtcacatatctgaaaaagtagtattctttgataaatatgaattctctccttaggaccacaatttaaattatgcagggggaaatcctgaatttgtattctgacaattgcctaagttaaaattgcctgagaagacagacagtcccaatggctacctccatgtgaagtaaacttgtccccagagataaatggacagtactctaaggaaatccacacataaaaatctgaacaaactcatatttcagggaagatcattaatagtatcaaagattctttacagtggagaagtaagaggcaacagttgagtgttgaattgcctaccatgtgctaagctgtgtgttaggtagctcctttaaatgaagcggtggagttgggtttttttctctctcacagtacttgagattattacccagttttacagataaagttgctgtacctcagagagattacatgtcgaaccaaaattaagattaaagtttgtctatatcagcacctgttccttttaactcatccactgtggatttatttgtaagaatttccattctacacttaaatcttcatttactaatttgcaagcagtaagttagtaaggtaagttagaaactacttaaagtctctaggaggaggctagtataaaagtaaactaagaaacacctccagttaagcctcaatcaaaaccgaaaataaagttagaaagtaaataaagttagaaagaaaattactttatctaaaatatttgtactcttcaggaacaaaattttttagtggaatcaggtgcttttgcgattaagtattttatgtggtaatacatatattcttttaatattattatcaaggcttctcaagtagtgttgtaaaatagtggctcagtcctcagaaaaattttatttttcttgayagcttagaaattttttaataaagtgttaattcataggaaaaaaatggaaatttgtaatcccaaagatgtagccattataaaattggtctttctaacaagaggtctgggttattttgacataggcgtacttktttatttaaatataaatgcagcttgctttgttctggttaactacactgagtatgacattggtttcctttacaagtcttcactacttcacacgtaggaaccagaagcgccttagtgagaacgttggcctacatttggcacagcctttataaaggcacatgattaacatcaaaagcaaactaggatatgatccacatggcctcttttaggtttatttttcctcattgctgtgaggtttcagattttaacctggggagttctccatattttatagtttccattctgtcatcctctaattaccatactggcagacattttaattattctaatcttaaattggccgtctaagatcttgatgttcaaaaaaagacagctttaaaayattatttgaaatattttcttcctaattcctaaaaccatacccacacaacttttagtatattgtattcagacaaatcattgacaggaaaatccattaagaacaaataaagtcaaagtgtttcctgcttctcttagtagtaaaagctaatttttcaatccactgtatattttcaacttagaaagcaaagctagaacaactaaatttctgttttgagaagtagcattgtcttatacagcaaagtttatttctgctaagttgtactttagaagattattgtaaccaaggggaggatgctgtacactattgttctggacaattgattactaaagatatggctactctgttgtagyttcaagtagattttgggaagcatttaatcccagagtgatatgttttatttgattattttaataacaaaatattttgagctttcaactggctatcatggccctatctggagactacactaggaactcacaatggcaaatgatacctgggcagawgacatatcagacacttacgattctgaaggcttcatcaaaccagttttttaaatcaattatasaaggattaaatcacaaaatatatmgtactcttttttctaatcaattatctgtatccttgacacagttttttcagatctactaaagactrtccttctttgtatttatttatatttcccatggccacacaaaattattgtttgaaggtcttggaatttcattgtagtttttattaggaggtagcaacttggtccgaatcatgccagaaatactttatttaggatccataacagggtaataatgtttctctaattcatcctcaaaagctactactcttgccatgtagaaagaataatttcttaggtgatgaacaagtatctgcttgaaggactttattgcaatttgtgttatgagaagtataaatagctaagatrttcagtcgcataaaataagaatgaaatattaatgtaataactaaaccatcaataacattagcttaaccacggttaatgagcacagtaatatgttcatttatttcttaccatcttggtttcattcgtttatttctaataaaggtaggaaaggttttagcttcctgtgtgttcattttcattcattcttctctatcacaagtttttttctgtgtctattattcccaaatgtgcttcctaacaaatccctctctcttgatagcagtgtacaggtatagacacagtcatgtcctttttccttccatgaagtaattgtggggcagtggggagaacattttctgttagagtaattggagattagcaatgccaaacacactttatttttgctttttaaaatataaggcatattttacttacctgtctagtttaagagaatatcaacagacctgggatagaaataaaagatgttttataaatcatttttgtaaacattatcatttctcccaaatttaaagatttttctgatttttaaaatatatacatttattcattatataatagtgtgctttttaatagaagtattagagaggaacttgattcaagcgtcaccactttggagatgtaaatgataattataaatgacttttatcaagtgccacttgcattagtgactgctttataaacaaaatgtggcagagtcgtatcaggagatcctgttgttcccatttatggattaggatgctgagatttagagatatagtaagcaaattgttcactcccacaaattagagatagtgtcagagctggaatttgaagccaagtcttcyggccccagaacacctcctctttgccactctattttgttatccctccaagcctacrgaagtgaaaggaagagttctgccaccatcctggatctcatgcacaaatatgctgtgttcttcatccaccttagggcctgggctgtgtyatttcaccacttatggaaatgaaaatgtaccaaaccaactattactgctgcacagtggcctgtctttgggaaggrgaaagttttttgaatatgaggaatacaatgtttggtcacagaaccaagcaaaaccaaatgtgctggcgcagcagtgttaattctgactaatcaaacaaataaggcataaactagaggaggaatacagaaagcaatagcwtgtaatttcaggttgaatggatttttaacaccaaactctgattgtcaggtgtattctattcttttttttttaatgttgggcatatttttagtataaatttgagaagagattacaaaatgttaaaaaataagtgtttttcacaggctatcgagactcatttgatccgcaagtctagcagcggactaacttatatcgcagagtggaaagggggcctcctggagcacaagatgggccacctgacctgcttcrckgggggcatgttcgcactcggggctgatgcagctcccgaaggcatggcccaacactaccttgaactcggggctgaaattgcccgtacttgtcatgaatcatataatcgaacatgtgagtacatgttattcttcatttatggtctattcccacatgctttgatttmatgcagttttgtcattgctgccctcaaaagactatccrctctgcctatgaagcttgatgatcgtgattaatgtctcaaaggaatgtatattttattttaaaaggcaatgcttttcttcctaaaaatatctacctttagtttaccaagaaacaaaaatccaggccataaagagttaaagccagcctaatttactgacttctgcttttgccaataacattgggcaagggtctctatctccctgcaaagagaaacttagcattttattaaccattattaatcttctccacatcccccatgaaacagatcatgaatcccactcccttcttataaaataggaatttgaaacacaaagtgtaaataactggccttctgttacgaaattacttaggattgtcaaccactaagtttctggctaactcaaatggtatttcatggtgccttgtatctgcctggtgggtgctcagtaaatgggggttaaatgaaaaaaataaattgttaatattttctaaaatggactcttttcaatgactaaattgtttaagtatatgaatattatatattacatgatgtttataactcgtttttaaaatgactactttgacatttctcttcagtgttgttaaagtacagtcagaccttcgtatccctgggttccacaactgcagatcagaaatgttcccaaaaaatggatggttctgtctgtagtgaacatttatagagtttttgttcttatctttattccctaaacaatacagtataacacctagttacataacatttacactgtattaagtagtataagtaaacraggtgatttaaagtatatgggaggatgtaccyaggttgtatgcgaatactttgccattttatataagggactcaaggatccatggattttgttatcctyggagggtcctggaaccagtccctcatagatactgagggatgactgtactttctagtttcatttaagttattgactgtaagcactstccaggaaaataacccttattcattcattccatgtcctttagttatgaaactgggaccagaagctttcagatttgatggtggtgttgaagccatcgctacaagacaaaatgaaaaatactacatcttacggccagaagttatggagacttacatgtatatgtggagactgactcatgatccaaagtacaggaaatgggcctgggaagccgtagaggtgatgttttaatttgcatgtttcttatagataaatttcrtagtaaaaaatgttcagtgatacccataaatcaggcttatcaacttttctataatttttaatgcttcgaccaggattttttccacccaggactgtgtattttcattgaagtcattttatatccctggcttcagctttgctttgtataacattgatatagatatatctactgatagrcttagatattgaaggagataactagaaaggcatagtctaaaattaagttcccattaatacaaaaatgatgatctcttaattccacctaagggttgttggcagcttggggtattcacctctatttcaataaaccacttcatgtttttttctgtctttgggctttaaaatgctagtatatgcttttacttagagtaaatagctacttagatctaacttttagaaagcacttatagaagaattactttgtataaggatattcctttaccagtctcaggtttcttggaatatctataagctttccatctgcccagtgtgttgttttgtctgtcacctcttgggyctcttcctgcygaggatagtatacytccttcctaaaccaatctagtgaatgctttgtgtgccgaatgcctgaggaggcaacctgcaggatatgcatctaacaatgtctgtctaattgtaagagttattattcctcaaggagtrggagggaattcaggggataagaacaagcaaatkctttaattacactctcattctctagcactctttgttagaaagttagctatctttaaaaactgtccatgaggaatgacttctctcaggaaatctaaaatgaatattgcctttggtaaaatttaactaatatcttaggaagccatcggtgaatcttgcttattatcctcttcatttaatatgtgtcttatcattaatcatcagtcattttaaataacagcaattctctaggcctctttgagggggcagttttattacatttaatcagtagtcattgtaatttctttacatttctgtttttttcctctggagaaaatgttaaagttgaagcttttctaaactttggtgatagggaattgttttggtcttcaattggccagcaaatgaattgaatattttaagttgaaaatatcaggaatggtgtgttccatcaaatctaaaacaccataattagtaagaagcatcattattttatataccactaagaaaaataacactaccaattaagttatgacatccattttatagatgttagaatgtacaaaatgtatggccgagaaggtatcaaaaatgggaagtaagcaaattcgtattgccaggtagacaggatgctttggtttgctgtgttcttcarggggttgcttgtttatgagatcataaggttggtttatgtgttatgatttttatttcttgtcaactctttaacataatatatgacctgaaatyrtttccctgtgtcacaacactgaggtctcaattttggggatgcccccagtamcctctgctrgaacctgagctatagtggtgagccaggagtgctgtagggtcttgcattttttaaacmagaaaaactgggacttcgaaggcwtggccgcacgtttttcccctggtgttatgcccacccccgtggcctcctgtgtttcagcagyagcyccgcatatgcttgcagctcccacctccagcacttggctgttctgatgcatacttgagaccacagctggaaaccatgtcaggaaaagaaggtggaagagcttttccctagccagctggctgtggtctgggaagtgctggggagttaatggctgtcaaccaaggaggttttggagttggtggataactgtcccagtcttctttccttcaagaatcattctggaatgcatgctacatggttcttcagagggtttctagcaggagtgagcctcgttgcacacagttgaacaatatgattcattgrctcttctgtccctgttttgctyttcccacttgcccacttcctgatgtcacctccctgatagacttcctgcatcctgcgtccaacccttgtctcatgctttatttttaagggaacgcaaactgaaacatagggggtcttaaaaatcacctcatccagctttccgcttaaagacaagactcccctccatatctttgcaagatagctgttcctcatcaacccaaggactttccagcaaaggggaatgtatcacctaataaagtaactcattccaattggtaatattgaaggtgttagaaagttatttattttgaagccacaatttacagtgttctgtgctctgggggtaccagagggaaaaaatctcccttctgcatttcagctcctcaattatccgaagacagcaggttctgccatctcttcctttcctcatccatcatttcccttgattttcttctcctgacctggtttccagctgtggtcttttagggctgaatagtgtgaacctctcttctctcttcgcagtgtgattttttcacagcttatggtccaacttgttcttttagtagatttatatttaaaaaaaaaaaaaaaaaaaactgggaggccaaagkgggtggatcatgatcatggtcaggagatcgagaccatcctggctaacacggtgaaaccccgtctctactaaaagtacaaaaaaaaattaaccaggcgtggtggcgggcgcctgtagtcccagctactcaggaggctgaggcaggagaatggcatgaacccaggaggcggagcttgcaatgagccgagatcacgccactgcactcgaacctgagggacagagcaagactccaactccaaaaaaataaagaaaaactggcttatattgaaattatggtcagtgttagcttctccatttgctaccgttgagtcacatctcctttgcactgtgctttttcacccatactttcagtttgtaaagtatttgtaagccgtcttcctatcttctaacaaagcactcccttcccagccttctttcactgatacacttgagaaacctgctttctgtgtcttaattaaatttctaataataatgtcaaataagatgtgaaaaggtatataatccagcagtacaacactagagagttcttttgtgggttaacagcactccattaatcacaggtgttcaagcacttgtgagtctgcctgacagaaataatatttaactgataatttcttttgctttttctcaaaaatgtcatgaaagccaggcgtggtggctcaagcctgtaatcccagcatgttgggaggccgaggtgggaggatggctcaaggataggagtttgagatcagcctgggcaacaagtcatcaccctgtctttacaaaatttaaaaattagcccgtcatgctggcacactcctatagtccctagctactcargaggctgaagagggaggatcacttgagcccaggagttcaaggttattttgagctaagatcacaccgctgcacrccagcctgagcaacagagcgagactctctygaaaatttwwaaaaaaaaaatcatgagaaaytgacaaattccttccatttaaacatctgataacttacagcatgagctttatcagaatattgtatgtatatattcacatagattatataatgtctcagctgatctatggtaaagggtaaagccttacctmgggatttgggatttttttttggctttagggggtttttttttggtagtttcaggttttttggttttgtttttttgcacagacattttctttgctcttctaaacctaaccttttccactcagacatttcgactctcaggaagtgacttcttttcctccttcctactcctgcctcctcaggcttcatcctgtttccaaaccctctttgatttgttcaaggtgcctgattctctgtgttctatccttgagttcagacgacactcaagcagacagccttactccacggatcagccatttatatatctggtaggcaagagaatactcttctgtcctctgacttaggatttaactcatgatgcttgctattttcttacctacccttcatcctttgtttagagctccaatcattataaacattctcatatcctgttctctgctattwgcacatcccagtcacataggatcactaataatagaagcatttactcaaaaccaaggtggtccccatgcctagaggctgagaatcccaagaacagattatagtacaatgatgatctggttagacttagtcatacaaacacatgacagcttccactgttgagatgctgatagaatcagggctgttgtaagggcccaggaaagctatttgtccccagcttcacgttcctaaagtcttaaaatctagacttttgcgtaaggggtgagggggagttcttgggtgcttttcctttaaaaaaaaattttttttttttaatttaccaaaaacttcaaaagcaaagtgactgggcctctctaaacctctgaagcccttgttattgtctaagcatttcttcattttgttttattctcacgtacaaccccatgttgagaaggaagatgctgcctgggacatggaacctctggggccactgataagggggtctcaagctggaagttggcccactactcaaaatttttggctgtgttcttgaatactatagcttaccccaagaggacttgtggggaacaagaatgagagggtgaactagaaagaaaggtgattaggcattgtccaccccaaaagcaactcctctaacaaaagaaggagcttagagcagtttccatggagaggaggagtggctgtttatcatggctggccctctcattagctcattaccaaaaaacctcaagggaacaactaagaaaaggttttgggattaaaatctgtttaaagaaatatccggaaatagggtttcccataaaaaccttgcccattttttctaaattctgatttttttcctttttttaaccaataatttttggcttaytctacatatctggtatttgactctttgtcaaaaaaaaaggaggaaagaaaaaataataggacttgaaagtttctttcttcaygctcatcctccatttgacgcactgtctggaacttagaatttaatcgaagcatctgtttttaagttgatcggtcttattttcttcggggctttttaaaagtatgaaatcatgaggcattttctttattttctttattcatgtggcctgctggccagaatttctttaaccaggtaattaaatgcttctcctcatagtctctctgctctctcccttctgtcctccagccctgatgtgaaaaatcaataacctcattatcagtatctgcagatgggagctgagctctcagtgcaacatctctgctcatgagaatccgtggctggtacttactttccctcgcctcttttctgggctctacattcttagagccttattttcctccaaaatcctttctagccagagaaggtttttctcaactgataaggcaaagtctatgctttccatcttcttggtagttggattaaatgggagaaaaatggggtacaattatatatgtaaaaaaaaaagagggacagaattatgatccacaggggaaaactgaaacgtaagtgaaaaatgacatgagaaactaagagtaagtatatcttgtttacattttctttatttcactataaaatatattagggttttagtcttaaactttattatttttgtctacagtcaataaatgagaaccagattgcagatggcaatttttgtacgatggaaatttttatttgaccatataattaataggattagtaggatgtgatggcagaaaataactttcctagagatgaatatgcctggtaactagcagagcaacaaatgtaatttcaaaatataaacagcacaaaaaaaaaaacaactcaaaatgaattaaagacttaaatgtaagacctgaaaccataaaactcctaggagaaaacaacaggggaaaagctccttgacattgagcttggcaatgattttttggattcgacccaaaaacacaggcaacaaaagcaaacataaacacatgaaactacatcaaactaaaaagtttccttacagcaaaggaaacaatcaactaaaaacacaacaaaaatgtgtgcaaaccatatatctgataaggggttaatatccaaaatatataaggaacttacaattcagtagcagaaaaacaacctgatttcaaaataggcaaaggacctgaagagacatttttccaaagaagacgtacagatggccagtagtgaaaagatgctcaacatcacaaatcatcagggaaatgcagattagaaccacagtgagatatcacctcatacctttttaaatggctattatcaaaaattcaagaggtaatcagtcttagtgaggatgcagaataaagggaacctttgtacactgttggtggcaatgaaaattgatatagccattatggaaaacagtatggaggtttctcaaaaaattaaaaatagagctaccatatgatccagcaatcctaattcttggtgtatatccacagaagatgatgtgtatccacatcagaagatgatgtatatccaccacagaagatggtgtatatccacagaagtagtgtatatcaaaacatcacactgtacaccttccagtatatactatttgtatttgtcatacatcggtaaagctggaaaaaggttaaagaaaaatagaaacaaacaaaagaaagaaagtgggctctgaaagggaaaaagaaaacacaaacagcagccatcttagtggtaaccaacaaagtggaaggcaggttggtttaggttgttacctaaatgttcatcctcacactgcccaacccatctgttttccaaatattcattaaattcagacaactacagaaatgtaggatcatttctctctagagagttgtcagtggagtcatcccatcttcttccatactagactgaaaaaaaaaaaaaacatgtattttaggaatagatcccagccacatgtctctcactgtctttcattttcttcttttagctctgttaccaatatcactgatgagtaccctacaatcaattttcagaaactcagatactctgattatagaagcagctgattttgttccagtacggtttctcaaccagtggtttatgatcccagttgacattagcagtctctccaaactaggggtcagcaaactctttctgttaagggccagacaatatcaggcttgggggacagccagctagtctcttttgcatctacttagctctgtcattgtagtacaaaaacagccacagacaatatttaaacaacatggctgtggtttaataaaagtttatttacaaaaataaacagtggactggatttagcctatagttcatactttgctaaaccctgctccagaccatagggggaattggtaaaaatcagtgaaaaatttttccaaaactaaaggcagaagtgtttcaaattaggtaagatatgtggtccatatgttctatgacttcatttttwatttacatttagtttatggttttaatttttttttacctaaaactctataacaaactttcatttaatttgaatccaatttgtaaaaaataaattttgactggrcacagtggctcatgsctgtaatcccaactctttgggaggccgaggcaagcagatcgcttgagcccaggagtttgagacaaccatgggcaacatggcaaaaccctatctctacaraaaatacaaaaaattagccaggcatggtggcgaatgcctgtggtcccagctacttgggaggctgaggcaggagaatcacctgagcccaagaggtagaagctgcagtgacccatgatggtgccactgtactccgcccaggcaacagagtgaggccctgtctcaaaaaaaaaaaatgttttatctgaacttgacaatctaataataaaaattagtgacaatcagtttactgaaatgtgactwttttttttcctcctctataatttaggccttggaaaaccattgcagagtgaatggaggctattcaggcctaagggatgtttaccttcttcatgagagttatgatgatgtgcagcagagtttcttcctggcagagacattgaagtaggtgaaaattattctaaaaccawgtggctaaggtacctgaacagatctttgtagatgtctttatcatgaacacattcaagtaatatcaagtatgcctgattcagaatatcaggcatggctataattgcaggtatattctcaataactaggttsagtgacttggtactgctaacaccaaagcacygagtagctgctttaccccatgttaatgagtataacccctcagggttttgatatatttgactcttgtccatgtttcttggtaagatgaatgcagacattgatgtggtttttgctgtgtgtttgtggtttcactgcctgcctagtgtcttgggcctcatatacttatgtttctctcaccagatatttgtacctaatattttctgacgacgatcttcttccactggagcattggatcttcaatagcgaggcacatcttctccctatcctccctaaagataaaaaggaagttgaaatcrgagaggaataaaaagacattttatattttattctgctccattcccttcactgtataccttaataattccttttctggtratcaggcacatgatgaactttgattagtaggtctgtgattaagttcttaaattgttttgcagtcttttatgtttattatcataggtataggtggacctaaattccttatcatatcctttattaattcagccagtgtatccaccagttttttgtttatgtttttaagtaacctattatctctggatttcatgaaggtgtaatatygtttttgttaaactgaatagaattgtatagcgatgacytcttaattayaatttgatttgactgcaaaactttttcctcctctaagaggagatgatgtctgctttaagctgtaatgttttgccatgttgcaaaaagccataataataagtataaaaaagctttttcctttacaatttcatgttaatctggtttgtctgtccaccagagacagatcttctgtgacagcctccttatgcaggtctatcattatttgatagaatgtcttctaaaatacttcactcacattgtaattcaaattagaaagtcattccaaaaggatcatgtcatgttgacctcatttcatcggaactgcagtatatttttgttggttaattatattagtgttttctattttgwaaatgtgtcctttaattttactttaaatgccctgtgtcatttctggattatatactagttaatttcttccattcccyactacacagagaggtgagctttcaaattttkcagagctctgctatcactgaattacatttatctgaagaaaatagtacaacttaatggattagcttttgggtttaactgaatatatgaagaaattgggtctgtctaaagagagggtatttcatatggcttttagttcacttgtttgtatttcatcttgatttttttctttggaaaataaagcattctatttggttcagatttctcagatttgaaaaaggctctatctcagatgtagtaaattatttcctttcagtttgtgaaagcaggatttgactctgaaagaagctttgccaattttacttattcgtgatcaatcaaggaaaatctaataaattttaggccaaataagaatatagcatatttagtatggttatagtcaacacagagatcacaacttagaagaaatataaagaaatggccactccccatcccccacagtcctggagtaaatcaaaatcaatatatgattcttttaaacattaagtttgaaataggaatggttttctcaagaatagatttggtgtgataccttgtgtttgcttacattggcccactatatatacatatatatttatgtagatatacttccatgaaagggctaatacgatgcatatactgaagggcaaggactttgaccatgtsaattttcagccgagaatggtcagaaagatcagtacaaccccatggattaggctgaaacatatgaaattgctgcatttgtagtttaaaaactgtcagcagtttcatatggttccacctaatattattgaagacaattattttcttagctatcaataggcttaatagttttagttattttagcttttgaaagtgttttaaaagatttcctttatcggacaggaccatctttatgacctgctttctgtttttcaatatcatacattggtgtatgtcaaagaataaattagtaaaattagtaaatgaaaaagactcttccgtacatcattatttccatgctaatgtgtgtctgtgatccagaataacttctcccactcatatcttcagttcacctaatgaaatgaatggatagcaagagccctttgttcccaggactttaaggcaaaatattaaaaattattgccaaaattaagaatataatgtttgtataaatgtccttgaatttgccatttaaattaactcattttcttttcactttgatttgaaagctgataagtatttctgcagcagatagaatattaaaatcaggttgtgtgtacacactgcactatgaggtaccttggtgtcctggtgtgaatagacaagaagctgtactatatgttgctctctcagtggcaacaatgaagtttttgcaattctagaacttggatttttttttaacaaaagtcccaaaacaccaaaaatgtaaacaagataagagattaatattgtagtgatgtaatttaattaaagttatattttgggttaattttaacaactgaagtcttattgttgaaacttattttcaacaaaactgtgcagttaaatttgtatacgtattcacatactgaaagatgaaccgttaaaatagcacttaattttgtgtttcttcaatatgtcttgatatactttgtgcaattaatattacacatgtaagttgtatggcagtttacagaactcaatgacttgtcatgaggttttcatatgagctacacattgtgtacattgattgttttttatttttacataaatccattctgtcattttcaactttatatataaatctccaatgttatgggaaacaatagattgacacataatttttaaaaattatatttgtaaaatttctctattgtgaataaagtcttttaatatatctcctcatttgttatatttttctcctttttagtaggcttttgtatatctaaggggtgagtgccttcagttgcaaataaaaatatttgatcctaacagcatttccataccacacctgtagggtcttgacaaggaaatatttcccattaagaaactttacattgcacataattttgcatatacagtgtttgggtaatcaaataacctttattaacgatctaacatatgttcaacaccaggacacagaggctagaagctttgatgtcagaaatagcacaaactatgttctttgttcataaatttgcaatgcagctaagaaaatgagattaaccccacaccacccctcaaaacaagacaaaaatagcatttagttgtgttaaattacaagctaaaattctatataagttcatgggaacaggaggtccatagcgtttgagtggtcaaagaggcttaatagaaaaaggagaacttatgctatagaagatcctccgaaatttttcaaaaagcccaggttctaagttcttcaaattcgtactgtactttttagaatatttcagatattttggttgctgttgccactgcctggaacttgctttccctaatatttttatagctcattctttatcaggtctctgcacaattgtcacctcattagaatggcttctttgacaaatcagtgtaaaattctctccaccttttgtcccctaccctattttattttctgcttagcatttgctgtattacatatttatttccttatttatgtctttctaaccccttagtatgaaaccccatgagaaaagaaactttaactggcattttcccccatttctctgtctagtgccaagagtgtagttcacaattgagtgagaaagtgcatgaattaggaaactcgatcttatattcatagtctttgctacaactatttgcaaatgtctttcactgagcaatacacttttaaaaaaaatattaaagtacatgtttgtgactagaatcaactctcaatcaacaggttatttttaatccacttacatcatgtaaaataaagtaaggcatgactcctccaatagttttcagtattcaacagcccattattgttttatgtgacttaatgtcacagtccctgccacatatgttaaacaaaaaacaaaaaatgattacaacagcaccaaagaaattagcttattacctaacagagtcaaatgggaaccttctgaattaaattatggtagcacaaattgatgttggttgtgttcatgttgttggttacagaattattaaaatttattctaagcatggtgtttatgtatactatcagccatcaacacagagatggcagcttggcaacaaatacatctaatgactgataatgatatgtagatggttgcttgaaaagtttttcaaagttaacaagataaaatctttttcatttgaacatagagttcatatataattgccattcgaggctccctaccttgtgactgaagagtgagggcaggaaggggagtcttaggaaactttttaactgattttatggcctgaagcctcctttctattttttccaggctcattccatcctccacactagccaatacatgagtcacagttttcaagaaatatttgccaggcatcagatacatatttaaagtattggaattacaggggaatgtagacagcatttagtccaactctcattttaaatatgaggaaatggggattttcccagcaacaggaactgtttttctatccttcctctgtgctgccagacacaggaatatggtaagatttcatgctaatcctaaaaatacaaaaaaattagccgggcatggtggcgcatgcctgtaatcccagttacttgggaggctgagacaaaacaatcacttgaactcgggaggcagaggttgcagtgagccaagaacgcactactgcactccagcctgagcgacagagccagactccacctcaaaaaaaaaaaaaaaggccatatatgagagcatatgttatttccaaccagccactccaaaataaaggtataatttcagagttcacccttaggaattggtctactgctgtgtttctttctccagatgtgggctacagtttacctaatctgaatctcagctaaggtttgttaaaatgcagatttcaaagccttcccccaaatttaacaaatcaaaattgcgatggggtcctggaatacccatgtttagccctttgtgttattcctacacacactaaagttgaaaacaacaattttaagttctaggtaaatggaaattccaagactatcagaacaattaatgagttaattagcgaatcatgacaagaatatgtaccttttcctgcatttttgtctctacctcaaggtttaagtacaatttgacataactttggtcactttgaaaacacagattcttccttttctacaaaagcattagtctgcaataagccatacacctaaatcttttagaaacagatttacactagattcttatacataattctttcttattaggggaatctcaaaagtattaactacaatcatgcttgtttttattcagcaattgtttcattggctttcttttcccaataactgcatttttaagtcatttttcaaattgtttctactgttcttgttgattttaacatgagtgtcacttgcacagactacacggaatttctagtttggctatatatcatgtaaatgtataaaacgttcttggaaatgacctctgaaaaataccttcatttcccccgcccgcgtttttacattcattgctatgctaattgtcaaagatttgttggcttgccattattatgattactttgagtccccttaaaacatgccattaccgacagaataaattaaatgtgtatcacagatccatttaattccccagtgaatgcaaattaccgtgaaacgttagaaaacagtgatagatgtatagtttctaaaaacttttacacatactgggatattttggccttaggctacaagcacttactaattcacaattctgcaaacagggtcataaaatgtactgcttttcaaacagtattttccaaaatcattggcacctgagagatttttgttttgttttgttttgtttaactctcctaggagaaacaaatgaatgattcccattcacaaaatctttgggaactttattcctgactttccaactcttggcattctctgtggaaaatagaaacacaatcacctcgctgaaccaggatgggaggttccattacaacttcttgagggaggcacgatgctattggttccctttcatgtatgtgacagctttggcttgttatgacccaaggctctctatttaataagtgactgaaggagaagcaaactaaatctcttccttcctgtgcaaaacctctttaccactctgcctttcaatactgcacttcactggttaaataaacctcactggttaaataaaccctaagtgcctctcagctatccacattccgtctctatcttgcttttgtcaaattgataactttgtgacttatataatcatggcagggagttgcaaaaatatatttttaatgcccccattaaaatacattaagcctaagtctcttttctgtatacgacgcagtatacagaaggggtagaaagtaggtgcagtggaccaatgggaagctgacctcactaagaatccagacaagggttcctaaccttagctggtgtcattaactccctgcgtgatttggaacaagcacttactcttcacatctccctttccttaatctgtaaaataagaggagtgatcagcccaggcctaacagctaggctgtgcattgcatgacatctcttgtggatacctgagcaagaaacagcagtacacatgcctagaatatttccatgcatagactagagaccaccacacccaaattataagacatcaaaaccttagtgttctcatccataaaatgggagggatcatatctactttccagagaattaaaaaactaatatatgtaaaaggtcttagctcatgccttcaatccatgagttccagccccttctttcagcttttgcattctataaaataatcatctttcctctaccttgggaagcctccagcttgttttgttatgacaacacatttgttattattttacttgccgtttccaataaccctaggcttttttggatgccttccttcaatcagactgcttcaaacacatgttattactcatcttctaaggtcaaagttcagctcttttctgacatgagaagacagaaatagccagctctttttcttcacacctgcatcatgaactaattggacatttttccacttatttttttgttagcgagccaatagagttttattttttggtttgtggggtttttttagcatttgtagaagaaatggggatcaagctgcatggttgttgcactattatcaattgtgttatttgtgtattcaaacaatccaatgaaaataagacagtgtctacaacagctaagaactccttctagattgaaagtcagttttattttcaacccacagtagctttggaaaccaacaaaatcaattttatgaactaggaaggcttactgaaataactcttctgaaagaaccagcattgcttccaaaatcagcttatatgtttgaaaattacttacagtgacttaaaactgatcactttcaaagaaaaatgtaaaggtgattttgattgagagtctacttacctattcccccccaacaaaaacaaaacaaacaaacaaaaaaagctcttggtttctgtagcagtggagatgtaaattatatgcaactaacacttaccttttcttctggcactccccacacaagaataaggctgttagcttctgaagagaggctaacactgttgaacaaagtacccatagtccacttccttccccccatatgcctcactcctgctggccttcacttttctgtattatccctgaaaaggccttcctggtctacctccttccacttcttggaaaatgtctattcctccttttgagtctcaatttatatgtctgtgaccagtctgcttctcattccaatttgttcttgcttcttatgggactccaaaggactttgtgcaaactcctattcatgtgtcacactatattgtcattactggttttcattcattcattcattccacaaatatttcttaagtaaccagaatatttcagatactgtcataggtcctggggaatttagcagtaagcaaattagacttgcttcttgcaagtcttgactaggaaaaaaggcaagtatgcaaaaaatagaatttttaaaatttaaaaag

SEQ ID NO: 93610 - DNA, 127883 bp, Homo sapiens
agacatacaaaaagccaacagacacctgaaagggtgctcagcatcactaatcatgagtgaaatgtgagtcaaaactacaatgagatatcaccttatgcactattataaaaagagagagaaagagagataagtgttggtgaggatgtggagaaaatggaacccttgtacactgttggtgggttggtggaaatttccaccacagctgacatgatggtttctcaaaaaaactaaaaatagaactgatatataacccatataaccctataaccctttgtatatattccaggtatatatacaaaggaaatgaaatcagtatgtcgaagagagatctgtagtctcatgttcattgcagcattatttacaatagccaacacatggaatcaatctaagtgtccaacaacagatgaatggataaagcaaatgtggtatatatacacagtagaatactattcagccataacaaggaataaaatcctgccatttgtgacaacatggatgagaaactgtggtacattatgctaaatgaagtaagactatacagaaaaagacaaatactgcataatctcacttatatgtggaatctaaaaaaagtcaaactcatagaaacagagagtagaatggcgactgccagaagcttggggatgggaaaatgagatgttggtcaaaggatacagactttcagatataagaatacctcccgttcgtttcccaggtattccaggctgtgacacagtctcttggattttggttgatttgtgagcatagaatcctcagttctgtgggagtagacacattaccctcaaccataggctttaacttcctgtagtgtctctaatttgctctctcccatacaaacaaatactttgtttcaaccattcataaaaattggctttctattacttagaagagttcaagttaacacaagtccaagctatgagcatcattttgtaacgaataactctcccagccaggaatatgtcttactacagtagccatctataagaagagctacttttcttatctgattacccatagttaccagacgcttgattgcaatcatcatcaggagtctacatgacataaatatctattttataacaaaacatggagagattatttaactcaaggctacataaatgtaaccaaataattgattctgcatcagtgagcttacactatgaagttagaattatataaagaagaaaaattcattcaaaataactctgttcaacaaccaataattagtattcggcccctaatatttatttttaatttcctttttactaaaagaattggtgaaaatccttgacccaatgttcttaagaaatgtttgttctgattttcacttcttcttgatcagaatttttgctatttgaccttcctctgtgtgccatacagttcttttcatgtcatctgttctgatacatcattccttgtttaaggccccatgtatgagttatgaagtattcttttttattttttaagttattattttcttttagagatgaggtctcactatattgcccaggcttgtctcaaactcctgagctccagcaatctgcccacatcagcctcccaaagtgctaggattacaggcataagccaccataccctgccaagttgtagaaatattcttagtcttgacatcactcattgttaaaaaaaattcactttgggtgcagattgcttagcacttataatgcaaataaggtcttgtttttcttcaacatgctctacagcatgtttggggatgacctctatctttccgaagacctgtgacttcgtgtctctgcctgactttgtatgttctggggccaacccctctgtaatgtgcccctatgtttcctgtcctgctcatactatgacaatggaaccataaggaaaaaggccatattctggttctttggaaagtaaaagttatttttctttctgtctcaatcttgtctctataagccaggtcagcaccttcacatggctgtcggtctattgaggtgagttgtgaatgcccacctgtcatttgacttgttccttgccaactttactttgatcaaatacctgaccaatccctggctctggggtaggtctttcctttggcatcttaaaccagcctgtggacttttgaggtgggcctagattctgtagcccattttcctgtgaaaggccttgacttggattgaagctgggctcctccaacttctgtgttgcctgaggatgtgtgatcccccctaaacaagtccttgggtccaaaagcaaggtcttgccccattgaagggtcccctaccaccttctcattgacctcaagggaaagatttggatgctttcagattaggatccaagctgatgatgaacactgcactgggcagaaccaggagccctataacacttccaattcaacattattaaaaagctatcctggctgtaacggctgaccctttcatcactttatccctctatatgtttttaaaaagattaacagagtcattggggaaaaaatggaaagctctgaagaatctaattttaaaacaaatcttctatcccctgtcaagcttcctgcattaaaaaaaaaagcgaaatgtacaacttagataatatctggttaactctgttctgcacagcctacttctttattgaaaccgcctgtggcatcatgagacattcgctgaaatatccgttaatgaaaagctggacagtaagaaagaagtaataagaacattttatctctttgggaatcttctaataaaaaaatgaarggaaagtaagttcattttaattgatgaaagggacatagatttcatcaagttgaaaaggcacacaaacactgctaggggcaaactgcactcctctgcgccttttggttagagctgttgagtactgctccattggaacgtgaattaggtttattgtaatggtctgtttccatatttagttttcccagaattcacattgcttcttgtttataatggcatatacctaatgatgagcacaatgtctgacacacagttgttgctaaataaattattcttgaatggatgaataaaagataatgtattatcccttccagcaggaattgattatctagttgggaggggaagacagaaacatacacaaaaataagtgatgattcctatcattgtatttattgttaatcgtctactgttatcatcgtattcttcactattaattttgtggtatttgtgataagtcataaaggtagccaaagatgttctttctaccttagcctgtgtatgtttcttccattattccagcctcaggcttgcctctcaatttagcacttgctgatcagcctgcctggagtgctcatcttcctcagtagctaattaactcctattcatcctccaagccccagtagaaatgtcatttcctcctggaggtcctctgtggttgcctgggctgggttatctagctctgctttatgttccagggcaatattcagaattatgcttgtgatcactcttcctgtatgtcttccctgacagagcatgagccccatgaaggcagggacagactccatccttttcatctctttcccagggctcagcatagcaggtgtttaataaatgctggtataatgaatggacactttcttacaaagagcaccttggaataggtaaggggctctagagcatggaactggttctcaaaatgatggggaggcagaggcctggaatagacaatgtgatcaaagtgtgtggtccatggaccagcagcactgacatcacctggagcttgttagaaatgtgtcttctcagaccccacccaaaatctgggtgatttgtatgcacgttcaagtttgaaaagtcctgcttttcatttggccacacaatgcagatggagaagacagacctcagaaatcatcccacctaagagactgagggtcctgaatggatccagatgattgcctgtatgtggggacaacaggtggctgctgtttttcctatgaccaagtcctaggttctaattcaatccccacccccatcccttttaaaaatatacctcatggagcacaaggtaactgattacctttgtttggggaaaatgctgtttgctaatgaattttctccagataccatggaaccgtgtggatcctctcctgccctcattgccagttggacatagagaagggtttatcagtctgccttttattcaaagtcttagatccccaggctcctggctgacttgcactgttggaactaagcaaaagagattccaagaagatcccacaaggatctcgtgttagtccattttgtgctgctagtacagaatacctaaggggggtaatttacattgaagagaaatttattgtatcatggttctagagtctgcaaattccaagatgagatgttggcatctggcaaaggccttcccaatatgtcatcccatggcagaagggcaatgagggttagaaggagcaagaggtcaaatttgctgtctcaggccctttttatagtggcattaatccattcatgaggatggagcccttggaacctaaacatgccccaacattgttgcattgaggattgaatttccaacacgtgaactttgggggacacattcaaaccgtagcagatcctctccattcatcctacctcacctggcacgtaattcacttgcaggctaggtggggagacaagagtatccacagccaagaagcccacagcttcagggacctgtgaacagaagtggaccagataggggatggcaaggaggaggtcagcacaaactgtctgcagggtgaggtagcttcattctctgcagtggggacatgaggtagggatcggggttcaggcacagggtctgactgttttataccaaagcaggacagatggaagtcagaggtggacaaagacttttcctgtcacctgtgactcagtcacagaagtgcccaaattgtcttctggtctgaggacagcagaagctcaggatacctttctagcaggtagatacagggaatggtgtgggatgaggcagaggtttgcttcaggttctcatcaaattccccagatctgaagccagcccctctcaggcctgaacagaagcacttcacctgtttatttcttgaaaagccactctatgttgctgcttcccacttttagttctcagaggtggctttcctactgtccagaagacataaacttctgttttccctggagtcaccttagcttaaactcctataatcttgttgaatcatccctgtgtttggctaaaccaggctcctcatacccacgttccagggtcacacaggtaacttggcttgctgcttctgggggctctgaatcccacaatgccgatccaccacctcttccctgctgccactagtctcctggggtctagcctcaacagcttccaccaaggacacactgcattgcttaagagtgtatttaaggtgcggcatttgtgatgctagggaggagccttcctgacttaatcacgtagggggagtggggaaagaagtgggtatttggaaggagggtgaggtgggctgggaatgccaagaaatggtagtactgtgtggtgaatcaaagtgggtcttggaatcttcctagcttttcttttcttttcttttctttttttttctttctgactttttatcttatgttgtcactcaccatgttttgttttcctcatctgcaaaatggattgttgtaagcttgaacaggaatcatgcataaagtactgagcacagtgcctggtaccttgaaatcactcaatggaagtttcttattatttgccctacacccaaggagtaattggggccctgaaggaagacaccccaatttgccgtcctcccagccgccaagcctgatagtgcactagggaggctgatgggaaaataccgtgcagaaggctgaggagtggggattctggggcgggactctttgaagtcctaggtgacctctccgcccaggcacccgccctccccgggcctgggctgcagagctgcgggcgggggcggtggccctgcgctgcacccggcctgcctgcgcgtaggcgggcgggcggggctgcgcgtccgggctcccggggctggtaatatagcggctcgccgaggcgctggtgcacgggggcagcgcgcagcaggccggcgggcaggcgggcgggctggctggcasgcaggactgggatcgaggcccagaaaacggagcagcgggcaccagggaggcctggaacggggcgagcgccatgagcaacaaatgcgacgtggtcgtggtggggggcggcatctcaggttagtcgcggctgtgcgccctccttcctcttcacgcgctcggacaggtggctgcctgggggagacgcggggggcggccgtggggcaggggctgaccctggagtccccagactgtccacgcacgggcagggctctagtgggtccagagcgccgtgcactgaaccctcctttgggggcaattttgggtgcgttcccggacgcagaggccagaggctggaagcctgttgcagctctggggccagactttgaacttctcccccagaaggctgctaggccttcgcttgctggaattttcgaagccagggaaaaggggtggggaggtggcacaaaggtcagtcatttgctccaacttgacctggacactccgcaccctcgcttagagcaagcatgcaccacatcgtattgttgtcctggcgtcaggaaaacgaccttgaacagaagaggttggagcctggccaatcgattgccaaagactttccaggccctcctgattctttgaggttctgtgattgtcacggatctaacttgaggctgcagtgtctttttggcaaatgcctgttttcctcttatgcctctcgcacccccactccaccccaccccactcctagcgcagggtggccaagctgcagctttgctctctggcctagcccatatttggcaaggatggggacagacactaccccctcagccacacggggctgtgtacataccaagggcaccgaaaaatagaagccagaagaagggatgggggtagtggtggaacttaccctctgtggaggatcaggcagatcctatgggatagggtcaatgggaatcaatgatgctctcagcacagcctgtttaatggccccctgggcatgctttggcccacctcctaacgctgcctagtacttgagcagtaattaggacacctccagacccgtggatgcattgtctaagacttgccttaaggagttctcaagtggcctttgggaagtagaggttggccttgctccctgccaggagggcaggacagagttgttctgactctcctgtggctggagaaaaaaccaaggcattggatgtttggtgctgaccatggtccagtcctcctgcctctgctccagcctttctcccctttgggtgggatctcaggctaccacatctgtctagcaggctctggtgagctcgcccatgccaggccctgtgcctggtgttgcaggtacatagatgcgtaatcacaacatgctgaggttggccaaggctgtgtataaattcagttttctttcagtatttttgacatcttctctcctagaggaagttggacttaaaagcatacctacttaggtgttttagaaaatattactaagtgcctcttgatgctgccttgcatagcaccccatcttacagaagctgaagtttctcttttcaggcccccgaagtcattttctcactaaagtatgcccaatggattcagatttttctattttcccttcatgatttgtccctttctgattcatactccacaccttcaggttcaatcacattactcatgttagactcatctggaaaaggtagataagggtttaactatttttgcaagcagtggtgaaacctctgcattcatcctcccgaactctgatcaaaacaaggtactgatgagtagatctgacttttctcaagaacattccacggaataggcattgttctaagaaccaagaaagcagccttccaaggcccagtcttactcaattgcttcatctgctacatggggataacaccagttagtcactgctggattacagggcaagtgaaacaatgtgagtaaaatagctttgcagagtctgaaatatggcacaagcccctcaagagttttacccatttattcagacaataggaattgagggaggctgtgtaggggattcaaaaatggatcatgttgttcttgccccggaagacttgtcaattcaagaagggtgatgggatactcagacaatacaaggtagaaggtggtgcgtgccatgggaggggtccattcattgattcattattcattcattcaatgaacatttacttcctgttccacattttgtcccaaaagaaataaaagatgatttatacagggccattgttcctggggccctcacaagctgatgtggaagacagtcaagaataattactactctttggcatatgataggtgctttaatagtgcatataaaaaattctagggaaggtgattggagagaacatcaaactctgtctgagaaaatctaagaactcacagagttggtgacatctgaactatgtcttcaggaatgaatatgaattcaccaggggactagatgaagaaagcatttttaaactaaagagcagcttgtataaaaccacaaatatgtgaaagaacatgctaacgtgtaggataacttaagaacttcattgcggagagttgccagaggggtctggtgggagagaaagctagaaaagtcagttgggatgaattatggggaggcttgtatatcagaaaggtttagctctttctgtgatcaatgaatagcactgatgattttttattcagagtgccatgcatcaaatggcgtgtgtcacatctgatggtgatattagcaaaaagagggatatgaagaagagggagagaaggttttgggaaaagataggacgtctagagttggaggttctgggaggacacccagggagagaaatctagcagttggaatgaaattggggttacaaatgtgtacgatagaggttttagtagatgaaatggccaaaatcaagagtgtagtgtgtagaattttcgaattagtaggtgaccaacacaatgatttatgtttaaaagtctctggatttgactctgcgttctaagctttgttaattattaaacttgggacattctggcaattccctgataatttttaaagctgtcagcaaattttaatcactccctttgggataaacagagacatactgggaggatagctggttaatacataactttcttttttgatgttttaaaagttccaagatagttgtagactaactttttagaaatgtgtatggtgtataaatgagtatkcactgaaatctcttttacccaaggggcagatcatctccagagacttggcagagcaatgacatctcccacatggaactggacagcagcacgttgcatctgtcccgcgtctctcagttttagtgtttgggtgggtggaaccatggaaactatcttttgcaattctggaatagttcttgttcaatccccaaaataaaaactaaaaaaggcaacttgaagcagaaacaagaaagttttggccagacttaggagaggagatttggtcatttgagggtggcaggcacttgtttgagatccctggaagtgttggaaccagacttccaaattgtaaccaacacctggcaggtgatctttgtggcagggagagcaagcctggctgcaggctagtggtactggctttggcagggaatgtcagagatggctcacaaggggttatgagttgaggtgtgtggtgggcagatgtggcccatatgttaatggcaaagcctctttctcacctttggtgaagaaaaatggagaacttccctgggctcctgtaacccacttgaatgtcctaaaaaataataattrtatagatatgcctgaaaatttgtatatcctagtcaaggaaagaatacacagaggtaatacagcaatattaaaagaacatacgatttatcttggaaggttgagacgggaggattgcttgagcccaggagtttgagaccagccctggcaacgtaatgagacatggtctccacacacacacacacacacacacacacacacacacaaaggctgggtatagaggagtgcacctgtagtcccagctactctggaggctgaagtgggaggatcacttgagtccaggagctcgaggctgcagtgagctatgatcatgccattatactccagcgtgggccacagacaaagactgcctataaaaaaagactgggagggggagaataggcttagtgtcaaacacactagttatgaatctcatttcttatgcttacctatgtggaaccttaaaaggtacataacctccctgtatttcagctgcctcatctttaaaatgagactcataatgccttcctggccggcttgtttcaaggattggaaagaatgcacatgtaggaccataaacagtgatcacttcggctttggcttataggtgccttactctacctttttggaaatatatccttgtttgtcctgtagagtttttcaatctaagggagcaaaaacaggcatttctatgtaatcacttcttttcaccaaccaataatttttctggatgtgcagcatagataaggtggcaacaggacgccatgtatacatgtgggcatcaggagagactcgcctgacttcagcctcatcctggctcagccaattcctttatccccccgcaaggggcctgaggaactcaggctcactttgggctctgagacccactgggttccgcttcaggagaaattctggaagtcttagatctgtacttcagcctcacctcaacctggctattattccaattctgatctggtcttcatttcagccatttgattcctgtcttaactacaatagaagataaatgcattaataacaaatgatattatttatttaataatattatttaataataaatgataaaaaggtagcatatcaagcgttatctacatgctgtacaaggtgttaggagcttgattagaatgacaaaagctctgtgaaggttaagaatgacaaagccttgttctttctgcttgattctaacacccctgggacacagtgttggggccggttggtgggctgtgtgagtagagccagttgccactagagtcacaatttctaggcccccatgtgtcctcagaagtcaccagggcaggtttaaggcttggcttggcattgacaatggtcacaattttcttctcctctgactgggtattgaggtctaggctccctgccatacattcaggggcagtggtggagcataggggttaagagcatggtgtctaccctggttccaccactaactagctgtgccaccttgggcaaaatagttagttaaccttcccatgccttacttttctcatttggaaatggggataataatggtatctatttcacaaagtggctgagagaattaaaggagaaaatacatgtagagtgcttggaatgtggcttggcatttggcaggcacacaatagatattgatgattattgttcatcaggctgacaaaatgtccactagcaactagtggtctgaagtgccagtgtgccagcttcctcactgtcaaactttgggctgaggaagtggtttgtggctgtgcatttgaatgcactgacacacacacacacgcgtgcatgcacactcggagaacattagcctgtaacagagattctgcttccaagccctgttttcttggcttgtatatgatttactaacacagatgatgtgagaaagtcagcagcttaatttaaacaaaaggctttaactctaattattttaatatgtattttaagagataaatatgtcagaaactataaatgcaaaacatttgtatacgaagaggaaggaagataacacagctgttaaacacaaagggcattggaggcctgggacttgggctcaaatcccatctgttcccctaaatgtggagcttgggcaataggggtggcaatagtaacaggttagtttttttgtggagttcaattacagatgattttcatttttttccattttctgtaatttacagattttcacaacaaatatgtattatttctgcaactcacgtttccagaaacaccatactcttccctctccaaaaaaattcctcaaagtataaatcaccatgatggaatgtgactgcatctttcatttatatcagtggcttttcttcttaaaaatatttgagggaatttttgttattaataagtgtggttattggccaggcatggtggctcacacctgtaatcccagcactttgggaggccaaggtgggtggattgcttgaggtcaggagttcaagaccagcctgaacaacatggtgaaactccgtctctactaaaaatacaaaaattagccaggcgtggtggcgcatgcctccagtccgaagctacttgggtggctgaggcaggagaatcacctgaacctgggaggcagaggttacagtgagccgagattgtgccactgccctccagcctgggagacagagtgagactctgtctcaataaataaataaataattaataaataaatgtggttattaattcttcaatttatccttctgcaaaagatgccctgctagatatcaaaagctctttcaaagagcttgtctcttcaatttgtcttggtacttcttcagccaagtttcttcaatttttcttggtacttgaaaagcgggtgagtgttcctgggctaactcctagaattctcaataaatgttaactttgttatttgtacaagtcactgggcagtactcaattgagggcaccctggaatcatgcaagatcgaatacccttgaagggtgcaaaagtgagccaaattgaggggccacgttcaggtgtaatatgtgtctgaagaacgagtgttttcagccccacaagagaatgctttggaaatttgctcaggttaaatgtgtaccattgtgcttttgcaagaatctcattcgctgggcttaacttattagtagtgtgtctgcataaaagttgttatttcccctaagaggaggccataatggtataaaattccttcctgattttgaatattcaaggaacaaacttagaagaccaagctaaaaaatactttggtttaatagaatcattggtgactgaagacggaagcatctttagagttttacctactagttaagatcgcctggttttgcatccaagaaaaagcacatttagagagtgcaaagggctggctccagacctcacagccccttcttttgaataaaattattgtcctggaggatgagccctcagccttaggagaaaatgcaaacagaaggacaacctgatcaaatggtgctgggtgagaggttagaatcactaatactttgaatgcactatttctactttctgttttcatgctcacaaaatggatccatctttggcctcctctgttaactcagtaaataaagatacagaaagccaagtccctgttagcaatgtttcctaagtcagcatgcatttatttactgaaggaaggtatagaaaaagagtaagactaagttcccagcctcaggaaacttaaaatgcagatggagacacaagactagcacatacatgcaataaggaacaattaaactaatgtataattgaattctgaactgtgggacccaaggactaagttagaagaatcattaaagaccccaggagttggagaaggtctcattaagggagtagaatttarcagattctgaagaacagtccaggtttgggagggtagagaagagagaggctttaaagatgagaagaatcatttaaatcatagggccagagacttcagttagcaggtgatctttatatttacaggacagtagaaagtccagcttgtctagaataaaaggaaggggagacatgggaaggaaagttagtaggaggggggcaggatccaaaaacgagcaattgaaaaacaaagtgaaaagttaggttttcctgtggtaagaaatagggagccattgacagtttatactataaagataaggtggatggtcgtgtgcctgataaccagggaagccaaaacatggatagaaattcaggaaaggattgagaggtgatcagctgattataatgtattgggttattctgaatgcccaagggaggtttcaagagaaatggggatagaaagaagggaagaatgagtagaaggaggtgtccaaagttgcacttggctttcttcactgtcttgctggcagcctatccagaaaagaagtatcacaaacaataattagttgtaatttaatgaagttgtaggcactccataaaacatttaccactgttactattgccacctatattttatttttgcaaacttccctccaaagttttatcattgggattgaaggacttgactgtatttacattttttcttctttaaaaaactaaaaacagagattttcttcccaagggctgtgacccagtttactaaatgataaaacgtgtatctctggcaatctcaaacacaaaatgaatagttcatcttatttgttatataaaaactgtcggccgggtgcagtggctcacacctgtaatcccagcactttgggaagccgaggcgggcggatcgcgaggtcaggagaccgagcccatcctggccaacatgaagaaaccctgtctctactaaaaatacaaaaattagccgggcgtggtggtgggcgcctgtagtcccagctactcgggaggctgaggcaggagaatcgcttgaaccagggaggcggaggttgcagtgagccgagatggcactactgcactccagcctggcgacagagacagactccatctcaaaaacaaacaagcaaacaaaaacgaacaaaaatgtcatttaaaccttttgttttgtgagagaggggcaccatcagaaaacatcttcaggtaggtctgacctttcaaatgttagtcatcttaccatagtctccatttaatggcatcttaaatgtcatatactatctaatttccacttcatatctgaaatttgagctcttgatcttatgttatgcatctcttagctaggccatttttaattctactctcctcctcaataacatttatcagaattacacaatgatgaaaatgtcctactagatacttagttttatttgctctccttctagcctaaataatcgtcccttttgcttaacctctccaacatttttaatgattcttttaattgaatttggaatccttacttcatattttgaagttgggctactttttattgctgtgatcccagtggtgtgtgtgtattaaattgtgtattgataattatgtctttagttatatctcatttctttgggttattttccagttttctacattaaagaaacaagctcattggaagagcttttgttatccagcaaagcatcttttttcagaaggataaagttaagaattaataaccaatttagttaataaccaaaattacttcaaacatttggtaagaagaaaggccactgatagaaatgaaagatgcaatcacattccatcttgatgatctacagtttgaggacattttttagagaggtgtgagtatcttttttaatagcatgaatgcagaaataataaacatttgttgtgaaaatctgtaaattatagaaaatggcaaaaagaaaatgaaaatcatccataattgaactccataaaatatttaccactgttactattgccacctatattttctttatgcaaactttatgttgtatttactgtacttatttgtatcccctttaaaaataaataccaacatgttatgaatgtttacctatgtcttaaatgttttttcatgattttataacattagttcatatgattgtatcacaacttgttgaatcaatctcctattgctgaacatttgtgtttttttcaaactttctgctattttcaacaaagctgttatgaacctaaattgttgtacataattctgattgtttctttaggaaatttccagagataaatgttagaaattcttttaaggcatttaataattatagcaaaattgtcgcccaagaaagttttaccaatttaccttatgatggaattgtaataatggacttcttagccatttcaataggaaaccaacatttcctccccacccaacgatcccccagacagtacagagataatcaagattcttcaccagtttgtagtcgtaatttaatgaagttgtaggcactagaaattaaaaatatcttcagttttgtaacattttagtggtggcaagtaagttttgctctctgtaacatgcaggaaagctgttttttgcaattactacgttatgcctaccattatctactgggaacatatacttttatagtacttttaaatttattgggtaccatctagcctgtgcttccagaagtttgccatcattaattagataactgttgtgtttctatgcagaaaagaaaagaaaatagtcctgtaacaaaccattttctatgattaattatttttacccatctagataaaacatgagtatagcctttgttcacagcctattgtaacagctgatcaaacagctgtttcatgttttacattttaatttcctctgtattttgcattcaaatcctgtgatagagtttaatttatttaggaaacccataagatatagtcgactgtttcagaatagcccttttatgctgtgccagttagtggaaatcaaacagcccttgttaagcaccgatgataaatacacataagggtgtgcactaaaagagttgtcctcgtttcatcaaatgtatttccctatgtcattgtttctgcagggagaaaaagaaatttgttcattcgttgattcagtcattcaataaacccttatcgagtgccctatttaccaaacattgggctaggtgtgggaatacacagatgggtaatacatgtgcccatctttcaggggtacaccaagcagaaggaggcagacatgtacaggtgaatgttctgaggggtggtgggtgctgagaaagacatgcttatctggatcagatgagacagagaagaggaggacagcagcttcacctcaagggcctcagaggccctgaaggaggatttggcaatggaatttactggagaggtaaccagcaaattcaaatgttcttccttgaaatatagctttaagtagttggaacttaaatctatattctaatgtacatagagtgttgaaatttcactttcactctttgtatagtggatgttatagtaggctgtcccactaccttcaggacctgctgagagtgttggctgctgctggctcacagccaagtccctctctgaaagtcacccttgactgaagggagctgactaacccaggccttcgtaccctcttgcttcaatccaggataactctgaaaggccacattagcctgagagttcactgtaggactgattgatttctctgttgtgcttgcatctctcagttcaactccttcctttgcccaatcctgcttcctttcttcatacatgttgaaccccgataaagcttctatatgcaaacccatctcagaggctgcttaccaggggaccctaagctagacagaggatgactgaacagcatttttgctcagcgtgtcacaagatgttctaatcatgaagtttcagacagttggaggaagaagcaattaaagggcatgacctttcccatgttcttttcttttctttttctttctctttttttttttttttttttttttttgaggtggagtctcactcagttgcccaggttggagtgcagcggtgagatcttggctcactgcaagctccgcctcccgggttcatgccattctcctgcctcagcctcccaagtagctgggactacaggtgcccaccaccatgcctggctaattttttgtatttttagtagagacgcagtttcaccatgttagccgggatggtctcgatctcctgacctcatgatccgcccgcctcagcctcccaaagagccgggattacaggcgtgagccaccgcccatgttctttaatggcctccaccaaggatgcaagaggccggtagggcctggagacggtgcttagtctcatcagttctggataagcactctttggtgccctgagagcccccaagtaagggtgaaaggtagaggttgatcactatgctggcccaaacactctctggggaatcccaatctcttaccactctgtgtgctgattcagagctgaaatttagagcctccgatctggaagtgctcaaaatatggattccttcttttactggaggaatccgtggcagtacagccaagagagaaattatgaaacagccctaatctgtgaagactggatacagaagtttggacgctgtccatctattccaagccaccattttggatccagctcagattctgggttcttggaaaaatagtgctgttggcacacacctctattctttcccttatcctgtgaccattttatgcagcttcctgtaggatttctcacagggtgttgaaaatgctgaaagtgattataaaaaaaatggacaatggagttcttgatggataagggagaaagggaagttgtgagggagcaagctggttcatagattcaaatggagatgttaatagattggaggtctttgtgtcattaaagaacatttatattagagcaatttgagcaggtgaactagaaagataggaaatcatgattgtgagggggtgttctgtagggttttgacgatgaaccttttgatatgtgctacttggaaataaccattttttaaatgagttgcaacattttgaatcagcatgtccagagatttaattttctatgtgattcaaaaaatgatgtaagagtcagaaaaatgattttctttcattttattttctatttactaatctgctattggttttacaacagggcagaagagacaactatccatttaatctaagtttagagattggcagaaaagtccctctgttttattgagaaaggcaggaatcatacactttggggtcctaaagattctaagcaggtctctgttaaaattgcatgcaggtcactggggagctaacccctcaactgctgatttgctatgtgagtgatgtacagcaggctggggaggggaaccaaagcaaggtgctcaaactacagcaatgcaaagcagttgggagacataggcagcctttatctcccagctgtttttcttgaagatgattagaaaagcatagaaaaaagtcagagggtgtacaaaatttagcgttatttaaagtccagtgggaacagcactttgttctattccaaaacaaattataatagagagagagagatcttgtccttcccacaccccatcaaactacactttatgcagctagaccattagtgttatgataccattagcactttgagaattctgttctctgactgaaaaagaaaaagcacattgtttatggaagggtctgtaaaaggaaattgcgggctagttttcaaccctgtgattcagcctcatatatttactatctacccgaaatctttgccggcaacatgccattctatccccgtctgtctgctacraggctatcatttagaaaacattaactgaatgcctcctgtgtgctaagtgctaggaatgaataatcaggttccagttcaacacattcacacacacacacacacacacacacacaagaattgatgtgaaattacgttttctgtgcttatttatttttggtgcatgcacaaaaatgtactttttaaatgaaagaagcctctcggtgccgtgaaagagctttacctttggacaaagttagaatggatgctaagatcactttggctttgctttccaagtctctgtcctctgctagcttttttagttttattcatgggtggtatgatattcctggccttataaggggtataagtaaaatatcatacttgccttttatgttatcagaaattgggctgcacacaggaaccgtcagtgtctgaaaggaaatcacatggtcctagttgataaaaggcagaacatccaaaatataccacccgtgtcctgcttctctccccttgttcctttctctctgatttcatagagaatgtgtccaagggggaaatgagttttctgtagataaatcagttggccagtccacagtattgagcttccagtggacaggtctgagaaatggggaaaaatacaaagaggttgagatgacagtaagtaggaaaggtaaaagcattttgcatgtagaagaaaaatcatttggggtgtgcacttgctttatttctgggttttagtttgtgatcagaaaactagcagaagctgatgaaaataggaaagcatttcttttctcctattgtgttctttaaaaaatatatttcgccaaacagatattttataaaatctggcttccttccccatagataaattcctttgaaaggagtctgtaggtttaaaggttgcttcagaatacatttaaaattaatctttaaaattaaaggcattagtgaattttaaaattccattgaatatatgtttatgtgtaaagatgtttgaatactttttcttagggaaaaaagggattttaaaaaagaaatattagcacttagaatttaaaccagcttttaaatgatacatcctatatataaattttagcatcatttttcaatatttttaaaatgcaatgaagatctcaatggcaggtgaaaaatgatatctgcaagtgattttttaaatgggagcttattcaattttgtaattatagctgtatgtgaagaacaaacaaaatacatgtgcaaaatataataacagcaatatctgcctggtatttctaaaggactttggttacatataattcttgtacgcatgataagaaaaggaatgttaatttttaactcaacaaatacagcgttcctataaggtggtctgtacagtatattggtttgtataattcacacattaagtgaaaggaaagaaagagatgaggmgtggaaacacttatctcatactcttgtctagttgaatattgttttttccatctttgacatttgaattttgtagtacagtgcagtatgaggtgtttaaagcctataaactgttatttaactaatactgttttctaaaatactttccatgatctaagaaaataatttctagtttcttgggctatgtattaactgggcattctaaaacgtcacttctcatcactcccatgatagtacaatttcctgcttccctcctaaatcgctagtgctccaccagtctcctttgccagctcccttcctttgcctgctccttcttctttggccaccaatgtttccggtttcaggaagtggaaccatattctggccaggtttccagccaagagtcttgacatttgtagcagacattgcagggatccyaccaaatctccttggcacttattttcatacacatgaacttaaggcctctgtctgatgcaagtttttgcctgcaggctttctctggccactggagctcctcttggctcaaacccaggcaggtgagcagtgcgggtggggctaatgccccccgaaaagcagccatgagtctgtgactaacatgatttgatggataagtaacccatcttcctcatctcttaggatagctaaagtgtgttccacactgtctcccagatttccccacagttgcccacagtggtaaccacttaactgtctccatgccccttctggatctggtgttcctcacgtggaccactgtagttcccagagtctgctcatttgtgtcccatcattcggtctagcccttctccagtccattctgtttttctattatggtaaaatatacctaatgtacaatttactgtattaactgttttaggtgtacagtttagtggcattaagtacattcacattgttgcacaactatcaccaccatccatctccagaaccgttgcatcttctcaaacagaaactctgtacgcattaagcaataactccccattcccttcttccccagcccctggcaaccatcattctactttctgtctctatgcatttgactgctctcagttcttatatgagtggaatcatacagaatgtgtccttttgtgtccggcttatttcacttagcataatatcctcaaggttcatccttctagttcattcttacaataaaggaagtacaacttgtgaattgggaaaaagcagattggatattttttagtcacaaaacatatttattgtcagaagtgaagcaaacaaagttgttcaaagacaaagctaaatatttgtcgaacttcacctcattcctgccctcctgaggtgacctgtgttaacagcctggtgtatttcctttcacacgtttctcctggaagggcaatttttctaaaatgtaaatctcatgagatttactcttctgcttcagatctttccatggccctccattacccccaggataaagtctgaaatgatggttatggcccagaaacactgcagacctgaacttggcctacttcggatgccttgtttcccgtggctcttcctagggcctgtagctacactgatccactttgaagttctcgaataatctgcaacctctggcctttgtacctgcttctgtcacgtgtagtcttcctagttctcctccctcccacccctgacctaggtaacttttgatcattcttccaaatatattttaaaattcacttttaggggtccttcctcttgtctgacagacctgtgtgaactaccttagcgcctgcagccagaaaaaaaaaaaaaaaagcttttgggcaaagagtcagtcactgtagttcaaataaacaatggttgttcgtagaagtgaatgaggagggaatatgggtataacatcgacaatacctgctacaacatttttcatgaaaacctctgaatcacttgaaaaagtaatgacaataatcaatcttattgagttctaaaattttatcttcataagatttttaaataatagctttgttgagatattattcacatacaattcacccatttcaaatgtacaattcagtggattttcatagattcacagggtcttatgatcatcaccccaatgtaatttttgaacatttttgtttccctaaaagaaaactccacatcccttagcagtcattcctcattccccatcaccaccgtcagtccctcagctccttacaaccattaatctactttctgtctctagatgtttgccaattatgaacattttatacaaatagaatcaaacactgtgtgaccttctgtgtctggcttctttcatttagcatcatgtcttcaagattcatccatgtggtagcatgtatcaatatttcattcctttttaaggccaaataatattctataatatgggtgtgccataatttgtttatcttttaattagttgatggacatttgggttgtttccactttttggttattatgaatagtgctgctatgaacattcttgtacaagtttttgtgtggagatatttttatttctcttcggtatatacccgggagcgaaactgctagatcataaggtaactctttgtttaaccttttgaggatcaccctcttaagattttaaagtacgatctgcagtgatttactgaatgtcacatagtgcaggtacacctacaaagccatcattttgtgctgcctcctggatagagggtagagatgcctggattactgggttgcctgtgtctctcatatgcttttctgagatggttggtgctgggagagatcctttgggaaaaactcttagcctgttcagcttctttaggtaagatgctgtcctgaggctgacccagttctgtctagttctgacccagttccaaacattaagtagagcatccatgtaccatgccaagccatacccttcccgtcctttaaaagctgactctgggccatcttgagtgttgaaatcaaacctaaacctcctctatgtagttaatcccaaagcccaaataagatatcatattggcaggaataaatccactcatcaaagtttatccatccattgtttgaggtgattgtttcctggattgtaggtattcctggaaaataatgtgaaacaaggtaagcttccaggaatgaaatgcaaactaaatggaaattaagacacattcataaatgtgtctcacaagaccaatgaagctaaaacatttatcactaagaaaatgattatccaaaacaattatcctaaacagtaagcatttggtaagtaatatcatatatacgtatacagataatgtatgtatgtattgtatatatatttatatgtttataaaataaacaaaatgcttcacatgaaaactccaactagagaaaatacgtatatatttaatgtgtgcatatatgaaatgcgtttacttacatgaatatatttatatatacatatattttgacattatgtttaacatgtagtaagtattctccttagcctagagttacagatagtgatgccaagttcagtcccttaattgatgaacaataattatgttgtattcatcagtttaaaaagcataatataaacaatgttattaaattccaagatttacactgtaatctaatagagatgtattggtggtgttaaaacagcaattaaaagaaatagctccctagccttgaaaaaataatatgcatctttctctccatctcccaatctgatcattagcttgtaattgaagtaaatttcataaaataccaagtagttgactttgggatggcatttctatcaatttacttgtatccattatttttctgaaatagagaaggttagtagcaatatcaaggaaggtggactgtgatttatagagaagtttgcaattatgtgactaagtgcttaatttagggatctcaaaagtataaatttacaaagaaagttgatcagttgtgaagataattcaggaaatagtccagtaaatgaaattgcccatgtagtatcatgactaaataggggttttttgactaattctgggtgaattataattatttttataagttcattttaaagacctaccatttaaagacaaccactcttaactttgggtatatattttttccagcctcttgaaaatatattcatttattttggctatgtgtgtgtgcgcacacgtgtaccacacatttatatttgctgtcatagtatagacacgattttttatcttttcacctgattttctattataagcattttccatattattacagtctttatgaacataatttaagtaacgtcaaataaggcataccaaaacctacttaactaataccagactattggacgttatgtattatgtgtgtgtgttgttattataaatgacagtgcactaaagatattcagaaataattactttttcccatatttggtattcttccttaggattgactcataaggtaataattcctgattttaaaatatggacagtttaatgtttttgacagatactgccaaattgtttttctcaagtactttaccaattactcttccagccagctttgttttatcacactgttgggatcacttaatagcatcctttgctttatcaatctttttcaaattgagagtgaatgtggtattctaacttgggaggtgaaaaatggttatttttcatttttaattgctggcaaagtcaaatatttttcttgtgtctcttattcaattatattttctggggaggttatttttatttcatttttttgacttgtggttagaatatggggtggaatccattcttctttctgaatgaaccagtatttgtttatgtttctgaactgggtaggtaactcataaaagaaatgttttagccaagctgttgagttgcattctctgcctttaagagcctttatgcccttccggtgcatgtattcagtgagtgtcccaactacttccagtgtacagatttcacacccaggtgtatggccaatagccacagggtgagtcctgatactgcaattaaagtggcctaatccaataagtagacttccttgaacatattttctgtgtggtattagtgtatgtaaaatttgtgatgtaattctactgctttcacaagcctttagtgaaactcagtggattcaaaactcacttttmctaagatgactcccaaatctctatattttcagctgagttaacaaatgtgaaaataaataaatgtttattggctttgaatttgggtcagttaagagagacaaggaattggggaagcatgagataacagagggacatagtaagacatagcactaagaatttacatggagaaccccacaaaaatacaatacagggtaaaggaaataaagactcatagaatcaaacacaaatccagagggacaaagaagcacagaagaacataatatcattgcataattttctgggtttagaattttgtcactaaagacatataaaatgttgtaattttgcaactgtgggtgtaaggggtgacattgccattttgagttggcaaaggatttacttctttgttcaggaggaatttgaaaagtagcacgggtttctcaggtctggattatacctctcttcaacatgacggaattggccgttcctgttacaggaggctttacctttcaacttgggttgctgactcatttgacaattttggaccatgcccacagcttgagagtacagagagtttgttcaaagtacttaaaaatagacacacacacacacacacacacacacacacgtttcagctggagcataatgctaaaatacatttaaaatgtaagaaatttctgtaagtagctagtacagcattgaataggtatctttcttttcaataatctaacagtgcaggcctagaatttaaataccccagaggaattaataattaacaaagcccttaaaataactctttaaaatttcaggtgcttacatgacattcagcaggggaagcattttagttttctgacaagtgcccaaaatggtgttactgatgaaaggagactgtagattttagacatgaggcagataagctatggagctaacattatgctattgatatttgggggtctgttttgaatccttgtccaggtggaaaactacccttctgcactggtactttaaattttttccttgacaaaattttgtattaaatttgtagttaaagaaacatttggaacagaaaatttgggactaaaaattttggaggataactgtgatcaaacggtcaccttgacattaaaatacgtttttgatacatcaggttttgaggaggaatgcattctgatggccgcactagcgttagttctttgcaaaatgagttgctcttcatccttctgaggtgaattaattgactcgtctgaattctttcctgccagcaacaaatatttgttgaggatggctacatgccagatattctcccgggtgctagggataaagcaggaaataacacacgcaagatctctgctttcacagagcttattgtctagttggtggaggggcagtcacataataaattaccaaatggaccaacaaaataaatacttagctacctacaaagtactgctagtgataagttaatcgatgaaaagtaaaataggatgcagtaatgaagcagagtcaggaaatacctcttccttagagagaacattcaaactgagatctgcgatcctgaacatgtaactatcagggaggtgagcattacagaatgtgggaacagttactgtaaatcccctatggtgggaacaacccttgcattttcaaggaacagaaagaaaaacaatgtggctgtagtagaatgagcaaggggtggtaggaaagacaactaagcaagagtgaggtcatatggggccctgtaaggtaagttacagggtgggactcctgtttgcaatggaagtcattagaagatttgaaatacagaagtgtaatgagttggattttgttttgaaagataccctgagatgtgtaatttgatatcttagaaaggcaagaattgaaggagttgcaggcttttgcagtagtccccaaaaaagacgatattgtcttagaccaagatggtattagtaagaatgctgagaaatggttgtattcaggtgacactgacttgctgatgtattgactggaggccagagtggtcaggaagaaaaagaatcaaggacaattcctggattttggcctgaaaaactgggtgaattgtggtaacattattgagatggaaatgactagagaggaactgatttgggaaaggaaacttaaaagctctgtttgggacatgttatatttgacatgattattacatagaggaaggcacaattaagtaggcagtttacatatcaagtctgaagtttcaaggctatggaactggttgagatcacctgtgaataattgaaaaaagaagaggctcaaaagtggagtcctgggactctccaatgtttagaggttgggaagagaagaatccagcaaaggtatttaagaagcagcaatgagttagagaagaaacccatgaaagcctgtggttcagaaacaagtgaagacagtgagtcaagagggaaggcatgaccaaatactgctaagagaacaagtcatttaaggacaaaggtgtgcccaccagatttggcaatatgaaaatcactgacatctttgacaagagcagtctcagtgaaatagtagagatgaaagtctgactggagtgagttggggaaatagagatggggaaatagatgcaatgtgtatagattattatttgaagaagtgctatgaagggattcaaagggaaagggaggtatttgaccacatattttttgaagatggaagataccagaacatgctcatgtgctcatggtaatgatccaggacagaagaagaaattgatgatgtaggagagaaaatatatgattagaggatcgaagccctgatagggatggaatctaaaaactgcatggaggattggcttccttaaagaaataacacttcatttaagtcataggaggtaaaacttcacatacaggcaaaggtgaaggtgtgtgtataggcgggttgattatggaaagatgaacaagttcttttactttctccataaaaatgaggcatgatcatcagctgaagagggatggaggtcggatggtgtcatgtaggaagtttaagaagaaaagctataaagcagccattttgtacaatggaaaattaaaaactattgctcaaaaatatgattcatttaattgtaggaaggcatctgtcaaatacggtggccttaatttcagaaaagagatgttaaagtattctttctgatgatgattaagcaaaagatactgctcagattgctccaggtttatgataaaaatgttatcgacagaaaaaaaacacctggatttgtttttgatttggggcgactgagcagatatcctaaagtgaatggggaaactagatctcagccacaggcacccctgtaataatttgcccaaccagcaataggtattttgtttttctctaaatctttgcactagtggtaatttttgtatgccaggtcttcttctgatacttgaccctgacaactgcattcagggcgtctcactgagatctatctagaatgattctttttttaagtgtaaattatctcaaagggattgaacctaatgaaggtataagtaatttcatctgagttccatttgaggccttgtcttcacaaacattgccagcttgttttggcttttgttaaatcgttttatcaaaccacgagctgcgttttggccagacatggaaaggtttcaacctatctccaatctgttggtatgaaataacaggaaaagcctctttccaaaaataatctgagtgaaaagttaaaaattatggagctccccaaagattcttgcgcatttagatgcaaactctgcctcagtctgccttctcctagcctgccatggtatcctccttcttatgggtgatctagtaagggataaagtatttactgctgtggaaaatccacactagggagtcctaacacaccctggggcctggttagggcaaattctctcgaggaggtgacacttgaactgattttgggggatgaggtggaattacatgaaatctcagcagaacgaaggcatggaaacactaaacagcgcagagtgtgagaagaaccacaatgaggggaaaggagttcagtgttgccagagtataggatgtggagcagaaggaaagaaggctagagaggttggcagagggcaggtcttgctaggtattgcagggtattatgggtaagatgggatatggaacctgaaagactgaagcatgaagcccaggatttaggtttgagctcctagcccaatgactgggcccaagtgataaggcagaaggaaacctgggaaaatgagtaggatttgatcatgtattggttcaggtttgtcaatgagccctacattgtaaatatgcttcacatacaggagggaggaatttcctcagtgggttgacagaaagccctgttggggaataggaagagcctccatctttggagccatgcaggcagctgacttgaatctgcgagggctcaggaaaatggtgtctgtctttgctgaagccacattcctattaatggaatgaggcctagatggtagcttagatcagaggttctaaattggtagcccatggaccaaatctctcacaagttggggctggctcgccagtgttttaaaatttgattttagtgtttttattcagctctccaaagcccttgctgttggctattgttttacacttgcccatctcacactttacctactattctattcagctccctgggacttttgggtttmcaagtcctaacttagaatgaaaaatgaagacgaaatcttgccagaacctcaatatctctgactccgagacaagtccaggcaacgtaacttccagaagctagcactcgggaggtgggaggtggaagttgttttcagagcagcaagaaattggggaggaaattctttgcagccatattggcagggtctttcctttctcaggaaggcagaggccagggtgggatggaccgcaggactccaggaaagtgctttggggatgttagccttgctgcaagatttaattttatgtggagatgatcacagaataggtagtttgtggccaggagcagtggctcatgcctgtcatcccagcactttgggaggttgaggtgggcagatcatctgaggccgggagtttaagaccagcctgaccaacatgaagaaaccccatctctactaaaaatacaaaattagccaggcgtggtggtgcatgccggtaattccagctacttgggaggctgagacaggagaatggcttgaacccgggaggtagaggttgcggtgagctgagattgcgccattgcactccagcctgggcaacaagagcgaaactccatctctctctctctctctctctctctctctctcttctctctctctctctctctctctctctctctctctctctatatatatatatatatatatatatatatatatatttaaagaataggtagtttgtgttgaggggctggaggaggatttctagtcaatggtgtttgtgatgggatgctagcggtgtagaaaggccctggatccaatgcttttaccttaaatgaaaaaaaaaaaaattaaattgtagttaaatggaacaagagaaaataatgtgaaagtacagttgacccttgaacaatacaggcttgaactgctcgggtccacttacatgtggattttctctgtctctgtcacccttggggcagcaaggccagctcctcctcttcttcctcctcctcaacctactcaacatgaagacaacaatgatgaagcctttttgatgatccacttccacttaatgaatagtaaatatattttcgcttccctgtgatttccttagtaacattttcttttctctagcttactttattgtaagaatgcagtatataatacatatatcatacaaagtatgtgttaatggactgtctatgttatcagtaagactaacggtaggctaacagtaattgagttttgggagagccaaaagttatacatggatttttgactgtacaggtggttggtgtccctaacccttgtgttgttcaagcgtcaactatagatataagcagaaggtaaaatctactataattgaatttttaaaacactaggatttcagcaggttcttttatcagaattaaaatagttgaggggccaggtgtggtggctcatgcctgtaatcccagcactttgggaggccaaggcaggcggatcgccagaggtcaggagttcgagatcagcctggccaacgtggcaaaaccctgtctctactaaaaatacaaaaattagccggtcatggtggcgtgtacctgtaatcccagctactcaggaggctgaggcaggagaattgcttgaacccaggagacggagattgcagtgagctgagatggtgtcactgcactccagcctgggagacagagcaagactccatctccaaagaaaaaaaaagttgaacgctgcttaaaaaatcatgtagagttttggggttttttttgttttatatttattttttatttttgctttttcaagggcaaattcctgaatgctggggggagatgctgtttctccatggtgatggaagacatgttttgtctcttyagatttaggctgctgccagagacaccgactgtagactaaagcagggagaattagctccaaagcactgggacagaggccatctgcttgtgaaagcagcttctaagaaaacatacctgttcccctatcccttcctgctccttcccacaggtcacttgccttaatggtgtttgccaagagagccatacctttgccttttctcattgcatttgtttatctgtttcaaattctgtatgcaaggcccattctaattgagtcaataaaataaaattctctaggagtctggttgttgtgttatgacttccaagagtccttgtttttgttctctaactacagttatgtattgtaatacctttatgttgtctctctattttagcaggaagggtgccactcaatccccagtgacagatgaagaagcagttgtagcttctgcattgctgtttcaatgatacctttagctctggataatgcccctggttatgtatgttgctcacagcttcagtgcacatacacacatacacacacacacacacacacacacgtatatgctagacactgagcatgagtctgtgccctcctatgtgggtcaaagtctatacactgttaggatgggactgtacagttttaatatgagtctttcgggttaggctttaagaaaagaagaagaatctgcttggcttgtgattattgaagccaatgtttttaatgccagaactgattcttctaccacttgtgacttctgtttgaaagttgctattaaggtcttaaggaaaggattttcccacacacatgtttctgaataacctattctggtcaagttcacagtcttgacctgccaccatgtttcatcctacctggtctgggtgcccagagacctggagcatctgagctggcaggatggaacttcttgtgcctgggcgtgccaaaacttttccttgacactgagaaagacaatgaggctctgaagccagaaaatgtctcggtgagttgaatagttacataaatgtcattgacaatcattgaattttaaagtagagttgtacacttcaaaaatgctacagaatttgtatgaagcataggacttgtataatcttggcaatggctgattttttgatgcgaagttcaggaagctttatttctcacttaagttctagattattcacatcccctcattattatttactgctctgtgttgaatggagaaaggcctctcctttattgtgttgcttacagctccaaagctggaacttagatttcattttattttactttaagttctgggatgcatgtgcagaacatgcaggtttgttacataggtatacatatgccatggtggcttgctgcacctatcaacctgtcatctaggttttaagccctgcatgcgttagatatttgtcctgaagctctccctcccatttcccccacccccttacaggccccggtgtgtgatgtttccctccctgtgtccatgtgttctcattgttcaactcccacttatgaataagaacatgtggtgtttgtttttctgttcctgtgttagtttgctgagaatgatggcttccagcttcatccacgttcctgcaaaggacattaactcattgtttttatggctgcacagtattccatggtgtatatgtgccacatgttctttatccaatctatcagtgatgggcatttgggttagaactgagattattaagctttgtcactatgaggctcacccaactgcttacttaacatctgtttgggctaatgccccatttcccagttccaacaggtcactcgaaatagtgcttctgctaggaactccctctctgctctcttaccctctcccaacttctcagcactactgacaacataagaaaaaccattctggagtggctacccagggttttcatcaccatgttatccccaaataagcccaaataagtttaattaacaatgaagttagttagtacagaagataacatttcccatgtatattagttggctagggctgctgtgacaaaattccacaccctgggtggcttatgacaacagaaatgtattgtcatatggttctggaggctggaagcccaagatcaaagtgtttgcagagttggttccttctagggatgtgagggagaatctgtgccatgcctctcccttagtgtctggtggtttgctggcgatctttagtgcctcttggcttatagaggcatcactctatctctgccttcattttttcatggagttctccctatgtgcatgtctctgtttccaaatttcctccttttacaaggacaccagtgaggttggtctagggcccacaatactgacctcattttaacttgattacctctgtaaagactatctccatataaggtcacattctgaggtcctagggggttggaacttcaacatatgaattttgaggcatactcaattcatttcacaacaccatgctacccaaatttactcatctggccatcttccagctcctcagaggtggcagcacactttcccttcctccttgctctagctgagggcattgcccccgggcctatctttggtgtaccttttcctgggtgatcctgccagactgcatggccagaaaaaaaacaggggaactttccctgtccttttccttctcatttcatcgttttcttttcttttttttttttttttttttttgagacggactctcgctctgtcgcccaggctggagtgcagtggtgcgatctcggctcattgcaacctccgcctcccgggttcacgccattctcctgcctcagcctcccgagcagctgggaccacaggcacttgccaccacgcctggctaattttttgtatttttagtagagatggggtttcacatcgtgatccgcccgcctcggcctcctaaagtgctggggttacaggcgtgagccaccgcgcctggcccatcattttctacttttctgtaacttggctgtaccaaatgcacttctgacctccccaggaagctccctttccaaatatctgtagttaacctcttccttgccttcatggtgcctcttctgttaggctttgttcttttctagaggcacatcatgttttggatatcactctaaggaacccaccaccagttttagccacattgaccaaattgaccagttgctttaggtatgtttttgaaaaaatataaggagaactttccgccctcaagagaatcacttttgtcccctgttgcccaataagttattaaagactaagaaattatataaatggtatatagtatctttatggaattatgtgatacattaacttggggctctgaacaagtccagcggaatagaaaccagtttaacttttttccagaattctcttactatgaaatttttcaaagaattatacagtcaacactcatataccaaccaactagactccacaattaatgtttttgctatatttgctttattccagtatatccaactatttatccctctctccatctatcaatctctcttgatttttgatgcatttcaaagtaagttacagacatcatgacatttcatccctaattatcttagcacatctattcctaaacagctttgtttaaatcagcatttccttatcgtatatgaacacaaataaaacacatatttttattcacatctattggtgacacccaaattttaagctccacagggcagactttgggctagatgctttggggtcataaagatactacctctgtaatgaaatctcagtttatgtgacattgccaccctgtctcatttgggttgatcacagactgaaaggggcctaatttaatcaccttattttatagatggggaaagtgagtcccagaaaggtggggactcttgtctgaggttatgcagccaggaggtggccttttgggcataaagctttttctactgaagggcaaagacctggcttcttcttgaccaggtggtgttttcatttggttctggtccttgcacactgctgactaccttagtctttgtttcacaggttcttgttggggcagactcactaggctcctagaagatggaagcagggccaggctttggcatcactgaatgactcctttgtaattttatttcttccaatcactgattacatcacactcagacttcttttccttggcacctcccacatgttgtcctctttttctagatttcctaatctgtcttctcctttctggtgaaaggggatgttttcctggagacgtagtcagcatactctatagcagacttctaaccctcttcataacatttgtaacacccatcacaaaatgggatctggggagggggtcacccaaagcagaaatggtagctcttcagttttatattcttccttaaagatgcttgtgattctaaaaattgtgttggtaatccgtaggagggctactatcatagtagtgaaatatttcatcctcagatccccatcaaagaaatgatcatggtattttagaataactgagggagtacaattgcttaaggaaatggataccccatttacctcaatgtgattattacacattgtatgcctgtgtcagaatatttcatgtgccccataagtacatccacctactatgtacccataaaaattaaaaataaaaaaggaaatgatcatggcatcatataattatcttctatacttaaaaaaaaatttcttgagagtatgtttatgcatacacacttcctctaattcccagaaggatttgaggcaggtaaattaaaagtttaattttatttaacagtttttataatgaataatatagcacacaaacccgagaaagacaaagctataatttctgggtttgattcctttattcatgggagactatgttgagataaagcaaaaacaaattttgtcttccacgattacaatacataaaagatagtcaactcctttcaaacaacaaagggtagagacaaaagcttggttattaaacaagactcattatgattgctgacattttagaaaatgcaatcatttgcatataaactgtgatgaagagacaatttttatggttttagacatattctgaaagaccttggaaggcaatctcattctagtatctcaaagcggctgcatctggagaaaggtttctatggcaacttatgaaagcttgatgttttttatctttttcaagagcataaatcatcccacagcctgaggcttcagtaaaggtctccattattttacaagctattgccatttgttttcatgttatatattttgattgtcttagaggaaagagagcaaaggttatcatgtttccgagaaggcttggagtctattttctctttttttcattttgtgggacaagacatgaataacatcattctaaacattgcttctcaatgatcaaaatgatggtacacattgcaatatttggtttatgtcacgtgttgtttagattttccccaaaattgtgactggtgcattctcaggaagacaagccagtttgaacttaaggaggaggaactatttggccaaaacacctcctaatatgtagttcagtagagatgccctggagaatgctgcactgttccacatgcctgcaaatattcctctaatgatacagtcccaaggctttggacattgatagactccaggtgatttttatcaacatattctttccaagaaagttaatttaaaaattctgattttaaaactctgcatgtttcaagaattttgttttagcaacatggatctctgtatgttataggaggtaataaggctgaggcaacacccattaagacaaagaaacagaaccaggtttcagacctagctctgccattgctaggtgtataactgtgagcaaacccttgaatctcttcgaacctccttttactaatccgaaaaataggagtaacggtgccagattcatggcattattgttaaggattgaatgcgtgtgagtgctgggaactgtgcaatgctgtacaaatgtaaggtggttattactgttggctgactgtctttctttccctttgaaaaagtcaaaagtttatgttaccatttctggatgaccagaggaaatcagtttcagtatgtcttaagtattttagtttcttatactgtatttaaaatacttatacagacactgatcactacagccatttatttatttatttactcagtaatcaaatgtcacccctgtagaagggtattaaataaattcattcaacaaacatttaagtgccaactgtgtactagcattgaggagacaaagaatagacaattaaattcttattgttcaggaaataaaagttttctgagcttcaaggccacagcataagctgttcaggtggtgccctgcccaagggcattcggctgatgaagtagaagggggatgtaatgcagtcccccactctgccagccaagccgtttgcatgcaccttgtgagctgcattcgcctgaatgaaggacatgttttggaaatttactagccaggagtgtgtgccttcttgcaatttacacgaaggcatgcatgaatgtgctagcagtggccctgatgcttgtatgatccgtgatgttaaagggaagatttgcaatgtttcactgtgaaatatgatgaaggctgctggcgtgcttgttatctggagtcagattgcctgaatttgaatactggctctgctacttgctagctgtgtgacctttgtgcacattacttggcctctctatgcttcattttctacatctgcctgcctcatagttattgggaggataaataagttcttaaaacacatagaatagcagctggcacacggtcaatgctcaaaatgttagctgttttcagtgatggctttactgttcagggtctccttgctactctgtgttgaaaagttcaacaattaacatctaaattctacctacaaaaaccacttttcttttatgaatttgatgtcaaattggtgatatttatctccttacctcagatctttttggtgtgtgtttgtgttaaataactagaaagtattctcttcagagaaatcagagaattccagttatttgatgagaagatgacttggtagtttttagaattttctcataaaaccactgctttgtcagagtgatagaggtgatgagggatgtttgcatattattggcttttataatcccagcactttgggaggccgaggcaggcagatcacctgaggtcaggtgttcgagaccaggctggccaacatggtgaaaccccatctctacaaaaagtacaaaacttagccgggcgtagtggtgcttgcgtgtaatcccagctacttggggaggctgaggcaggagaatcacttgaactcaggaggcagaggttgcagtgagccaagattgcgccactgcactccagcctgggtgacagagtgagacttcgtctcaacaaaacaaaacaaaactaaaacaaacaaacaaaaatgacaacaacaacataaaaaaaaaaacagtcccaagggaatgcctatatagtttaccaggattacaatagggattctttgaggtatagtgaatttcattgtcaattttggttaacatgattccctctctctcttttcataactttaaactgggaaagagtccttatgtagtattttcaagactattaactttgcattttaattttttaaaaaagttttgttaaatatcaaattttgatatgaagagtgtgaaacagattgacaaagccaagcatgaggcaggtggtgattttgattttacccctccctttgtattctggctcctctaactgcccttaagacactgtaaagagggcacttctgtgttactgccactgtgtatttcccagtctcccacagcatctaacttgggccattttcttggcaaaaaactaaaagtgcagaatgctaatcatgttgtacatcactgatttctaagtatttaaaaaatttgggtgtctactcgtaattgagattgtcatcacttttatgaaaccttttccaagtaaacttctcagaagagagatgcaatatttttataatttcataacatcaaatattagtctaccattatttgtgtgtgctgtgctatgattattcatccaagggcctgtcatggggacatagggactgcttctgaaagtgccaaattaccatttggttgtgagattataattgatactgcatgttaaattcaagtgtcattagctttttaaaaagatgaagtgatgataagcttgctcctaaattgtttgcaaaggttaaatatctaagagaaaagctggtatttaagattcttatatttagtcagatagtagaatgttttaagacactttatatcaatcagtgtatatgtagagttactgtgtttttaattttttgttttttgtccaagggtagtggctaagagttcaggttttgggttgaactctgactctgccacttactaattgcgtaacctacagttaagtcactgaatgtctctaagctgccattttttctttttaaaatgaggataataatattcctcagcattgtggtaaggatcagttgagctttttgtgtaaagcgcttcacccagaccaaagtgcttcatgagttatgatggtggctgttattactctgggcattttattttattttatttttttaagacagagtctcactctgtcacccaggctggagtgcagtggcatggtcttggctcactgcaacctccgcctcccagattcaagtaattctccctgcctcagcctaccgagtagttgggattacaggtgcccgccaccacacccgggtaattttcgtatttttagtagagacggggtttccccatgttggccaggctggtcttgaactcctgacctcaggtgatctgcctgcctcggcttcccaaagtgctgggattacaggcgtaagccaccgtgcctggccrgtattttcatttttaacaaacaaattkttaattgcattatatcaggagattattgcataagtgtttaaacagtggcgattacattgtctaatgttttaaggcaaatgtatttctgctactgtatgatttttttttgcaatagtattgcactcaaaaattttcatacttcccagaggatataccatctctcatatttttgtttctatggcaaaatgtattaaaagttccaaacaaccaacatagaaaagaactcttgggaaataactgtctttaggtgagggatgctctgtagagttcattgtttgcttagtccttgagcagtcaaactattagtccttttatcagtcatcattgagggaggtttttgagctacctcttctagacaatcttaatcacctcttgaccagactccaactcagtttcctatgtaccctaaaattccctccttctaaattgcagtgacttccctaagccactgatatttggaccaatttttttttcagatcaatttctgtcaattgatttccaacaagcctcttgactaccccctatgaacattagtgagctaaattgtaagttacttccagcaacatatttttgtgttgccctttttaaagatatttttgtaattttctgtttataattgtttaaggtacatgagcatagagaactccgttcaatgatttgataagtcttttgtttgttttaataactgtttatatttaacatcagatattattgggtaaatgcatttactaaaagacggtaccttttgtggaatataaaatgctagtgtatacaagtaacgatgtatttccttctgaactcttttgtttaagcctcagcatgctcaagcggtttatctaaattcagtgataatagctgttactatggctgcatgttatttcatttgttgaattgatgcttggtaagaaaaatgtcattgaattgtttgcaattttgaatttaaatagaagtggttctttttccttatggaggtaaaattaggaaactggggttataaatcctgtgccctgtattcctaaatcagggttgtgcaatgcttgtgtgcactgcatggggttcatggactttggaactgttatcccatcagcaactggaagcattggctctgcccccggtgacagggatgggaagatggattaactcaaataatgaaatgtcaaatcagcctctctataaaatgggaattcctcctttaagatcactgatagacggtgactaaagccttggcttttcattatggtttttaatgtgggctcatattttatgttatatggattcttataaaccacaacatataagtgtgtcttaaaaacaagctgatccaaaaaagtgagaaatatcttttgaagtgtaatttctctttgtagcaaaaattggaagatgcaatcaatgaagaggatggccatgggggtccggggaagacagtgttgtataatggctgtgaatacagatgctgcagttaaactggctttgtcacctactccttatgcgaccttggtcatctctttgggcttcgattttctcggccataaaatgggaatgtcaacagtacttatctcatggggtcgtagaagttcattgaattaatttattaaaacacttagaacccagtataataagagtattagctattttataggaatctttttaattttgcagtagtggtgtctaaaagtcacagaactattatttttgaaagacaagatagaagcggttttatttacgttgtaaggcatgagagcatcttggcatggccttaatatttggtctcataaagcaaatgaggaaggtaattggaactgagcacattcagcccactcatcatgggaagagcaccagatttctgttctctgagaaagcttgctaaattctgtaagagtgcttttaaaaaaaaatacagtattttaagagctttgaggtcaaaaactacatccaggatggattagtaccccaaactttatacatgtactccacactatgctttgtcctttgtcaaaatgtattgaactctgcattaatggatgtatcagtcagggttctccagaaagacagaaccagtaggatacatagaagaatacatttactgggggaattggctcccaccatcacacagatagaggagccccatgataggctgactgtgagctggagcatcagagaagctggcttagtctggaagcctcagaaccagggaagctaatggtgcagctcccagtccgaggccaaaagcccgagagcccaccggaggtcactggtgcaagtcccagagtccaaaacctggagtctgatgtccaaaggcaggaggagaacaagcatcccgctccagaagagagagtgagggcagagacagagagagtcccctcttctttcacctgtttgcccctgcagggccccagccgattggattggatggtgcccactacattgagagccggttttcctctcccagtctgccaactcccatgccagtttcttctggaaacaccctcrcagggacacccagaaacaatgcttcacctgccatctaggtatcccaccatccagtcaagttgacacctaaaattaaccatcacaatgggtaaagtttattgcatgtacatttacctcagtaaagctgtgggtttttttaagagctaaattcatggtggtgagaatgtaataggcattcactaagtatttttgactaaattaataattaaattagtcatgaatggaattatttcattcttcagtgatgggtcatatcaggaaatccagatgcataaggggtcgaattttacctccttgattttgaaactttacgtcaacttctaaaagtccaactttaatagtaaatcccagttcctggcacacactttgaaggcccactgtccctcagtttaccagtttttcatatttaccctgagaatgaagtcagtgactggacttagtcctgtgtctgcaactcatatatttctcttgagcatggccttgtgttctcatttatgttatcagacatgcaatttagtcattaaaatagacattttgatatagtggcagaggatgtgtttaagatttgagaaatttactaaaaaatgaaatcccttttgtcgtttccagaaacatcagactctgggcctctattgacaaaccgtatccacttgtaagttgaatgtaacaataggcggtgcacgtgagccagcatggacttttctcattggctgttagcatgaggagcttgtctggcatccttgtatttgatcctgatgtcttactgtcttttctcccaggtatggcagcagccaaacttctgcatgactctggactkaatgtggttgttctggaagcccgggaccgtgtgggaggcaggacttacactcttagggtaaggcattaagaatccggaggacaaatgtgggactgaagctgagtttggggtttcatttttgtctttttccccaaaagtcttcaatttcatttgactctaagagggtgaaaataactctgaaacattcttcacagcctctctcccagtttgccttcctttcaattcttctgttcctttttgtcttttcatctcatgatatttggcctcatagagttaggattgagtaagagggaaatggacagatatgtgtgtgcctctgtgtgtgtgtgtgtgtgtgtgtgtgtgtgtgtgtgtgtgtgtgtgtgtgtgagacagagagagaaataggaagaaaaataacataattatatgtactttccactcctaacttcgatgcttccttcacaccaacacaatcattctaatcatacaaactaaacttttttggagagactttctcccatttttaaatttattttttaaattttattttaacaaatcataattgtattacatttatggagtataatgtgatgttttcaccatatgtatacaatgtggagtgattaaatcaagctaaattaacatattcagcacctcactttcttgacattttttgtggtgatacatttgaaatttactctgttattttgaaatgcacaatacattattattactacagttactgtgcaatggatttcaaaacttattcttcctgtctagctaaaattttgtacccttcctgtctagctaaaattttgtactcctcattccctcagttctcaccccccagcccctgataatattcattttgctctctacttctatgaattcaacgtgttttagattccacttataagtctttctgtgcctggcttatttcacttagcataatgtcctccaaattcatctatgttgtcccaaatgacatttctttatttttaaaggctgaatagtatttcattgtgtgtatataccaagtcttcctcatccatttatccactgatggacacttagggtgatttcatatcatggctactgtagataatgctgcaatgaacatgggtgtgcagatatctctttgacatattgacttcaattcttttggatatattcccaaaaatgggattgctgaattatgcggtagttctatttttagttttccatttttagttttctgaggaacctccatactgttttctgtaatagctgtactgatttacattcccaccaatagtgtacaagggttcccttttctcttcatccttgacaacactgattatttttcctctttttgataaaagccattttaacaggtgtgaggtgatatctcattttggttttaatttggatttccctaatgattagtggtgctgaactttttccatgaacctgttggccatttgcatgtcttcttttgagaagtgtctgttcagttcctttgcccattctttaaaaatctggttatttgtctcttgctattgagttgtttgagtttcttatataatttggatattaacctcttatcagatgtacggcttgcaaatatgtaaagaaaactatcattttattaattgttcttttgctgtgcaggagctttgtagtttgatgcaattccatttgtctgtttttgctttttttcctgatctttcagggccatatccaaaaaatcatttccctgactagtgtcatggagctttccccttgttttcttcaagtaattttgccgtttcaggtctcgtgtttaagtctttaatctatttagagttgattatttgtatatggtgtttgcatatggtataagataagggactacttttattcttctgcatgtggatagtccgtttttcctgcaccatttattgaatagactgtcctttccccattgtgtgttcttggaatcttcatcaaaactcaattgattgtaaatgtgtgggtttatttttgagctttctatcctgttctattggttggtgagtctgtttttatgtcagtaccatactgttttgattaaaattgcttcataatatattttgaagttgggtagtataacgccttcacctttgttctttttgtacaagattgttttggctagttgtagtcttctgtagttccatatgaatttaaggattgttttttctgtttctgtgaaaaataacattggcattttgatggggattgcactgaatctatggatcactttgggtagtatggacattttacattattaattctcccaatccatgaacatggatgtgtttttatttattcacataaactaaacttttacctgcctaattttccttcttgtttttgcttcagcttttatttttttaaaagaattatttaccaatttataaatacccttattttaattgctggttaattgtttcaattctgacactgttgcctaaaattaatgattttctatttaaacacagagtcaagcaaagcaagtttctctgcaaggaaatgccctacttccatacattcaagatctgaataatagatatagaagctacagagtattttcatttccagagagataagacatataaaattctgactcacagctcttcttttggaaggattcatcaatgatatatatctgacattttgtactcattcttttttttaaattatactttaagttctgggatacatgtgcaggggtgggatctgctgagctagatcacttggctccctggcttcagccccctttccaggggagtgaacggttctgtcccactggtgttccaggcaccacttggatatgaaaaaaaaaaaaaaaaaactcctgcagctagctcggtgtctgcccaaatggccgcccagttttgtgcttgaaacccagggccctggtggcataggaccgagggaatctcctggtctgcgggttgtgaagaccatgagaaaagcaaagtatctgggccagaatgcactgttcctcatggcacagtccctcacagcttcccttggctagggaagggagttccctaaccccttgcacttcccaggtaaggcgacaccccaccctgcttaggctcatcctctatgggctgcactcacagtctaaccagtcccagtgagatgaactgggtacctcagttggaaacgcagaaatcacctgccttctgtgttgatctcactgggaactgcagactggagctgttcctattcgaccatcttgccagccctctgtactcattctttactttgagtcatctcctttataattgaatttgtcctcagcaaatatctactgagtacctactatgaatcaggcacagtaatccccccaaaatggccttgctccacagactttacagtctctcagggggacaatgactgttgtaattgcctaattatagcttatcaaggaaaatgctacagtgagggtgggtgacagcttggagtggtgccataggaggcataagagggtaccttaccagtcttgagagccagagactcagagaagcctgaaagccttatctgttattgactgtgacatacaccgcctgacctagttatttgtgatttcacacaagccttcaaacttgatctaacccttgttgtctactggccattgtttttgccattatgtgttcctcaaatatctctttttacctttgtcgtatggcaaaatcttcacatacttccaggatctcatcccttcctactccaatcaaaagctacttgcctttcttctgtgttaataccacttacctgttccacacaaggacaattattatatgttgctttacaaggttttgcctgtgtacatcttatctctcccagttcttgaaatcttcatattccttgaaaaatacagcatataagagtgccttttacgtaaagaagctggtttagtacaattaggtgctgaatttttaaaaacatccttctttcatttatttgagaaaatttattggacaactgctataggagtttggaatactttagtgagtaaaacaaagatgccttgtgaaaattgcatttttgaagggtaagtgagtggaaagctagacaaaaaatacgcaaataaacaaaaacagaagagaaggaccatttctagtgtttctaactggtaggaacctggtttttcttagacatactcagaaataggaaacttttctactaattttttgttcaaagttcgcccctcagtcattggaaatgaaaccaattcaaaactacgtaaatatactattaaacataaaagcaatttcaaagtccaaattatgaccaaatattccctagtgctattttcaaatgtctggattaacaaatcacataagaagtgatcgttttctttcttgctttttctctagcattaggctcctcaacattcacctgaagtactgagtaaagagattcgtcaataattcacagctcacaaattcaaagcactaaaaaccaagccatgttatggtatattgtaaatgatgaggtttagaagctcttgcctattcagagttcaatcaattttgctttaaagattgatttaataactaagtcatgtgaatgaagtagagttgataacaaaatctagtttttcgtggatatacccttaagctgtatctataacttgtgaaatgtcgatttgcttatttcaggactgtcttttgttattttatacattttttacaaawtttttttaattttttcctatgggaaaacagaaccaaaaggttaaatatgtggaccttggaggatcctatgttggaccaacccagaatcgtatcttgagattagccaaggagctaggattggagacctacaaagtgaatgaggttgagcgtctgatccaccatgtaaaggtaagatcaggccagactttgaaggatttgaaaacttctctatgatgtttccttacacaaattccagatcattctctcagagaatcttctatatctctggatgatgcaaatgtattttataatggtatttcagccactctgagattcattcactgttatcaaaggtgaattaggtgggaattctacctatttaggaaggttattgatgaagtggtatcttccatgtggtaaaatgtttaacaaaacccataaagaaaaaacatttgtgctttatttattaaatatctatttaaataccgggaagtcttttatgttatataaaaacctgtgcaaagtttttaaaatgctgccctagactgcacattgtaaagagtatttgcaatatgcctaatggaatattcttacattttatcattgtggcctatatatcagctaaagttattcttctttggagattgacatcaaagtggttcaagtcccagatcccgtcttttgcaaggaagcttcattgttctccccaagatttctgtgaatttactgagtttctcattcctgtgatcatttgtggctcatagttctggcttccatgatacctatgttcattcacatctcacggcctgtgactcttttcttctctttgcttatgccaacctgggttcacactcacctctttgtcctgatttttctcagaccgccacaagcatatgtgaaaagcaaacgtcactgaagtttgcttgggtttggtgggcgggggaaggctcttaaatttgcagaaatacaaacagattagaactgaatgttggacattcattctaataacctcttagatcaaagcatcccctgaggatttctcactggtcacatttctctgcagattccagtctcccaccatgctgctggtcctcagactctcttcacatctccctgctcctctgtttttccagcatcctcatcttggtccacaaagtcactcatgttctctgacaatcagacagtcacctaatctgggccccatccaggagtcccatggaagaactggcggaggttttcaatttcagtctttcctctctcatcttcacttgctcctgtgggtggaagtaagcagcacaggaacttattcctcactggtagaaaacatccccttagaagacagaagaaactagcaacggtcaattttgatttatataacaattttgacatcctcatattatttgtgagtgataatatcgaaacaaataactgaccataaatcatgaaacatttaataaaatgggaactaagcagttacttaatttggtataatgtgggtaaaagttttccttaatttataaataaatgttttggttgaccttcaaattttattttatattggccgggcacagtggctcacgcctgtaatccctgcactttgggaggctgaggcgggcggatcacctgaggtcaggagttccagaccagcctggccatcatggcgaaaccccgtctctactaaaaataccaaattttattttataagcctttccaccttccttccctatgtgtctaggagaaaaagagacacatgaattagaaatgaaaatctaccatggtgataatgtgatttgttgaacatcaatcaacagttcttaacaccctttgttgggttctttgtttttttaaatgtagattttcttgaccgatttcttatgtcttattctacctgtaaggcttgcagagattgacttttcagaacactaggatctttaaatttctccagacaaaggaaatgaccagagattatattcacttgcctgtctttgtgtgtgcagagattattgtcagctcagagctatgtccaggatgctttgttttttcctgacattaagtcccttgtctgagagaaattgctgagtcatcaattacaggaatgatgttacacttaaatgatatttcacagtgatggccaaatgtgctgctttttcactatttccattactctatgtgcagttaggaaaatacaagtagttaagcagtagtccttacttaatacagggtaaatacatatgccaataatgctctttatatttaaaataagtcttactgctttttaattatgacaaaagtaaagcatgtttattgtaaaaatatgattagaaaatatagataaactagaacaattaacaaaccctttataatactatcttgagaagatcactctaaaatactctcttggttcgtagattttcgtattcctgtattgctattttctgacctctgctggaggaaatgggaaataacagtgcattttaagaaattgtatgcacatgcatatgtgtatatgttttacgtagtaacttactctcaaattaattatcactaatgagacaaattgaaaaaatactgatgctgtaaaaaaaaggtttctgcagtcttgacaaaggtgccaatttggcctcctcgtgatcagtcacatgcagtgaagagctacatgataatacataatgacgaagaccttatagctaagaagtccttctcaaactaagtacttgttctctaccatctccacttccatgtctttgtatacgtcatttttctcatttttgacctgtaaaaagcatcttggatggctacattcatttccggaattattaacaagaacttcgacattctttctcctaccacatactagagaatgtagttgagaaatttgcctcctgtgtcatggaaagcagtactttgggaatttgaacactgccctctattacctattttaataactactgtccccaagggcaaactacagttcatgtaaatagatagtatatttgggccttgtttcttttttatcagggaacatgcatgtatttcttaatctgaatcttgagagtatcaagtatgctacttgccatattgtcagatcctgctatcaaagaatctgcttttaaaattttttatgtggctgataatgggaaatagagttttatgtgcaaccttagtaacattaagctaaggaacttggatatactggttgatattgaaatgaatgaagtggagctacccagaaaaggggaagggcacagtagctcatggtggactaactacccacatgaaagagtgtgtttcctcaagagaggatgactcccaatatcaccagttctgtggtagttgtcatagaaatgttcttctgatagaggaagtgtgttcatgccagctccataataggcatctttaaacacctagtgtgctgtgatgaacaggcctctgtcttgatctgatctgtcagacatgtttgtatctactgagtggcgttcatttttaatgctctgtagatctgttatatgttgttaaagtagggttttccaaagacaacttcataaataaaagatgtgataccaaactatattgggatttaattatcagtgagaaagggatcgcttcagctcaaatctatataatttagaaggtgttttccttacttctggagtcagtgatgcagctgttagtactttacaattattgttaaacatctactgagatttttgatccgttttacaaataggcatgctaatttccactggtatagtttagaaggcagctgtttagatgtcttggaagtaacttgaaaaaattgttttcttttaaggaatatttcataattaaaaagaaaaagataaaaacaaaaacttcttaaggaatcctgctatattttgacttatgtttctttctctttcattgtgtgtttacatgtgcatgcgtgtatggttgtctttgttcttttgggctctttgaagaagttggagaaaattctaaggtttggtacaatgtaggcaaataaaatttttctgtttcagaagctttcatcagtctgaaatttgaaagtaaagtctggtaaaacacccatgaaactgctctaggtctgaaggttgaactgttaagagttttgccactataaagatgtagtgtgacttaaaattaagagtccaacttcatactgatgttcatttccaaacttcagctatctggagaagctgagcaaaaggactttttggtcttaacctacttcccagtgggcagaaacaaagcttattgtcaaagtcctttttgcattgcatatggtcaaccttcaatgctaaagatgcatgcgaatgaggattcatctctcaaatatattgtctgcttgttgctgccatagctgctattgctcaaacagcctcacagaggaggaggcatttggcacaacccctcagtcttgctgacaactctgaaatccagttgaaaatatgatacacaaaatgcacacaaaggcagagaggggaaaccatagctatctatctgcgatgccatttcagttaatctctctgtctaaatggcctctcagtactaagaaacagcaacaggattagagtagaaatattgagacataaaaaatgcaaatgataattgcatttagcaaatggaaatcgtcctgttgtgtaaggtcttggcatctcctggaaatcaacaggccagaagtatccagtcttctctaggtcctcaatattcccttcttcacacccctgtccccgatcctattaatccaggggaggctggatcaaagtccagaatacacttgcttctctcataaagacagaagtctccaggaacaggttagaccaactcttgtttttattcaggaacagttgcccattttacatgaacttcacacttaccatgttgagtttactggctctgtgagtttgccctttctgaagtgggcttaatgaaccttttctaccacttccacccacactgcatttcatttcttatttgtttgaaacaaatatgtcttattatggaagattttttcaaggaaaaatgtggagaatagtaattttctctctagtaagtgaaacacatttgtctagtgatcattctaaagcttatgctgttattctggaaaccaaagtgctcatttgtgttctttagagaatacaggcagatctttggcatgtaataatttgctgaaaattatgcctttgatggctgaatttggaacaacatttaggatatgagatgaattcattttccgcctccaaggtttccatttggaacttaaaatatggtacaatcagtaaacatattttctatgcatacacacacatatctggataaacttaacagtgactatggttgtgggtaacagttagttttaaattttgctgggagtggagggtagacaatgtatggaattaagttatgatagtgaaattcactaagggaaacagcgatatagattaaatcttgtgcaaaattttacagcttctatactatgtgatcatgtgttatggccaagtagtccaaaggagctgcaaagacagggggcccagctcaccaaaagatggtgactaataagggaaccatgtaacagattaaagagagctttggcaacttgcagtaccaagagattgacagaaagtgcaagatggcctgaaatgtgttagcctgccttaccrtgtcctctgcagagcagcagcctgcagaaaggcttaggcgtggattcccaggctgcgtatcacatgtcctgggcatttctcttggcctctgcaaccaccaagaagtaataacaatggtaacattactcttatatggacatctagaaactaccaagtgttttcaatctcaaataactataagttatttagttgtgaattagaagtattatccccatttaacaggtgaggacctaaaggttaaagagattaattgcaaatgacaagatgcaatggggtcagagcatgagttgaggcttttgggtgtcaagaacacactgcaaagagctcactctctgctggttggggactactttttgtcatttctttctaagcctcagcacccacctggcccgcctttcttcttgccaaacttatactctcacatattggaaaaatcgagttcaagatcctcctttccttaagattttccacagttgagtacagttattccactagctccctccaaagccctgtatcctcctcaccttcctgattattctttataaaagtctgtttttaagtaggataaacagttttctgttacttgtacatcgagacttcataaacagttgactcttggacaatgtggaggtcaggagtgctgaccccctgtgcagtcagaaattcttatataacttgactccccgaaaactactaatagcttgctgttaattatgttggtaaacacatattttgtgttaaatgtattatatgctgtattcttacaataaagtaagctagagaaaagaaaatgttattaagaaaatcataaggaagagacaatgtttttactattcgttaagaggaggtggatcatcataaaggtcttcatcctcatcatcttcacattgagtaggcagaagtagaggaggaagaggaaaagtcggtcttcctgtcttaggggtggcagaggcagaaaaaaatccatttggaagtgaacctatgcagttcaaacctgtgttgttcaggggtcaacgttttgtgtatgtgtgcaaaaaagcaaatgtattacaagtaaatgctaacaaccactgacattctaacagtttctcttagagctttaaggttggtaagtacttggttggccttccagattatccagatgattgtacttgatgaacaagtaaagctggcgacagttttacgaatgctttatcattttttctacctgtcagtcttgtggcacctgtttgctggctacatgcagcctgtccactaagacaaaggcacacacaattggaaattttgtcatagcagcattctagttcagaatatcaccaagtgataaatcaagaattcaggaatggatcagctttagtgaaactggtgttgaacataaaatatatctaaataaagatttaaacaattggaagaattacaatcatagtaatttatgtacatgttattaaaaatgtttatatggtaaaaattatataatcaacaaaatcagaatgtagagaaggtgagaaaggaagacacataagagaggtaacagctgcttaaatctttcatagcaatgaatcaatctataccaaaattaatagttaataaatagttaataaattaattagttccctcaggaactaatatctcttagggtgtgtgaaacatctatttgaagtttagcacttccttcagttcatttcagtttatgtttcttccatcaaattgaagtatatttccatcatttaaaataacagatataatatgattcaattctcatattttttattttctctttgttcttttctccctccttcctttcttccttccttgttttttgtttccttcctccctctctcagtcatccatttgttcatttatccatccatagcaaccatccatccattcgtctattcatttttctatcttgtagatgcttatataagaggtctggaatgtcatacaccaaatgttacggctttttttttgtttaacttgatggtacaacatggagtaattcgttgctttcttctttgtactttttagtactgccaaaacattttataaagagctcctctcatttttatttttaaaaatgtaattagacacagactttactttggaaagctcatgatctatgagaagaggttaggcccagtgtttctagcagatctctgtgcctctcacctgcctaggcagcagtctcctgggttacatatccattaacaatcaccaaactgcttccagccaggcttagtgactgagcttagatcctttgagttcagacagtctagatcccaaagcagctgttctaatgcagaacctcaaaggcccttatcctggtattattgtgctgcagaattttctgagtgtctgacacatacacacacacacacacacacacacacacacacacacttaatcattgaccttttgtgtgtccttggccacgttatttatgcttttgtgttttgatatctctgttgaaaagaaggatgtttgtacctgtcccacttagtattctgaggtttaaagaaacaagatgttaacaagacactgattaacatcattgtcacgaggctgctgtgatacactgaagatcctaagaacattttgataggaaggatagagtttctttactttccttttggaaacaaacttttctaataggttctggggattcttagtagcaagtaagaatgtaaatgatgagacaccaggtaagatgaagctttacaaattcttttcaaaagaggaccaggccaataaacttacctgaaaatattttcatgggcttcttatacactgaactgtgaactttcccccttaaaatccagtattatttttcttctgtgttattggtaggctaggagagaagcatttggctgcaactaaactcacatgcccaaacaggctaaatcgatcataaatagataaataaagtgatcttttctggctgtattaccttctaagtttccttcagttccagtcagacttttaataccctagaataggggacaatggctattactgggcttagctgagatcctttcctctgggtccctaactggccatgctggcactcttgtagagtcaggaatgtctcctcctgtcaggagacaggaggcatctcaggatttactagtctctaagaaaacctaagtttagagaagtaaaatacattactttaaaaatctcttttgatatatgcgtgaaatctaaaagtattaaaatagcttacaacagcactgtccaatcaaaatttaatatgtacattgataattttacatttttctagtagccatattaaaaagtgaaaaagatgaaactaatttttataatacattttatttaacccagtatatccaaaatattatttaaacttgtaatcaatataaaacattattaatgagagattttacrttcttcttttgtactaagcttttaaaatctgatgtgtggtttccactcacagcatatctcaattcggaccaggcacacagtgctcaatagcctggtgagtggctactgtattggatagcacagggataaaaggttagtagattctgtgtatttttgcaaacattgctaatccatcttaaatttgttaaaaaataaaacccgtacaaaacatatgtctaaatctcacaacagagaccctacagtacatcgcaaattaacttcctttattctgttaacttcaaacatctgtcatcacaaagaatccagaagtaaacaatgagtgaagttccttatgtgcctgctacttcctaagggcagggaaactttgaatcactttgagaaaactatcctaggtacacagggagatgctatgtcctgtgattttaatgcattagaaagtgagcaagctggaagtaattgaggttgacgtggtcagagagactaccctaagagaatgctttgaacacttacaaaaaccttaaaagacactgcgcaataaattcaagggaataaatttatggagagcataaagacttttcatatagtgtcattattttaatacatttgctcatttgtccctgtctatgactaattcaggagaaacaatagaactgtcccaaagtgccataaatggtgattatcttaacatacagtcagagaaaagtccaacaagtaaagagttgtagagaagataagcctgtagttcaatggaagtttatttactcttttcatcttttagcacacatgcttcatgcaaaattctgagcaaaagaactgcagagcgacctggagcattttactgctgacatttactatttccccttttttaaagttggcaaatgttaagggcagttgctacagacagcttctactcatgtgcaaaccatgagaaaaatcacaattcatagttacctataatttaggctctcaagggaaaccaaattcatatgtacatggtggctcctggaaattctgttccaaactcaatttaataataacaataagcaacatcttttgagattttgatagatacaaagcaccattctaagcagtttatatgcattatctcacttaatactcagaaaagcctgatgatttttattatttctccttcacaaaggagagcattgaagtaagtacaaggcatttacacaacttgctcaagatgccccagttggtaagtgatggagtgggggctttaaccctgatccatctcactccaccatccaggtatttggcagctcagcttaggtgcaggccaacatagagattatacttaagagcagatgaagtctcaaaaaagacaaggaaaaggataagggtgctgaggactgaattgcggggcaggccctcaacccttctcccctttccgttcaggttcttgcttcctaatgctgatttttttttttgtcttatgcctcatcactgatttttctttttatctccatttgaccacctgtgacctacttgaccttccagtggaggacactgacatgaatcatctatttggttaaatcaaggactattgagagacattgaaatctctcatttcattcttaatccaggaatttaaaaaaaagtattaaagctgctcatttgagtgagaatgctggaactctgtgtcacacaagataaacgtaagaatagagagccatacatgtttcttgggtttatttcatgtttccattgcaaagtataaacataatagggttagaagaagcattgctttctgtataacttcatacttaggcagaaaggaaaatataaaattacatgtttaagggtgacctatgtggagtagatgttttggcaattgaaaggatgtcattatgatatctaataacattgatcctttggattagaaaggatgagagtccatctaaaaacaacaggttgtttttaagctgctacttttcttgatgaggccaggatagttgtgctgctgctattttagggacctcatatttcttcctgattggttccaggcatttctcccagatatctgttgacatcttgtctatgtatccaggctggagctaaggtttcttgactgtagaatcctgggagaaaaagcagtaaaaataaataagttagaaagatagtgaataaaattaaattttcatcatgacctccaagtacctaaatgatatgccccaccaatctcctggcccagctcaccctggtccagccactctggcttctagtgtgccaagtttattcctgcccctgggctattgtgcttcgaagcagattaaagatgggtggctacacattctttgatagtcttcccatggaaagggagagttggggtccatgcctcctctctatgaatctgggaggactctgtcacggctttgaccaggagaatatgactgaagttatgctactccagtttgacagcctaggccttaagaaactggtgggttccacttttgaaaccttgagttacaccatgtaagaagtccaaataccctgagactgccatactggagaagccacatgtaggcactctggtcccctgtgccagccaaatccaaccttccaaccctccttacaaaggtactagacttggaagtgaagctgtgtcagacatccaacccagttgagcctttgaatgactccagccccaaccgccatctgacacagccacataagtaaactccagcaagaaactgcccagctgagttcagtcaatccacacaactgtgagagaaaataatagagtgatgccttaagccattaaattgtggggttatgtttttatgcagccattggtaaccaaaacacacttgctattccctccacttgaaatgccctttcttgggcctcaactcaaatatcacctcctcagagatgccagagtagcctctcccacccccactggtattctctattcttaatttaggctttctctgctttattattttttatagcacttataaattatatcatgtatatcatattatacatgtatttgtttttgactactttctcctggtagaaggcaagttccatgacggcagatactttggttggaatatgtccccaaaatttatgtgttggcaacttaatccccagtgcaacagttttgagttgtgggacttttaagaggtgattaggtaataagggctctgctctcattaattgttgctgttattgcaggagtgggttagttaattgtgggagtgggtctgtcatcggagaagtggactcctcataaaaggatgagtttggcccctttccttctgctcatacttgtgatttctcaccatgtgatgccttccaccacgttatgatgccacaggaattccctcaccagatgccagcaccttgttcttggacttcccagcctccagaactatgagaaataaatttcttttctttataaattattcagtctgtggtattctaatacagcaatacaaaatggactaaggcaacaaaattatttctttttccattttgtccactgctgcatctccagcacttggctcaggatgtggcagttggtaggctttaggtaaatgttccttgtgtaaatgattgaaagaatgggtctttacccgtatgtgagcctgtcccttttagagcacaattgggcagaccctgatttggcatcactcttaggagaaaacggaaatattttagccacaagcactctagtcctacaggaaaagaagtgccacctagtatggtgtcaggaaaccaggagggtcccccacctcaacacttaacatcaccggctcccacccaaattccacaaataaagactattttctttgtccacagttgagttacagataaactggagatacagaagcaaacaaaacatacaaaaatccctgctcttgtggagcttatgtgttatctggggaggatataaacaaacaaataaaatatatagaaaaatattggtatgcctaaaataaaattagtcatgtttgattttataattgcttttcacttgcagtaacaggcacaatcaagaaatatggctaagtgcagaataaaaaaggctataaaacatggaccttcttaaatgaagttaattcagacgtaacaaaaattcatatattatgttccttgaaacttaaaaaaatgcgactttaaatttaacactctcaattctaatggggatatgagttaattttcaagtatattttagagctcaagtttagttaaccaataacttgctgaattatgcaaaaagctttggctttcaaaatcttattgcttttcccctgtcaagatttaataatttttagtaagggtttgaactttttaaccagatatgccaaatctcccaaatgcatgtataagatgttattatgttaatagcaatgtataatacaatatctgcacacattggaaaatatatatgtgtgttgtattagaaagtgatgagtgctatggagaacgggagtgtggggttatgtgagagggtgggatccaatttcaagtagggtagtcagggagggcctcactgaggaggtaacatttcaacagaaaacctaaagcaggtgagagagcaaaaaacttaaagtataataataataaataaataaattaaaaatgggtctttgggtaagagtgttccagccagaggaatgtgaggttcagaagccctgaagctgttttgtaaagcttacgtttacagcactgcaaggaaccccctgtggctggagtgaagtagacaaaagaaagctgggggagggaaacagtggttctcaaaaaacaaacaaacaaaaaacaaaactctcacctgtagattttgcacggtgtaaatacttaatgtccgatgtcaagctaccaacttaccgtccctgaaggcagagttggaaagaagtgaacacagatggttctcatgacacagtacgcacagactccaacacaatatgaggaggtcagagagagaacagggctaaatggcatagggcctagagggcaattctaagaacattgacatttactctgggtgatgtgggaagccactggaaggtttgaagtagagaagtaacatgatgtgactttcctttgtaaagtactattctgcagaacctccttcatgagcaaatagatgtgtgtgtgcatgtgtgcgtgtgtgtgcacatgtgtgcatgcgtgtgcatgtgtgtgtgcacgtgcacatggccacacatatgtctgtgtctatttcttcttcatggacggcaattcaccccagctgttactctgctttctttgggggcagatacaaaagaagaatacaaatcttttctttttttttttgagacagagtctcactctgttgcccaggctggagtgcaatggagtgatctcggctcactgcaacctctacctcccaggttcaagcaattctcctgcctcagcctcctgagtagctaggactacaggtgtctgccaccatgccaagctaatttttctatttttagtagagacgggttttgccatgttggccagactggtctcgaactcctgacctcaggtgatccacccgcctcggtttcccaaagtgctagaattacaggtgtgagccactgcacctggccacaaatcttttcctatgaagggccaaacctctttcttcatttaggcatttaacccagaacccactgaaataaaaatgacaatattaatcatgatttttagactatgtggctcactcaaccatagagcttctcatacaagtgaaatgcagcacatgtgtgaagccttaatatatcatcacaatctgttctattacttcatctcatcaattggtaattgaagtattcttaggatcctgctgtgttctctagctttraaactcacagcatcctattcaaactcatgtacatatgtgtgagaaatgggagggctgtcagcagtcattcaataattttgaagaggagcacttcgaaactacacttagaccaacccgcagttgtcattatgacggtcattgctgaaacccactttaggtcagcatgagttagctagcaccttgtggcctgctttggaatttaaagccatcatatgagacaatatctctgaacagaattttaaaattgaagctatacataagaatggtrtgggaagtagggaccttctgaattaaaagtttaattttgggtgggtccaaatggtacagatcaaagaaagagaaaatactagcacagtgaccgacttcctgagcacaaatacacaggcttgaagatggaaaaggtgaaataactgaacacaatgtcaagaaaaagaaagaggcagatgcttataaatgtaacagaagccatgaattattatataatgtatcctaaagaatttctctcctagctatgaaagaaacagcctttgcctcaggggtcttttgctaatatcttctagcagccccaagatatgtagacattgtcatatcaaagttcctcagagccttgaacaacatatgtgactgtgtattttcttgggaaagttgaaagctctaacaataaatgcatctgtaggcctggcgtggtggctcacacctgtaatcccagcactttgggaggcccaggcgggaggatcacctgaggtcaggagtttgagatcagcctggccaacatggtgaaaccccgtttctactaaaaatacaaaaattagccgggtgtggtggcacacacctgtaatcccaattacttgggaggctgaggcaggagaatcactggaacccgggaggtggatgttgcagtgagccaagatcatgccactgcactccagcctgggtgacagagtgagactccatctcaaaaaaaaaaaaaaaaaaaaaaaaagaccatctgttttagatactgagagcataggcttagaacccagaggggcctgggtttgaattctgaactcgctatttactagctgtgtgatttgaggcaagtttcttaacctctctgtgcctctgtttcttaatctaaaaaatgaaaataataataccttgcttatagggttgttgagggagataaataaaaataaacgtataaagtcttattaaaaggattttagtatgcagcaaatgtgaaaaaagtgttaaccatgatgatgatgatgatggtgatggtggtaatgatcaygatgatactggtggtggtggtggtgatgatggtgatggtgatgatggtaattatgatacttgcctatcacaatccttatttctcatacccactttctttgtgctcatgacttctcctttgaaatggcttttcaaaaagcatatgggtgtcaattcaaagtacccattaagtgaatttctttgaaaactttttcctcctgaaaataattgtttcaaataaacagatgcctctttgatattctttttatctcagtccagttggtaaagtttgaatgccctttaagtatctccagggtgtcttccatgtaaaattcacaagtagctttttggccaaacttgcctcttccttcatctgaatctcactccaggtttctcctgctgtgtcatctctcgactagtcttcagaatattcttctaatcagaatcttcccagcatccttcttattccctcaacaagtgaatctcctttaaatcaacacaatttctacactagggattaatgttcatagcaacagagctccttttgggaccaagaaaacctttctatttgtgcataaagtctcctttgatttattttaaagtggagttcttatttcaaagcattgactttctttggagaagtattctgactcatctaagtgaatcatcattttggcttgtatcactaaagaaagtgaacacttctcccaaacaatttatggagtgaaaatttggtacctgcaccagcattaatcagaggctgactttggtactggatgagttattcaatggagaagagaaaacatgttgtgcttggataaattcgaggatatgaatttctgtctcataaggctctctctgtagagaaagacaagctaattctggagacacagacttctgttacactcctggggcttcaataactttaccatggaccttgggcatgtaatttaatgcttcgtagaagcttcaattcctagtttgtaaagtgggattattaatttctaacctccaagtgttcccttgaaaattaaatatgataatatatgaaatgactttataaatatcaggtaccttcatcatttttaaaatcttatgtggtagagaacctctttagaaaggagttttttgacaatttgttttttagaaacaattttttctcaactgagataatcacatgtcctcagatttcaaaaggataatctaataatctgaggataataattgacatttaaggaagaacttgttttgagaaaaatcttttattttagaagtcaatttctccctccctctctatccccatccatccttgtatattgtactaaggcacgtacccaggttaccaagaacttttccatcttctcattactttatacatttcagaggcatcaaaagcattcggataatatttttgaaagacaaggggcgcgcctgtcatccggcacctgtgagcccagtgaggctgcagccgggataggagagtggtgcagttgttttggattagctgatctgctctctggggctggagttcagggtccagtcctggaggttcagagagggcttgctagaaaatgcaattaaacgagtaccttccatgacaaggaggtgctagggtaagcatttggggatggatttttgtgctggtaaatcccagcatgctcagtgatgctgtaaaggcgagaagctctgagctttcttctacaaagtcatctgctagttcatacggtagaattatcccagagggaggcaattgccctatgggaggctcaaggtgtgtgtagaaaggggctttgtggtatttattaaaatcataataacaacaacaactaatatccttctaagaactttgcatatatgatctcatttaatctttgccacagccctggaggtaggtattagtacctacattttacagatgatgaaagtgtcagagatgtaacttacctgaggtcatagaattagaatagtcatttcttgagccaatgctttcatcatctacatgaaagttggcaatactttttgtggaaagaaaagtgtagggatagtaaggatgatattagtcaatatctatgcatttactatgtgcaagtcactatgttgagatgtgtatgcattatatcactgatgacccataatactatcatggcattggttctattctatttacattcacattatatacagaggcccagtttgttgcatgcctgagttcatggttacctgctgggatgttgaacatcacaagctgtgctctcacctctggtatctaatatcatgtatctgtacgcaaaaacggactttttgcaagtggtttctggtgtttgaatgttataaaataagagtttgcgatgattatggtgaagctgagtgttcccttttttgtaaatgctattgtatttggttttatttctttgctgctgtacaatgaaatcaccataaaaatcactttatgtctgtagtgaaattttccaaaccataacatatctttatgaacctgaaattttacaattctttaataacagctatttaaacaagcacttttttaaatatttttgtctgtgaaaaaccacaatagatttattaattaaattagaatattagagctgggaaaccaccttctatgtaaattattggtgggagtttatgaaattcttgtagtaagactaaaagtagagtgatcttttctctaagaattgtacttaagctaatacagctgatagaacatgttaaaaatgcatggaagacaagatttcaatatttagacttgtttaagatttattggaatttggagatcaagtggactttaactccaaggtcctttcctaaataactcaaaatgtataataggagttgttgtttaggttggagacctttctaaaacaggaaattcacttttgttcatggcacaaacctttataaggacattaatggtgttttaaaattatgatctatgatgtaaaaataagctttgtcttgagggccttagttagatttgactacagactttcttctctcagtttggtctgttcacctatttgagtatgtttgtagcagctattgctctatgtctcatttcctttagcaaggttctgataagaataatagaaacaaytgggaccttgccaccaatctccgccccaaaagaaaacacctcaattctcaaatgaggtcccattaagcctgtgtcagaagtttctcatgaggtctgggccaccccagagccctgggattgagattttttagacattgctacaggctgctgtgcccatttcaatggatggctgttgcagttgggttcctcaagacacagacttggaggtggcgaatagcatgttggtggtttgttagtgggtactgtggggatcaacagccattgattgttggaaggcaagaaggcaggggtggccagaggaataagtgtgatgtagttgcagtggaagcctcagctgacctgacaagggattctgaagatgagatggcccttgggagctgtcctgagtggggcaagagggccaggcctttctatcctcatgtagatagtcattggaagtgaggtgcccagagaaggtgacatgaccttaggcaaagtggattttctgcagctgggataatctctgaagggggctgaaaatcaagggctgcctgccaatagcactccgagtaactgaagtaataagttcctaatttctgaagggcaatctgtgcaagctcatcacagcatctgccacattgaccacttgggaactccactcttctctttagtagttccacgccaaactttgtttattggggcttttgcggaccttgccacctggatgacccaaaggctctggacagagaagcgtaagagtgtctggtgagatcaatagagtcatgaatcctgctgactacactttccatgaaacaacttcctttatccaaagactagggttgccatcaaggggctgttccatacacagccacatagccaggcgaagctatgaagccagccatatgccatgttataattatgatgccgtaaatctctgttttcatggacctgcctctccaggactttggagcttctggagcctggaactatgtcttatttaatttccgyttcttcagtgtatttcttaatgcctgtttcatagcttgcgctttttccattttgtttaagtgttagtagcacttaaaagtatgatgcctagatttctcctgggtctgtccgagcctgtcagtagttttgattgtcttcatcagttacccaaatacagtgttagttctaatttggtagttatcctttgcgttgtcgctctgcctaatactcttaaagtcacaattatattgaagtagagtagaatggtgatgaggtgggcaatgttggtgcctgctgttgcctgtgtgcaaggatccatccaggacttggatcttctgctgcatgagaggaagcaggagctgggaaactagcttgatgttaagcacacctgaatttgaactctgcttatcagctgtgtaatcctggcgaagatgtttatcctaagactcattctcctcatctgtaatatgagttactacacaaatattcaaaaagcaacattattcataatagccaaaaagtggaaacaacccaactgtgtatcaacagatgaatggataaacaaaatatagtatatccatatataggagtattattcagccctaaaaaggaatgaaattctgacacatgctacaacatgggtgaacgttgaagatatgctaagkgaaataaatcagacacaaaaagacagatattgtatgactttgtttatatgagcattattactatgtgctctgaatctcttctggccactaaacatggtttcaaatgaacacactatcagatatttatttattcttcaaagatttattgaatgagtactcctccaggtactgggaatacaccagtgaaaaagacaagatttctaccttcgtggggattacattccagcgtggagaggcactcaatatatgtatatatatatgaacaaatgtaccacatagtctcagttgctatgaagaataataaaggttgacgggaaaagcatctctgaggaagtgacatttaaatagtgccttgtgaatatctggcagataaatattgttgaaagagggagtgacaggtgcaaaggccctcaggcagggataagtttatgtgtctaaagaacagcagggaggcaagtgaacaaagggagagagtggtagatggggaaagagaagtacaaaagccgtgttgcccatggaaaggactttggagtttgtgtaagcacgataaaaagtcatcagaaggattttctcaagggagtgacatgttctgaattatatcttacaagactcactctgactgctaggagattctgggggccaaaggtggaagcagagagagaattaacaaagttaatgcagtaataaaggttagaactgacagtggcttggagcagggaggtaacagtcaaggagatgagaagtgattggattctagatatattttgaatttagaactggtcgttttgatggctgattatgtatgggataggagaaaaaaagaagtcaagcaactgatttcgggcaatctgctttacagatgaatggattattattgtctagcagtaaaagtaatgggggatgaggcatacagaaaacaatagaatgagtcagtgaaattcaccagactccccaaagaatcgttttggtcagtagttaaaacagagagctatagcagagagagagagagagaaaagaagaagaagaagaagatgaagatgaagaagaagaaaagagaaaagaagaagaagagagagagagagaaaaggaggaggaggaggagaggaagaaataacttctgggaggaagaaatcctacactagaagacctcaggctcttgttggtagtcattggagatggccttggaagcttctgaagctcatctactaaagaaaaatgtgtcttttgctgggaggcatcaaacatagaaatgtggatctctttcctcagggtagcctagcaaccaccagcctggcacagcacatcagcaatgcctatgtcacctattacggtgaccactccaaatccaatgccactggaatccaaaaaggaacttgatttttaaaccccttcctcttatttctctctcagaggaagtcagtcactacagcaagtatggacattgaacatccctttccagggaaattaccttgtcyagtgatatggatgtctttacagtgcatcaggttggttaggaagcttttctccataacaatagagcaatgctggctgtagaaagttgaaagttgaagtctctttctactcaagtagtcaatgaatctactgtatatttctgtatattacaacattccagggctcctttgctggctgctaaccctcctcaccctgaactcagaagttacatcaaccattcatttacttacagtttcattgagatctaattcacataccatgcagttcaccactttaagtgtacaattcaatggatttttagtctattctgagtatgtaaatttttgttgatgtatagcatacatacagaaaacaggacaaaacataaatgaacagctgatgaattttcaaaatgaacatattcataaagccagctttcatcccgctacagcccccacaggcctcctcatgttcccttactggcattacacatccccaaggagagccagtatcctgacttctatcaccatagattaattttccctgttttaaaactttctaaaaatgaaatcttatagtatgtagtctttgtgtccagctgcttttctaaatttttgctgtgaaattcaatcatgctattaggagtatttgtaggatgatttattccccttgatgtatggtataccattaaggaactaaagttctttttttgtccatattgctactgatggatagctgtatggtgcacgattaaggaactgtaatttattttttgtccatattgctattgatggatatttaacattttcgtgtatgtgtttggagaacattttctggggcgtatacctagaagtgggtcatagtaatgtgtacatgcagctttagtaggtactgccagttttccaaagggraatatactatattacactaccattagcaagatatgagagttctggtggcttctttacttcaccaacacttggtgttgtcatcaagctttctcaacctcatcttcctggactctggccagaaggcccctgagtaagcttcaagtaccttctcctggtgttatattatctatatgtatgcactctgctggagagacttcatggtttgcaacaaattttcagaggagcccttgtcccagagaagggcaaaaactacggcttccagttttcagctttcttataatctctaatattgtggtgaaacagccttttatttgagccaagatttctcctggaaaagctgacactggtagatagtcgtctctatttttgaaaagcacattattcaaggccagaacactctggagttttgctagtgctggtgtgcatgttgagcaatatgttggggatatccaaaaattacatgtcctaaataaagggatgatatttattgagatactttagatgcctgtgctatttgatcaaataaacacttatgtgtttacaaattgaaagagtgagaaagttggcacagcaaaaccaattttagtcgtgggcattattctgctttggaaacaacctcttggcatgatggcatgtcctgatggttagaaatgtgatacagttggaaatggctgatacagctgaaaatggctgatacaagcagcaaagaattagggtcataaaaccctgcatccttctgaacacacccttattctttgaggtcaatgcatggactaattttggagacttctgtggaactcaaacctgtctccactgacagatgcatttacaccagattatgagggtaaataggagaaagacaggtctttgagggaggaattacaattttcagcttcttaaacactttacttttttcagaataaattaattttgattgtgtttagaaagcagtcaaacttctgactcagactctgaagaattcttcttattttagtactgtttatccagtcatctatctatccattcattcatccatccatttccatccttacatctgtccatccaaacatccattcatccatccaaccatcccatgcatgtcaaacaccaattgaatatataacattcttaagcattatgggatgatacagatgattggttcatttcctgatatagctggagagggaagacatacccacatggaatacctagagaatacagtactatcaagataacatgggcaagtacaagttaagatggtagggactcaaatggagtgaactttatgtgcagagcactgatgggtagtgagatgaagcttggaaggcttcttgaaggagtcagtcttgagctttgcaaagaaagttgtttatactttgcgctgatggatattagaaaataaaaagcctttgaggaaagatgcagtgatgatacactggtgaggagaggatagcctgctgacatcagggaaactgcttgaccagagcacagaggcagccaccttcttcttggaaggcatcttcttcctggcagccaccttcttttggcagctttgagaaccaggcacaggagcttgaatttgttccagtgaacaaggggacagtccagttggaaaagagataagacaaggctgcccccttctggtttcttgtgcagtccattcatgctcccatctgaagacactagggcctctgcctgcctggagcattctcccctccagatattcacatgatttcccccctcacctctttcatctcttcattcaactgtcaccttctccttgaggccttccttgacatcactttaattaaaattgcaaccaacctcaaaccaccaacacttcctctttgccttccctgctactttgtcttcacagcacttttcaccttctaatctactacatgattttcttatctattttgtgtagtgtctgttttgtcagtttttccttgtttatacctactagaatataagctcccaggagagcagacttttatctgttgttcctccagtgcccagaacagtgccaggcagacaggaggcactcaagaaatatttgttgaatgaatgaatgaatgaatgaactgatgtgacagccattagaggatggactggactaggccttgcatgggaacaggagggacagccacaaaaatgatctggctggtcattgagtccgtcattagcttctaactagtttgtaagaatctcaagtggttacttgattaaatgccttccagagactatctttggaccacatgagaagtggctcatagagcagagacctgacaagagcttgaactctattactcatgtgcaatttattgtatgtcacttatgctgcaataaagctgtttaagaagaaagaacgtgagctctacctacacaaatctgaggttaaattcagtttctgcagtatgcaaactgtgtgaccttggacaagttactcaaccctatgtgctatgaaactcaactgcaagatgaaactatcagcagcttactcactggatctttgtgaggattaaatgaattaacttaaacctattagcccagtgtctgacaaatagtgttcaatcattataattaaaaggaaaggctgggaagcttcatgatcgagagcattggtctttgaatgtctgaatttaaatcctgctgccacatactagttgtgagatcttaggcaaaatataattatttatctctatatgcctcagtttcttcatctgaaaaggacaacatgatgcctatctcatagggtcactgtgaagattgagtcaatacatatgaagtgcacagaacagggcctgaagagagtaagcactcaatactacttgttgtcattattgcttcttattattattcttgcagggsttcacctggtttctcagccactaygactcccatcttccccatttctttctatgtggacaatcccaggcctttcacatgctgtggtgctgctggaagattccaaaaatgcagcattgccattgtctgcacctcactccagtttcacccatgtgatggtgcaatcagaagacagtgtcagtgccaattctgtgtgcttagaaatgttagcaagcaattctataagaaaaaaatctaataattatctgatcaaaaaatggacaaaacattttaatagacatttctcaaaagaagacgtccaaatggcaaatagacatatgaaaagctgctcaacctcattgcaaatccaaactacagtaagatagcatctcaccccagttaaaatggcttatattcaaaagacaggtagtagcaaattatggcaaggatgtagaaaaaagggaatatttgcacattgttggtgggaatgtaaagtagtacaaccactatggagaaccatttggaagttcctcaaaaaactaaaaatggagctaccatatgatccagcaatcccactgctgggtatacaccccaaagaaaggaaatcagcatatcaaagaggtatctgcactcccatgtttgttgcagctctgttcacaatagccaacatttggaagcaacctaagtgtccaccaacagattaatggataaacgaaatgcggtacatatacactatgaagtactatacagccataaaaagaatgagatcctgtcatttgcaataacatggatggaactggagatcattttgttaagtgaagtacaccaggcacagaaagacaaacatcacatgttctcacttatttgtgggatctaaaaatcaaaacaattgaactcatggacatagagagtagaggatgcttaccagaggctgggaaggatagtagaatgttggtgggaggaagataaggatggttaatggataaaaaaaaatagttaaagaatgaataagacctactgtttgatggcacaacagggtgactctagtcaataataatttaattgtacatttaaaaacaactaagagggtataattggattgtttgtgacacaaaggataaatgcttgagggaatggataccccattctccatgatgtgattattacacattgcatgcctgtatcatcaaaacatctcatgtaccccataagtatatacacctactatgtacccagaaaactttttaaaaatttaaaaaattggaaatgtgaacaagggtcatgaaataggcacacgaacagaagaagacaaccatttgcccaactacaatttgcaggacttctcccctcctccctgatgggaaagactaattttattttctctcaaactgcaagtataggtcaaaaggaaagcttggtccttcaaattagtttatggcccaagaacaacccttgttcataactgtaaaaatgattgagttatagaggggaaggtggcttaccctggctcccaacagttagaagggcaaggttcccatgaacatcagaggagacattctgagagaaaaaggtcactcctcaggaactgaatctgagaaggaccaggccacctgtttctactgacagggactgggtccagcatcaagaatatgatggcaaaagggcttcccaaatgtgacagaaattggggtgttgggtctttacctccagaacagaggtaagaaggggagaaggacatgtagaacattgatgttgataatagtaatggatgtgtgacccagccagcctgtttctgagagccactcactcactcactaggtgacaattctaggaagtggagttcaaatgttttaactgaacatacaggctccaaaatgaggccgtgtgagaatcagtttgcttactgtttttcagaaagtctgctttaaaaagtcaaagacaaattttcatggcaggaattcttatgctaggaattcatccagaggagattcatcaaaagtgtggtcatggatttatgggtaagaagtggttgtataaatgatggtacactcataatgatcacaaaaccatcagcaatatccatttagtgcatgcatcctgtgtaccttgtataatctccattattcctacagtacatccaagataggtatcatgattccaattttaatgataagagaactgaagcttacaaatgttgagcaatttgcctgtattcatacagctattactttgaagagctggttcaagtcagttctgttggtctcttaaaaatcatcgtgtaatccttctaatgagattctagtccagagcctctaacttttttacattcttttttttattattattatactttaagttttagggtcttaaaaattattaagaattccaagtagcttttgtttttgtggctctatctctctatacttgccatcttataaattgaaattgagaatcttaacaatatttattgacatgatttaattacttaaaataacaataataaccctactataagtaaacataataaatttttattaaaaactgttttctaaaacaaacaaaatgagtgagtgacattaatttacattttgcggatcttgttcacatctggcttgaagaagacagtgaccatggcagctactgtaaatcaaattgaacttccaatagctttcttttttttttttttttttttttttttgagacagagtctcgctctgtcgcccaggctggagtgcagtggcgcgatctcggctcactgcaagctccgcctcctgggttcacgccattctcctgcctcagcctcccgagtagctgggactacaggcgcccgccaccacgcccggctaattttttgtatttttagtagagacggggtttcaccgtgttagccaggatggtctcgatctcctgacctcgtgatccgcccgcctcggcctcccaaagtgctgggattacaggcgtgagccaccgcgcccggcccttccaatagctttcactcatgagctatgagatcccaatctagtcatttaaacttatctgagctatatttcctttacctgtaaaaggaagaaataacttctgctggacctacttaacagggctgctgtaatgatcaaagaaaaatgctatatgtaattagaccttttaacttaggtacatcctaggacaaggacttattctaatgtcttctcatgatttcttcagaagaacaagcctccctggacaatgttcaaaacagtaataatcactggaatgtttccatcatggccaaatgtgaggcacaaaactcttgcctcagattgtgtaatcttataaacttagacatttcytccttaccccacttactccctgaagcttgaagatttgcaaatttttatgagtctaacaatagctctttcctgtgtttatcagaagttttccctaatcttacaaaagaagatttgtttttatgaatttacctaaactaagctgttgcctgcttagacataagacaccaaggaggttaaagggtaaagtgttttattctgcttcatgatagtttcctttacatattgtttggttcccatttactcacacatttactctgtttttggttttmgagtcttgagcaaacctcctttctaggagcattcctgagttaggagggctttaacagctggtctttgacaccattgcattgctgggattattgctatttgggcaaccctcaatatttttgggactccattgaatgagaatccgtataattcagctgaggtgacatttcaactgggttattcagatgggatctgtcaaatagagtcttggarggggccccttcccaccctcatcacagcatttccatatgacatgtactgtacaaataatttatctctggggaaaggaaggagggatggtggagaggtgcccatcttatgtgttctggtgggaggttaatatagaaggatatggctgggtgcggtgactcacacctgtaattccagcactttgggaggattacttgaggtcgggagttcaagaccagcttggccaacatggtgaaaccacgtctctactaaaaatacaaaaattagccaggcgtggtggtgtgcacctgtaatcccagctactcaggaggctgaggcaggagaatcgcttgaaccaaggaggcagacgttgcagtgagccaagattgtgcaactgcactccagcctgggcagcagagcaagactctgtgtgtgtgtgtgtgtgtgtgtgtgtgtctatgtgtagatatagatatagatatagatatagatatagatatagatatagatatagatatagatgtgcaggatgcttttgttgggcagggctccacatgcaggtcatggttagttagttaactctgccttgttccaaaagctgtccttcactttttcccaggccaagtcccatgtgtcagactgagctctcactttctgaatcaattgtctttatgtttccaggagctgccatggttgctggtgcaggccctggcagtgacagacagacattaattaaccacatctgctgggctcacattcttcttcaagtcatctggtggtgatttctggctgaaccaatgcatttgtgaaaacaagcaaacaaaaaaacctaaataatttaattgtttggctgaatactgatttcttcctatctttttattaatggattttcaagcaaaaatatgctgttcttcccacttatggtgtggctatttagctgcttatggttttatctctttgtgattccctttactcgtgggcacaatgccacactgatagtgcagaaggatgactttgtacaccagtcatagatgcacattgctctcaatgtgcaycktgatttggttctttgctatttaagttccatcccacacccactttgtacaagtgcattgtgttgagggggcagggttgggcactactctgctggtagggatctgcagagaccatagtgggtctgggttcaaggggagacttaaaacaagtaggatagatagttataacataaggaaccaaagtacaaaagatcagtttataaatcggggcattgtgtrtcaaataaatgacaagttcaaggtcacacagctgagattatatcaagcatatattgtgaacctactgtgtgccagcagtctctgccagcacgtcctaggcatacaaagattataattataatagtagcagctgcggtaataatattgattgagaacttacaacatgccagccactgttcaaagtgatttacatgtatcaacacacttcatctttctaacatgcctccaagacagttactatgatcacatttcactactgagttaactgaagcacagagaagttaagcaacttaacacagctagtgagtggcagaccatgactcaacccagggagactggctccagagcccatgctcttgcagcgtagggcccagtgaatgagatagaatagtaaatgcatgaaactggtgcagtggagttagcggcagatgaaagagaaacagagagctctgggacactgagaagaccacctaacccaactgtttatgctaatctgggcatacttcctggaagaagacgatggagtcaatagatgttgaattacaaagactgatatctggggcctggacgattaagtaactgtcttactctgtgtcagtcatcttaggagaggcagagctagaatggggattgacttcttcttcgtggagaatggtccctggatcaatccacaggtttctgctgagcaagttttatgtattgaactctgatgaaggagggataagtggaggttttcaggtcagcatgcaagttgtatggaacatgaattatttctcaataaagctgattataaaacaaaatcagcatgcactcagcagccagaacttgcttctaaataccactctcttgataaaaggaaagccttcttggacaaatgacagatcctagggcttgggcagagaaaatagaagatgagtctggagaatcttctagtgccaaaaatgaaaaaaatgctcaacagacaaaaggatggggacatgtcaaagggactcaggagccgacctgaaggagtgctcagaagtagaataatttgagcaacaaataaatcatattgtattagattataacacaaggtataaaacacatatatatgtccactgttataaataaatgaatgaataagcaagtaaaaggggaaaagaggaaaatcttccttagaaaagaattcaaaaaatttgtggggattctccatctccagaaagtggaagttagctcccaccatcccctcttgaggatgatctgaacttaatgactctcttccaaagaacagagcatggaagaggggtgagtagcaactctacagtggagagacctgacagacaccaccctaagcaaggaatcaaggttaacatcatccgtgataagtcatattgatatcaagtgccctctgaggtgacatgatgacaagagcacttggtctttgtggtagtcttccccaaaattcatagtcctaatctaaaaatgaaaaaagtaacttcagacagatccaaattaagggatattctaccagataactgacccgtattcttcaaactttgaaggttatgaaaaataagggactactgagaaactatcacacaccataggagactaagaagacaggacaactaaatgaaatgtggtatcctggatgggatcctgcaacagaaaaaggatggttagtggataaatgggtgaaatccaaataaaatctgaagtttagtacatagtgatctaccagtgtcgatatcctggtcttggcaatgtaccatgtaatgtaagatgctaacattagagaaaactaggtgaaaggtatatgggaactttctgtactatctttgcaacttttttataaaacaaatattactttgtaaaacaaagttactttgtaaaaatttgtaaaacaaattactttgtaaaaatgtgtaaaacaaatagaaactatatttaaagcataaagcataaaagaaaagtcagcaagtgtcagtattctgatcaactagaactttcatgcattgctgttggtaatgtaaagcagtgcaacaactttggaacactattaaacttaaaaagttaaacatacacccactgtgtgactcagccattccactactaggcattgacccaagagaagaaaaaaacatatgtacacaaaaagacctgtacaagaatgtttatagcagttttgttcacagcagatcaaaactagaaatagttatcaacaggtgaaacaaaccgtgatgcatccatacaatggacactacttagcaataaaaaggaacaaacggaaacttggacaaacctcagaaatgtcatgctgagcaaaagacgccagatacaaaggtgtacatcttgtatgagtccattaaaaaatgtgaaaacaggcaaaaacaatctataagtgacagaaaactgaacagtggttgcccagggccagaaaggggacagggattgtctaggaaggggaaagagggaactttctggaatgatgggaatgttttatatcttgattggagtggtagttacataggtgtacacatgtgtcataactccccaaattgcatgttaaattatttaatgtgggtacatttgtgaggagatattggtcaaaggatacaaaatttagttagataggagaaataagttcaagggatgtattgtacaacatggtaactatagttaaaaacaatgtattgtagtcttgaaaattgctaagagaatagattttatgtgttctcacctcccaaaatgataggtatgtaaggtaatgcgtatgttaattagctcaatttagccattccacagggtatacatatttcaaaatattatgttgtgtattgtaaatatatacagttttaatggcaggttaaaatttttaaaattacttctaactataaaaaacaaaatacggaaactaaactaaaataaaatgagtacattgtagctaaagtacacctcaatagtgttaagaagggtgacagttaattttatacgtcaacttgtgtagatatttggacaaacattattctaatgtttctgtcaagctatttttaagataaggttaacatttaaatcagtagactttgagcaaagcagattaacttccataatgtgaatggactttatccaatcagttgaagtccttaagagaaaaagattgatgactctcaggaaaagagggaattctgccagcagactgcctttgaagtcaaactgcaactcttccttgggtccgtgacctaccctacagattttggacctgccgtccctctcaatcaacatgagctaattccttaaaataaatctgaatccttctctctttctctgtttctctctctgtctctgtctctctctccatctatatctatatcaatatcatctatctatatctatgtatctatgtatctatatatctatgtatgtatctctctctctctctctctctctttctcctgttggttctgtttctctaaggaatcctggctgagaagaaacataaagctgtatctcaacccttccctgagaatcttatggccttgttggagagagaagaccaacatggccacagaattaatacaagaacaaatacgaaatctcttattccacaattctagtttctctgcctgtacaacatcaacagaaggtgcatctttattgaatgactcagagttttggggaagtttctgttgactgagaaccttaagttattctgattccgttgaaagatgctatcagaatgcacgacctggcttctgactcgggttttcagattgacccaaagtgggtttttttgcgtgtctcttaagtgccatcaacaggttaattctcccagatattatttattttaaatccttggaacaatgtgttccctttatttctgtgtcgaggtatccctgtgggaagaaccaggtggtataacatgtctagaagagaagtttgaagttgtctaatctttctgctttgactttgctgatctctgggaactcctgtgtttacctagcacatctgagtccttgggaaagctttctgggccctgttttgtggttcttctaacagatggttgcattcttgtgattgatttttgatccccttctaagttgtataatgcttatagttataattttctgactctccaggcacacagaggctcctgactctgagatatttgcaagtaccattgacaaataagatttccttaggttaactccacttatgtacttgtatttacattttgtatggtaaaggctccagtttcagagagaaacctctttaccgtgcttggtgtggcagtgaacttaattaacagagaattttgctggcaatctctatgctaaaaagttaagtggggttctgaggacacaaggagctaaaaagttgagtgtatatcacatattgataactcacataattttgcttgcagacatttaccaatttggcagattacctacttttacattgtagtaaatatttccktttaaaaatatcttgtatctcacagggcaaatcataccccttcagggggccattcccacctgtatggaatccaattacctacttagatcataacaacttttggaggacaatggatgacatggggcgagaggtaaagcttctttgactatatttgtattcttttttgtaataagtttcatccttcaaagaaagaaagtaaaatatatctccaacacctagcacattgtgaacacatggtaactaaagatttgtgaaatgaatgaatgaacttgtttctaacctctgcaataataagatgtcaaacagattgatatttgtatactactgatgagtgggcaggagattgggtgtcactcagccttcttggaatgatgtttcaaattttggaaatcttcagtacatagcaaaattagacttctgggtctttgattcaccaccatgcccaaacaagtcataagtaatcacacataaagcattttttttcttttactttaagctccgggatacatgtgcagaacgtgcaggttcattacataggtatacatgtgccatggtggttttctgcatctatcaacccatcgtctaggttttaagccccacatgcattaggtatttgtcctaatgctctccctccccttgccccccaacccccgacaggccctagtgtgtgatgttcccctccctgtgtccatatgttttcattgttcaactcccacttatgagtgagaacatgtggtgtttggttttctgtttctgaacacacataaagcttaactgaaaactccatagacatgatttgctgcagctctgtgatccttgttaaatagttaaatttatgagtgttctctagaagttagtaacttaggaatccatatctagaaatagcccagttacaacatgcctctatttattgwgcaggaagttttatcacaaattaaatatggcttgggtggtacagatttataatargaaagctrcatagacagcattgattatgcagtaaaagcaatattggatgaatttggaaaacttaacatttttcctctttaaggtagagtttttaatactatttgaatagttatttaaagtggaaaattacaaaaatgaataaaataaaagagaaaattacatttgtctttctccttcgaatcctcatctgaatgtagattccgagtgatgccccatggaaggctccccttgcagaagagtgggacaacatgacaatgaaggagctactggacaagctctgctggactgagtaagtcttgccattaggcacaggcatttactgtgaccaccttttaggtttatttagcaataccgttcaacaagtawgggacaagtagctgctttgtgtctaaaaccacaccaccagccagtggcatgctgaaaaccattgraattggctcctaccctgaagatatctgtacatacaacttacttctttggagtagttttgtatcacaaaggtggtattaccctgtgaagtcctcagaacagaccagaaggtaccactttctttatctraaacagcttaaagaccatcagcttaaagctctcatttattaagttgttgatataggacaatttttgtattcttcactggtggtcaaatgtggagatggttagcatgtgcatttgccacaccttgtgtgaagtagtgcaattcttcaaggacttaaagaggaacctctaaagcctttgtgtagataggtcacaactacaggggaaacatgtgtgactggactggctgttcccctttagtgaaaaaacaagtacctatgagttaagcattaaattcttgttggcagaactgggaactgtagagaaattgtgaaggcttgtatagacagaccacatggagaggccacactgctcttggacagcagggaaaatggaaaggattatgagggttcccattcaagcacgtggtaaatttgtggtaaacaaaataagagaaatggaagccaaattcaagragactgccctgtcttgctaaagagcattagttgagaatatgtttggctcgggggttaatgtcttcatttttaggcattcattcactgccaactaaaagtaaaaacaagcttttagaatatctgaatcttaaaaatggaaataatcaaaagacataaaattcatatatttttcatataaaaattcagcttctaataatttagctttaagaaagtgaggcaaaagaagagagaggcaccagcatggcacatgtatacatatgtaactaacctgcacaatgtgcacatgtaccctaaaacttaaagtataataataaaaaaaaaaaagaagagagaggcatacagggagagaaggagagagggagagggagaaacagtgaaagaggcagattcaaagcattatttttaaaagggaggatctgaaagcccaatagtagaagatcggcagaatcaagtatggaacatctaaaaaattgagtacttgagggttttaaaaaatcgtgttgtagaggaatatttaatgactggaaaaaatagtaatattaaacacatagaaaagcaggctrttgtggtatggtatatgatctcatttctaaaaacaactatttatatatgcactgcaaaagcaatggacatccattgaagtatttttaacgtttaatattaccatgcaaacatttatttttaaaatgtttaaaaactttacatcattaaaaattattctttaaacatcatatttcatggtaccagaatattccatgggaaatgaatacgtaatgtatttgtccattatcatcctgttgaacacattggttactttctgttttttgttattatcattatacaatactctataataaacatctttatgcctctcctgtgttttcaacctttgaaagcaaccagttctggaatagtaaaatccttttatgtcatgaaatcaatgcgtgttattaattatattcttttaaacatttacctaatgctatctaacacctctatgagaatgtagtttgcaatataatttattttaatagtaataaaattgtagtatttagttttaaattatatactttagattttcaaaatataataagtatgtaattatctgcatttgttttataactcctgttatgaaaagcttttaataaattcagttaggtcttctctcctcagagaacttttaagtttcttggtgataaaatcaatcatatgtttttgggatcacagggacccgacattttctatcgtagcccttggcctagtcctccacttagtgaatattctaagttgtcatttgacaaaataaagcattctgagatactaggagtataagaacacaagacaattttccaactcttcccaagcaagatacacacagtattatttcctggatttaaatgaagtaatccccagaatatccaacctattgttgttcaaactaaagcacaatcatacattccaagactaatgttgattattctttcagttattatcatttacaaagtgcacttcacaaacatgaattgtattttcaatgtgatcacagctatgtaaaaacattttttaaaagacctatacttagaaaaaaatgcatcaaaatgagactagtaattatcttctggaggggcagaaatatggaagacactcgttctctcatccttttatcttataaattttccaaattttatataatgtgtatgtatttttcatgtagaaaaatattataacatttatcttttaaaaagtcaacagggcaaaaaatacggaaatattgcaytaacttccttgaccttccatccttcaaatattgttcttatttcttttcttactgaagctcctagagtaaattcaaataaaggattaggaatggactggcccttcagaattacttttagatctccctttatttcaaaccagaattatttctttcccaccaaattgccaacaataacaactagaattccagcaatatttttgttaaatattggctctccagctgggccaatgttaggtttcagttatttattactccctttactgtatgcccctcaatccacctaaaaaataaggaagaaaagaaataggattttaggaagcaacaaataaaatactacttttattttaaattgacgtctggatatgtgttttagttagatattacaaattgcctctgcaaggaaggcatgagctagcaatttccatcccttcaattatcctgagaaatcttacaaaactaactgtaagtcgctttaatgtatatatgacaccatttcacaggctgtaatgatggggactgtmatagacgggctgtcaggttgttacrgctgcaaataatgtcaataattggtatgtgtgttaggcatgattctacaaacttctagggtcaagatacagtaaagtagagagatgccccttggtgagtagctgcacttccaaggctgtcagctgactaattagaaaacattttgaggtatcaaaagcacgagttttgcgtcaagtacgatctgacttgaagttgtgtcgttatatattcctaaactgtccgagactccgttttctagcatgtgaactgtggaaaaataatagatatttgatacggttgttgcaacaatttaacaagataatgattttaaagacaatggagtgtggaaagagttcaataaatggaagacaatatcatttatcccaaccattgtcagcattaccaggtggaaaatgctgcctcagatataacaagattaacaatatgcaaacttcatgtcaaagtcaaaaggggaattggaccttattaaagaaatcccagagtgcacactactactgatgaattttatgstgtgctagatataatggagtcctcgaaattgcatgagatagtttgctttctggtgtgcttcctgataggtgataayctctcaccatttacctgccaatgtcaagcaaaagcttacccatttatgctctattaattgtttgtcccctcatccattatttgagcttgtcttctgttaggcagtaaaataactgaatagataactgtgactaattttgtgtttggtacagcacctagcatatcctttgcatgttatggatgtttaaaaaattttgtttaactgatatttctcatcaatcattcattcgttcaatcatgcaacaagtaattattgagtgcttacaatgttccaagcactattttgttaaaggggacactatggtgagtgagaaacagaagatccttgttctcataggttgatattctagtggggggagacagcaattaaaaagaattaaccaataatcaagacaatttcagacagtgaaaagagttataaagatactatacagtagcaaaatgatagagaatgtcaggatgctgggaatatggaagccagtggtcgttttcatagacaaatgtgaatatgtctttctaaggaaacattagagtaaaaagaagagggtacaagatgagacagaaaaggtaggcatgggctggatcacatagggctctggaagccatggtgtaagatctgaatcttattctggttttaataggataccactggagactttttaagcaagaaaatgacatgatttgatttatacttcagagagagcatcatggtagggagggagggaaaagcctctggctttgagtgtggtgaacagataccaggtgaggatgaatggaggcagagaggccagtctgaaggaagtaattgcagtactcctggaaagagatggattctaaatttgtggtgaaggtggagtgatgtggtgagagataatgggacttcccaatgaattggatgggggaagattgatggaaagagagaaataatgtttgatttctagagtgttggtttttaccactgagtaaatgatggtgctttttactgagatggggatcactggaagagcagcaggaatgtaaggagaaatcatgaaagcacagaatctggaatagaagcygattctgagtaaggtgttttgtttacagggaaaataatctgatatttcaaaaacctccgatgtcacgttttgtaatattagattctagtgacaattttttgaccttaccacattgttttaaacttaaccaagaaaatgtgttacttaaataatttttagagaattaagaagctgctctcctgcgtttgccaagtttgctcttgtttcttcctgtgcagatctgcaaagcagcttgccactctctttgtgaacctgtgtgtcactgcagagacccatgaggtctctgctctctggttcctgtggtatgtgaagcagtgtggaggcacaacaagaatcatctcgacaacraatggaggacaggtacccatccattcttccacagtcccaatggaaaaacactgctactgaaatgaaagatcatcatccttcaatcatgaactgctgaagtgggaagcaggcttgtggcttttagagcattaccatggcagctcaaagtgtttcttgtaaggcagtctgttgtcaggtacccactgtgagaacccagtgtccaatgtaattttaaagctaggcttgtctctctttatgcactgtggccattttccatacgctcaattattatttggtaagtttgtaggagaccatctgaattaagcttagcttgagcacttcttggaaagcttataaaggaaattcagtaatgcattttcaatttaaaacacacactattcatggaattcatttatctattcattcattcaatgcccatttcttgagccccggcactgtataaggcactgtgctagacacagtaggaacatattggagttcttaaataatctgcttggttgtcatgttccattcttctctctccccctcctcctcttctttctttctcttctcctcctccccctcctctttctcctcctccttttctctttctccctctccttctccttctctgaccttaactgaaaattgaggaggaggcagccaggtcaactgtgtgcatagccaggtagaacatttggaagttttagcaaggctgagggcaggtgggtacagtgaggtgaaatgagttcggtggctacagaagcagcaggcatctgacccaggataagatgggcagcctgcaacagggagtaggctggcctgggggaaggggacatggtgggaggcagggaagttctgcgcttgagccacaaagcaaggggaagcaggcttaggtctgctcaggcaagctagggaagagctttaggtacagcttcaccagttccagctctaagcaaaagactgcagataggacagagagcagggatggtgaccagaaaggtgggatacaggggtcattctgaagatgtccagctaaggttggagtctgggaatctacaagagcatagcttgtaaagtaacttagaaatcctgtaactttgtccaaagacagcaattcctasttagaaaaccatggtgaaagccactattcactgcagcaaaatgaaatgttagacatctcagagtagacatatgtgaggacaactaagaatttagcaatttatgcccattcctgcgtttctctttcacctcyttttctctttccaggagaggaaatttgtgggcggatctggtcaagtgagtgagcggataatggacctccttggagaccgagtgaagctggagaggcctgtgatctacattgaccagacaagagaaaatgtccttgtggagaccctaaaccatgagatgtatgaggtaactgtgatattgtgaaatatatatttgatcttcatcccagtttcctggcatacaactttaaaaattcttagaatctccagagtgatgtcctttgatgccaatgattgatggctggcagcccctaggtagcttcaggatggggctggtcacaggaaagaccatggaaagactagagggttgggactttcagccccacccccagcctccagggaggggatggggcaaggggctgaaggttgaattgatcaccagaggccaatgatttaatcaattgtgcctacataaggaagcctccataaaaacccaaaacgaccgagttctgggagcttctggatatctgcacaactggaggttccttgagaatggcatgcctggggagggcatgaaagctccatgccctttctcacaactcttgcccaatgcacctcttcctctgtaccctttgtaatatcctttataataaaacagtaaacatgtttccctgagttctgtgagccactgtagcaaatcaatcaaacttgaaggggttgtaggaacatcaactggaagcagattggtcagaaattctggaagctggacttgtgactgacatctgaaggtgggggacagtcttggagactgagccctcaacctgtaggatcagaagttatctccaggtagatactgtcagaattgagttgaattcagaggacacatggctgatgtctgctatagaattgcttgcttgcttaatatgtggggaaaaaccactccacatttggtcacagaagtcttctgtggtgatcgttgttgagtgagagaatggaaaaaagcacttttttccattctctcactcaacatttgctttgaactcaactttgctttgaaatttttccactcagagttaccaagacacttaaacaagtgggaagaggccacagtctcatagataatcaaagccgaagtcaacaatgtcacacactttatagacagtctttttgccaatagtgaaaaagctatctctaactgaaaaaaaggaaaagagaaccagaatatttggggtgggggaggatttataaaaacttataaaggtattatcaaccctctgtattttgcttttatgtaattagaaaaacacagaaaatatttatttgataaatatcaagcacctcctatgtgcctgacatgattctaggagttaagaacacagtcgtgaacaaaacagatacaattctctgcccacatacaattctccttctagtgaaggagaaagacagtaatgaaacatatagttataatataaagtatgtcagatagtgataattagtgcggaaaaaatcaagcaggaaggtggggagagggcataccagaaagtgagatgggagaattggttatgcaagtttaaataaggtsatcagggaaggcctcactgagaaggtgatatctgatagagaattggaggagacgagggattgagccatgtggttccctgagagaagaagatggaacagccagtgccaaggcactgaggtgggagcaagcctggtgtgaccaaggaacagcaaggtgatcaaaatggcagggccaggcttggtggctaacgcctgtaatcccagcactttgggaggccaaggtgggcagatcacaaggtcgaaagatcgagacaaccctggccaacatggtgaaaccctgtctttactaaaaatacaaaaattagctgggtgtggtggtgcacacctgtagtcccagctactctggaggctgaggcaggagaatcgcttgaacctgggcacgtggaggttgcagtgagccaagatcgcaccactgcactccagcctggcgacagagtgagactgggtctcaaaaagaaaacaaaaatagcagaagtaagagtgtcagggcaaatgtaacaggaggtgagatcagtgatgtaacgggcccatttcatgtgtggccttggcgatgatggtgagaaatctggctttgactttaagtgcaatgggaagtcattggaggttttgaactaaggaacaataagggctactttaggtttcgacaaaatccttgtcacttctttaagagactgaaaagaatataacgrtagaatgagagagaatcattgggaaaaaaacaaaagcaacacggcaacaatgtttaaccatgttgcttttctttcaggctaaatatgtgattagtgctattcctcctactctgggcatgaagattcacttcaatccccctctgccaatgatgagaaaccagatgatcactcgtgtgcctttgggttcagtcatcaagtgtatagtttattataaagagcctttctggaggaaaaagggtgagtactttccttatataaaaacctttagaagaaggtccaagaaacttgttgctaaggcatgcattttttaaaaatgtcaacttttattttagattcaggggtacatgtgcagatttgttacatggatatgttgcatgatgctgaggtttgtggtatgaatgattctgtcacccaggtagtgaacatagtaccaataggtaggttttcaactcttgctgtactccttacctccccctttagtagtcctcagtgtctattattttcatctttatakccatatgtaccccatgcttagctctcacttataagtgggaacatgtggtatttggttttctgtttctacattgattcacttaggataatagtctccagctgcatccatgttgctgcaaagaacatgatttaattctctttttatggctgcatagtattccatgctatatacataccacattttctttatctaatccacctttgatgggcacctacgttgattccatatgtttgctattgtgagtagtgctgcgatgaacatrtgagtgcatgtgcctttttggtagaacaatttatattcctttgggtatatacctaataatgagattgctgggtcgcatgatagttccatttttacttctttgagaaaactccaaatttcttttcacagtggcttaactaatttacattcccaccaacagtgcataagtgctcctttttctccaacatctcttattttttgactttttaataatagccattctgactggtgtgagatggtatctcatcgtggttttgattggcatttatctgatgattagtaatgcagagctctttttcgtatgctttttggccacttgtatgtcttcttttgagaagtgtctgttcatgcattttgcctactttttaatggggttatttggtttttgcttgttgaattaagttccttgtagattctggatattagacctttgtcagaggcatagtttgcaaatattttctcccattttgtaggctgtgtgtttactttcttgatagtttcttttgctgtgtagaagctctttagtttaattaggtcctacctggcaatttttgtttttgtttcaattgcttttgaaaacttaaagacatgtgtttgcatgtaactgttttgttagwatgctggacataaaatgttaatccaggttctaagcacagttctttcaaataaaatatattggcacaaactcatggaattaactttctttagaatataaccaactctttgtaaatcaataaaaggtttatttaatcctcccccaaaatcttgtgaaaagagatgagtaatcttttctaattcagtgttttaaagtatgggtttataaagccaatcaccaaggttgagattctgaaaatgtcttggctctctctcactagtgtygattctaccatattaaattaaattcatttattcacttgcacatattcaacaagygtactactcaattgggcagaacattgcagggttgctcactaaagtgctggattctacaatgatgggaatgttctagagctgctttaatacactagtcactagccacatgtgggtactgaacacttgaaatatagctaatgagacttgggaatcagattttaaaattctatttaattaatttttttttttttgagacggagtctcgctctgtcgcccaggctggagtgcagtggtgcgatcttggctcactgcaacccctgccttccgggtttaagcgattcacctgcctcagtctcccaagtagctgggattacaggtgcgtgccaccttgcctggctaattttttgcatttttagtagagatggggtttcaccgtgttagccaggatggtctcgatctcctgacctcatgatccacctgcctcggcctcccaaagtgctgggattacaggcataagaattctatttaattttaattgctttaaatataaatgcaagtagccacatgcagacagcacaacgctagaatcttgtcatatttgctcttatagaacccacttttcttccaagtggaggccatgtaagaagagtcagtatctagaackgagggtgaagggcgggatgtactccaaggaggagcaagactgcagaaagaaggttggaggcaaatggggaaagtgccacaattttggcttagggtgcttcttcctgtgtaactactctttttccgctgcatcacaggctcctcattctccacattgcagataatcacgtttaggactgctattggattggtgcatcagttgggcaagtaatctactgtttgcaaagtcagtgcagtgacccaccacaaagagccctgtcattttagtctttgaatctaatggctgtaacacactggtgctgaatctcttcctcttgtgacccaggccacccattttaaatgactggctggtggcaagtagataaggtttaggaccaggaatacagtcttctctgaatgagcatgggtgcctttatttatggagagaaactgtaactttccattcatgcctgcaaatctttatcttaggcctgctatgtgccaggcaagttgttaggcactagtatcagaaagaaaacccaagacctccacccctcagaatctgacttggtccttgttggtaatgagccttgcataagacttttaaaaaatgattgtgggcaaggcatagtggtgcacacctgtggtaccagcttctcgggaggctgagactggaggattgcttgagcccaggaggtggaggatacagtgaatgagctataattgaacttcagcctgggcaacagagtgagactccatctctatctcaaaaaaaaaaaagtttgttgacatgagatagcctcaccaaagcatttgagatttcttttgagttacaactttaatgtatttcttcaactgggcgcctattgtatgccagacacagtgctaggcactgagaattcaaaggcacttttccttgcccagaaaatccaggctcaggaggaagacagtcatgcaaactggtaattgcacaatgtattgagttctaggctattatagaaacaccaagtagggctccagactcacatccaatatgattcctgttacattgataagtgtattcaatgacacttatttgaaagtttctgtaatgaaatctgaagaagttcactcttataacaagatctttgctttgcactagactatcaacatcactgccaaagacactgtaattaactagtaacatacaagctcagtcaatatgaggtaacaagatagaagggtatgaattaagcagccccaacaatccagcacagtgattagcacatatcaggcacacagtcagtaatcaccagagttttggttttatgttgctttgttttgtttcacaagttcagtgtggcttgggttattaaagagaaggtaacattttgtattttgatacagacagtggtarccaactcttgattgcttctcccctccacaccccccacccaatcccagcatcatgctaaacactgcttttattttatttttaattgtagatatttaaggtgtacctcataatgttttgatacacatgtacatagtgaaatgatcttgtggtcaagcaaattaacatacccatttcctcacatggtcatctcctgtgtgtggtaagagcacctgattgcttctagattgattatcccaggaaatgcttcccagtctcttagtgtgtaacatctttgtgaatttgcaaggacaggcttcctatattttgctggccttccactgaggcattctaagtctagccgccctcaccgtcagcaccccatcctacacgggatgcatcagcccttcattctagcccacttctgtggaaaggataggctgttagcaatgcattgaattcttgtggtctccttgcttttgttcatctatgaaccatttctactttcccttgaatatttacatctaatttatctcaatttatgttttcratggcagaagctgtacttgtttttctaaattacagaaataaatataatgaccataaaactttcaaaaactgaaagtatgtgaaaaatgtttctcttctattgttcctccccctagagggccactgttaaaaatttagattrtttatccttaaagatttactgtatgcataggtaatacaagttgaacatccctaatctgaaaactcaaaattcaaaatgctccaaattctgaaacttttgaagcatcgacatgatgtctgaagtagaaaattccatatctgacctcatgtgatgggtcacagtcaaaactttgtttcatgtacaaaattattaaaatatgtataaaattaccttcagactatgtgtataagatgtatttgaaacataaatgaatctggtatttgggcttgggtctcacactcaaatctcattatgtatatgcaagaattccaaaatctgaaaagagccaaaatttgaaacacttcttgtctcaaacatttcatataagggataaggatactcaacctgtactttaaatatatgtgtgtgagcatccctatatatatgtagagagaactatatatactggaaatacatgttaaataatataataaatattttatacaaatataactttaattttaaataaatatgttaatatatttttccaaaaacatgttttttaaaaaacatacatcatacatatcacactgaaatttgctttttcctgttaacaatatgccatggacatctctccatagcagtacatttaaatctaacccctttcgacaactgaataaacagtatctcattgtgtgccttatcagaatttacccaagacatcagctgttgatagtcatttttcttgtttccatgtttttgctattatacaccatgctgcaataaacagcatcctccatatagctctacatatttgtataggagcatttctttttgataaatgctgtaggatggaattatcaagtcaattgatttgggtagacctgtgaaatttttgttagggtctrtcctctcacatccttgtcagtwgatataagttccatatctgtcttctccaaatctcatgttgaaatttgatccccagtgttggaggtggggcctaaaagcaaatgtttgggtcatgtggacagatccctcctgaacatcttggtgccgtcctcctccctgaggtaataaatgagttcttgctctgtcagttcccatgagagctggttgttaaaaagagcctggcacttccctcccctctctcttgcctcccgtctcaccaagtgatctgcacacgccagctcctcttcaccttcagccatgagtggaagcttcctgaggccctcatgagaagcagatgctggcaccatgtttcttgtacagcctgtagaaccatgagccaagtaaatatcttctttccttcatatattacccagcctcaggtatccctttatagcaacaccagcagtctaagacaccagctaataatatttaaaatttttttgtcaatcaggtaggagaaattrcctcatttatctataatttgtaatttttatcattaacaaagtatmattttgtaaattacctttgctcattaaagtttttttctgtttatattgcaaatattttctcccagtgaatcagtttttaacgatttgttgtatgatggtttccccctactaaattctcagatacacattgattctttctgttccactgacctttttcactgcgttctaaacatttttgcagctctacttattaaaaaatgtacacataaactatcactataggtattcctaaattgtacacaagtacctctgaaaaattatatcgttgtaactataaaacatttgaaaagtagactttttaaaaagcttaaattgaaaaaccagaatctctagtattttcttccactatctagatgtgcaatctaggtgtacacccccactttggaaagcacaagtttatattatctaatcctatggcagcattgtactgttttaatatctgtagctttatgatatgtttataatatgttatatattatgtcaggtaggacattcccttattattatttttcctttaattttgtccttggtaaacttcttcagttattcatccagatgaatgttattatcatctcatcaaagctcctgcctccacacccctacattacaaaagcttctattgamttattttattctgaacatgcctctttgttacctcccagagctacaatggcttyttttctctctgagaaagttagcactttgggggaaatttcttctactacctgaattattgggtccctccccctacccacccccccatagtttttctgtttcatttgttagttgtgaatttgtttcttctttgtctttgcatttattctttaagaacttctttaagtgtttggatgtccttgaatatcatctctttttctaagagtaaagccctacaaagctgatgagatgttttgtgtgcatgggtggggctcttgagctttctatctgcaagtggcagaaatctcttccatgctgcatagcttgtcctggcatgaacatgacttttctctctgctccttgttccttcacctccattaagtgcactcacttgactcagaggccagattcactctgagaaggaagtgtccaaggagcccctacatcgagaaagcagtacttccaccttggccagcctggcatcctatgctggtcctgtccaaccgatccccacatgatcagtatgcacacgttctttgatcagatcttgtcctatttgtctgctctctctcttgccttcttatattaggggattcctaagatggttctcttgtatttttaaaccttgagctcttagactttaaacatttcttcttcacatacttcagactttctcaacatcttttcctgccccagcatgcctgaaggacattcaaacacccctcaagccagtggcagattgggacattgattctaacaggtgcacagtggggaggggtgcaggagacgagaaagagacaagttccctttaaaaggcttcctggtttgtctgcttacacacacgtatgcacacatgttggggaggtcctttctctgttctttcttccttattttgaaatcttcttgttgggttttctatacaacatttgccgctgagtcttccacaataattttgttcaaacaacctcaattttgcaagtaaatgatggagcagaaggagttggacactgcagtaatatattgttataacatttcagactctgccctgatattttcaccagtgccctgtcacagtcttttgaaattgcatatacaggcacacctctttttattgaacttcactttattgcactttacagataattgcactttttacaaattgaaggtttgtggcaaccctgcactgagcaggtttatcggcatcatttttccaacagcgtgtactcactttatgtctctgtgtcatattttggtaattctaacaatatttcaaactttcattattattatgtttgtcatggtgatctgtgatcagtggcccttgatgttactattgtaattgtttaggagttccataaacagcacccatataagatggcaaacttaatcgataaatgctgtatgtattctgactgctcagtcaaccaactgttcccccagatctccccatcttcttgggtatctctgttccctgggacacaacagtaatgaaataaggccaatgaatgaccctacagtggtctccccagtgttcaagtgaaagaaagtgctgcacatctcttgctttaaatcaaaaactagaaatgattaagcttagtgaggaaggcatattgaaagctgagataggctgaaagctaggcctcttgtgccaaatacccaagttgtaaatgcaaaataaaaattcttgaaggaaattaaaagtgcactccagtgaacatatgaatgataagaaagtgaaacagccttattgctgatacagagaactgaatgatctgaatagaagatcaaaccagccacaatattcctttaagccaaagcctagatccagagcaaggcccccaactctcttcaattgaagttgaagctgcagaagaaaagtgtgaagctagcagaggttggttcatgaagtttaaggaaagaagcctcctccccataacataaaagtgcaaggtgaagcagcaagggctgatgaagaagctgcagcaagttatccagaagttctacgtaagaacattgacaaaggtggctacattaaacaacagattgtcttgttttgttttgttttgagatggagtctcactctttcacccaggctggagcgcagtggcgcgatctcggctcacggcaacttccggctccctggttcaagtgattctcctgcctcagcctcccgtgtagctggggttacagtcacacaccaccatgcccatctaatatttgtatttttagtagagacggggtttcaccatgttggccaggctggtcttgaactcctgacctcaagtgatccgcccatcttggcctcccaaagkgctaggattacaggcaagagccaccacacccgaccggaaacaacaggtttttaatatagaccaaacagcattatattggaagaaaatgccatctaggactttcatagctacagaaaggaagtcagcacctggcttcaaagcttcaaaggacaggctgtctctattgttaggagttaatgcagctggtgactttaagttgaagtcaatgtccatttaccattcaggaaatcctaagacccttaggaattatgctaagactactctgcctgtgctctataaatgctatcaaacagcaacaaagtctgaatgacagcctatttatttatagcatggtttactgaatattttaagcccactcttgagacctactgctgagaagaaaaaagatttctcaaaatgttactgttcatggacaatgcacctggtcacccaagggctctgatggagatgtgcaaggagattattgttgttttcatgcctgctaacacaatgtccattctgcagcccatggatcaaggagtaatttcaactttcaagtcttattatttaagaaatacattttgtaaagctatacctgccttacagtcctcctgcctatctgatggatctaggcaaagtaaattgaaaaccttctggaaagagttcactattgtcaatgccatgaaaaacattcgtgattcatggaaggatgtcaatacatcaacattaacaggagtttggaagaagttgattccaatcctcatgagtgactttgagggattcagtggaggaagtaactgcagatatggtggaaatagcaagagaattagaatcataagtggaacctgaagatgtgagtgaattgctgccaactcatgataaaacttaaatagatggggagttgcttcttatggatgtgcaaagaacgtgatttcttgagatggaaactcctcctggtgaagatgctgtgaacattgttgaaatgacaagaagggatttagaatattacataaacttagttgataaagcagtgacagggttggagaggattgactccaattttgaaagaagttctaccatgggtaaaatgctatcaaacagcatcgcagccttcagagaaatttttcataaaaaaaggagtcaattgatgtggcaaacttcgttgttgtcttcttttttaaaattgccacagccacaccaaccttcagcagccaccaccctgatcagtcagcagccatcaacattgaagcaagcccctccaccagcaacaagattacaactcactaaaggctcagatgattgttagcttttttagtaataaagtatgcttaaattatgtacatattttagatataattctattgcacatttaatagactacagtgtagtgtagatataacttttatatgcactgggaaaccaagcaatttacgtgacacaatttgctttattacaatattcactttatttccattatctgaaatgaaacccacattatctttgaggtgtgcctgtattttgttcaggagggaactgaggaagacactcttatccaggatgagctgaaattgtttctcaagttgttcttgacaggggaaagagtctttggaggtcatgtttgaaatgagggtttgggactctatgaatttcaattatacatgtcctctctgctctgcctccagataataaatatacaatcatgtcatctgcaaacagagacaatttgacttcctctcttcctatttgaatatcctttatttctttctcttgcctgattgccctgtccagaacttccaatactatgttgartaggagtggtgagagagggcatccttgtcttgtgctggttttcaaagagaatgcttccggcttttgcccattcagtatgatattggctgtgggtttgtcctaaatagctcttattattttgagatacgttccatcaatacctagtttatggagagtttttagtatgaagggctgttgagttttatcgaaggccttttctgcatctattgaggtaatcatgtggttttggtcattggttctgtttacgtgacggattacgtttattgatttgcatatgttgaaccagccttccatcccagggaggaagccgacttgatcatagtggataagctttttgaggtgctgctagattcagtttgctagtattttattgaggatttttgcatcgatgttcatcagggatattggtctaaaattgtctttttttgttgcgtctctgccaggctttggtatcaggattatgctggcctcataaaatgagttagggaggagtccctctttttctattgcttggaatagtttcagaatgaatggtaccagctcctctttgtacctctggtagaatttggctgtgaatccgtctggtcttgggctttttttggttggtagactattaattactgcctcaatttcaaaacttgttcttgttctattcaggggttcgatttcttcctagtttagtcttgggagggtgtatgtgtccaggaatttatccatttcttctagattttctagtttatttgcctagaggtgtttatagtatagtactctctgttggtagtttgtatttctgtgggattagtggtaatatcccctttatcattttttattgcatctatttgattcttctttcttttcttctttattagtctggctagcggtctatttttttgatcttttcaaaaaaccggctcctggattcattgatttttttgaagggatttttgtgtctctgtctccttcagttctgctctgatcttagttatttcttgtcttctgctagcttttgaatttgtttgctcttgcttctctagttcatttaattgtgatgttagggtgttgattttagatcttccctgctttctcttatgggcatttagtgctataaatttccctctaaacactgcctccagataataaagaactacttagaataagtgacttttcataaagtgtcagtgttcagtctcttcttttttacagtaatgaactggtatttcctttacacatctttggatttattctgatttcttatgaaagagaaaacagggagcccaagtattaactgcaaggagaaccagatttcattaaacggtgacctggatgaattcctaatatcatatgctttattctttgcagagaagggcttatggtttgattttttcaaaaaatgctggctacttatccctcctttgacatcagtttggtttgccttcatatgtttggagtataacatgctttatttggcctttgggcttctcaagtttaaaaacatgcacttcattatatctgtaatggatattttgatagagtgatgaatatgctcttccattttgctgttctctaagattactgtggaaccatgattattgatggagaagaagctccagttgcctacacgttggatgataccaaacctgaaggcaactatgctgccataatggggtaaggcacaattatggtgttgtggctgctattcagtgttgacaagataatcacatactattaacaaatgtgccccaaactttgttaagtgattttttttttacccagtggtattatttttcaaattcagcggtacaaaaattattactggttcttttctaaataatgtcttccaatgaataaatatctaggtaggaagcagaataccaataacattttaaaatttttatgttagttttctattagtatttagtgttgggggtagacatatttaggtgacccatcttttgttgaaagcatgataaaaagacctgacttggggtgttttactaagagacttcttgtggaggctgtgtgggcatccatgttacttaaatgagatgctgagatttctgagtcccagtagagaagagccaagaccagcccagtcttcagctttccagggacgaccagcacrtgggaagggaagaccaggatatcctggcccagagaggtggtgacctggagtatccaaaattaagatgggcctcaggacatgtatgagtttatctcagagagagccaacagtcagaacagagagatcaaagctaattgttagttgaaagcaatcatggggctagaaatggagatggaatctagaaggttgggtgctagggagacaccatggtggagacaaaaccaaagagcaaggactggatgaaattggaagagctcagacatagccttaagtgggcatctgaggcccaagggttattcttattgaccaccagctgggtgaggggaagtgggtcagccatagtgttatccaaggcaaaaattatggccagtcatctacttttagtcgcttgattccttgaagttagaaagtgctcttcagtgtcagaaatttgatatgtaaatcataaaactttgaacgtaagaaaagctagtgtatagtttgtttcttttggttgacttaactgtgtaaactgggcacatgtgtagctacgaaaatgaggctaggatgaaaccaaccattaatttctcccctttttcttgtttatattctttagatttatcctggcccacaaagccagaaaactggcacgtcttaccaaagaggaaaggtaacaaaagaaatgctgcttctttcgtttcttccttcctttcccccccactccatccctccctcccttttctctttctttccttcttttctacctacttgcctgcctttcatttttacttaactttttaacttacggactgcctaattatatgtgtattgccagtgctacgtgtttgctatgttaattataagggtcttgttgtaaaagacatagtgctgataacttaagaaccaaagtattcaaattaatatttattgagtttattgtacataagacaccatgctaggggctacggagaatatgaaaatggatataacccaggggctgaaaatttgcttgtgaaggagataaaccagggagaaaaattactgtgttgtggggaagtctgctgtacacatactacatgaatgatgcataacaattacagattataggtacagtgggactaattcctctggaggtggcaatttcttcttgcaattagtgttcaccagtgccaattatttattcccacaccactgctaataacctatttaccaggaaagagctcctgaattatattatgatgcatgctttccgattccatcagggttctcctcaatgaccaatgttacctctgcacatagccagggccgtagcggtctgcctcggcctcttccctaaaaatgtccccactagaatataagatcatgaaggtaggatgttttgtctgattggctcactgctgggtttccagtgtctggaacaaatcttttcccactttgccttttgatcctgtttatggcttattcattttatactataataaaattttatctttttatgtaatcaaatttatccattttaaaaccatggtttctgagtatctatcatacatagaaaagactttctcattccaagataattttttagaaatcacccattcttccactcgttttatggtctgacctattatatgtaaatctttgatccttctgaaacatattttggtgtaagaaaataacgtaagcatcctactttatttctttcacgagcagctatttgtcccagtgccattttattgaaaactgtcttttccctgtgggttcaaaatgtccacctttatgaattctaaatttccttatatatttggttctacttctgtacttatttctttgctctttctatccattcctctgcttgtggcaagttacatcatttgtataaaaacaaagaaaaagacagaaagagagagaaagaagagagggagggagaagaacttaggcattttcataaacatttgtttcagaaacattttgttcataaacaaaagggctcctggatttaaaataataaaataataccatgattcaggcaacatgtcactttactttcttaaagacttaccagcaatcctgtgtgattaatatttgtgacctcaaagatttaagacatctgaaatggaacaaaatgccttgttttaaaaaattaaaatgaaatgctggagtggaatcaatggctcatggaatcttttttatgaggggataaatgcctctttcccactttttttttccctcccttctttcctttattttctcttttgtctcttttcattcacaggttgaagaaactttgtgaactctatgccaaggttctgggttccctagaagctctggaggtaaggctgcttcccaaccctatactaagggtgagaggcctttctttgtccccaagtgactagcagggataggttaatgcaagttgggtcctgaagttcatgtttttcccaatatatttgcagaggcatctacacaggactggtcagtttacaagtggttccagagagtgtgggccctggctgtgctggtggcaggtcagggaacttgcaatatgctgtggtttargtgatgctacattgtccctgaattcagagtttcttcctgggagagggcattgggtcactctgcttccagttctgttaggggggtaaaagaggggagcttctactacccataggaagatcctagatcctggtagccaggatggggatgaaaagggctttttcccctctctggtgatcttgtaagaaggacagagtctcactcaggtacataaacctatacctaccccatcccccactgtctcacagtaaaaaaataagattacctgtccccactcctgcatgccctcttttctgccttgttttacccttgaacatgagagatgtaaagaagacaggctgtctgtctgtatgccagttgagttttctagacacctttggaagtagcctgagaaaacggtgatcttcaaatgaatcaagtagaactctaaggtggttaaaggtgggataggggcagggtagggggcatttggtgacagtcagagggcccaaagtactcataacaagtacccataatcacctccctcatcaatatttaaaatgatgaattggtgttctcatgacattcatcagactgctaagtttttaatgttttgacatagactatgtcaccttttgaaagtgattattaaatccaattatctgtgaagcatttgaagacaatggagaccaatgtacaaatgagcagttaatgcgtgagaaaagtctaatgaggaggctgagaatgtttaacttgttaagcctcttaaatccaagtctctgtagtatataccacaatctagttgagcagctacatgacttagtcctattactctaacacttactttgctcagctttggagtgacttgcttcctcctggttaagttgttgtgtctttcaaatttgtcatttttgttcactattttaaagcaaaattctctccctccctcctcgccccaccattgcagatcttctgtacttgatacaggtgaaacacatgctcttgatgtttcttggaattctttctcagcaaataaactagaacaattagagaaacaatattaatgaggaatatgttttgctttttttttttgctttcatataccaattagcaagtttaaatataggcatagcctccaggctcaaggatattgagtaaagtatcaagacaaaaaatacagtatatactcactaaaaacagaacttaacatctgttaaaaattattagtttttctgtttaaaaatgccattcagcatgatttataatcctttgggtatatacccagtaatgggattgctgggtcaaatgatatttctagttctagatccctgaggaatcgccacactgacttccacagtggttgaactagtttacagtcccaccaacagtgtaaaagacatatgcacacgtatgtttattgcggcactattcacaatagcaaagacttgaaaccaacccaaatgtccaacaatgatagactggattaagaaaatgtggcacatatacaccatggaatactatgcagccataaaaatgatgagttcatgtcctttgtagggacatggatgaagctggaaaccgtcattctcagcaaactatcgcagggacaaaaaaccaaacactgcatgttctcactcataggtgggaattgaacaatgagaacacatggacacaggaaggggaacatcacacactgggacctgttgtggggtggggggaggggggagggatagcatttggagatatacctaatgttaaatgacgagttactgggtgcagcacaccaacatggcacatgtatacatatgtaactaacctgcacgttgtgcacatgtaccctaaaacttaaagtataataaaaaaaaatgccattcagtgctagaggtctggagaataaagagtgtggagttgatttaaaaaaaaaagccattcaagatatttcaccctggtagatattcaagctttgtgaagttacattctgaggcactcccaggctaaagcagtttgttaattgaagttcctgcaacaactcgtgagatggttgtttggrgaacttcagttgaaggggaaagcatttgtcctcatattttgaaaaaggctgatcatttttcatttgagaaagtctcttttcctaagaagggtgtgcatgattaattcctgatgataaaaataagttggtcctgtccttgtttgctcttggcatagagaaggccacttgttttctttttgctttggtgtctattttgtggaaggaagaaattcctgggaacaagatacattgaaagataaagtccaacttttcttctgattggctggagacagccagaraagcttgcttaggaggtggatgtagccgtcaggtgctggggcgtgtagcgtggtgataccacagaagacctggagccacttaacccatcaggcagaacctcataatcatactttgtaaataggatgccttacaaatgactgtccaaagtcagctgtgtgattgcaattcttttaaacaaaatgtttttcaaaatctccctttaaaacaaacattgttttcttaaaacttgctacgttgattttatcttttcgaagtaatgcttaatgataaagcttctgtttggttactttaaaaaagcatttgagctttacaaaatctctgccaatttttcctgttcgtgtcaaaaacatatttttcagaccaatagttgtttacaaataccaccatcaacagaagtgcttgcctgccacaaaaacatgtttgttcagcctccctcaagaaagctcacctccaccaaaacatgaacctgataatcctttttcttcaacagacatatttttctgtctttttttcctatccagtcactccagtaaacataaatccttttaaaaacttttcttgaaaccatcaggcactaaaactttttaataggtaaawccaaggtaaaaatggaattagattatcgcaatttatgaacagtacttaagatacaaagaaaccaaatgaaaaaaacattctaagatctgaatttcttagaagcttattaccaaggacatttacctgcccaaagacatatctttaaaaacatcaggataatgcaactctatttccgaaatacattggtttgacaatacaaagcctactaaactgttcgatttattctaggctaaatagctttctctgagtctccttcaagtttttgttgctctatcttgcagccagtgcattatgaagaaaagaactggtgtgaggagcagtactctgggggctgctacacaacttatttcccccctgggatcctgactcaatatggaaggkagagtaaaagcatgctaagctgttacaraaatcccctgcacctgaatccaaaacctaaataggttcaggtagctcttctcccttgtttcttataaatacaaaaaaaaaaaaaaaaaacaacccaatttcctttgtatcttatgaatgaaatcgtgtatcttatgaatgaaatcattataattatacatacatcatggtgctgcttttccctggaagagcaattccaatcaatataaccatagaaggtttcagcataagaatagcattttaccccattcttcatgatatgattattacgcattgcatgcctgtatcaaaacacatcatgtacccatagatatatacacctactctgtacccataaaaattaaaaatcaaaaaagagtagcattttaggtagtccaagggttcacccaatgtcagaagaagtgtccttatactgagttaggactcagtaaaacttcctcaaatgccactgtacaactgccaacacggggacaaaattataaaaacaaaatgagttctagactgggcatgaagagacttgggtcccagctctgattctaccaataacaaactttgtcatgccaaacaggtcacttctcctttctgaacctcactttcttagcaagtggatgggaaagcacaaaatgatgaaaagtgagcaataatcagtatgctcaagaaagtatgagttttttttattttttgatcctaatccttagatgctgggaagtatgagttattttttaacatccttattgagacgtaattcacataccatacaattcacctattcaaaacggtgcacagttcaatggcttttagcattcacagcattatacatccaagtgtgttgttgtttagttaatttatttgatgacaataaatgaactaataatatagcagtgatttttatgactattatactattactaaaccaagcaataatttaatgccaaaagcttaatctaaacaggatgagaaatgtagactagtgagtcaaagactgttgaaagtatgcagcaaacagagggggtaagtggaaatggctaatcaatctgtccatgaaaactggtcgaataaggagtaaaacctgcttatcagaagatacgtaataactttggttagcactttctttacctgcttaaagatggcaaaatattatccaagagaacattctggggccaaggggcagcacctgataagctgctgggtcattaagttaatttttagatatgctgactgtgttactctattttcacactgctgataaagacatacctgagaccgggcaatttacaaaagtaagaggtttattggacttacagttctacatggctggggaggcttcacaatcatggcaaaaggcaaggaggagcaagtcacatcttacgtcgatggcagcaggcaaagagagagcttgtgcaaagaaactcccgtttttaaaaccatcagatcttgtgagatccattcattatcaccagaacagcacaggaaagacccccgcccataattcactcatctcccactgggtccctcccacaacacatgagaattatgggagctacaatatgagatttgagtggggacacagagccaaatcgtatcactgagtgtagaatatgtcaatggtatttgtttcattctgcatttattggctaagtgccaaccatttgcgaagcactgtgctgagaacttcaataccaaggacagcctccctgctgagaaggagctgacagtgttgagggctagggtggggatggggagaggacatgatatcaaaaattgactctaaagtactgacatatgtccctggaagggaataaggataaaggagggcactactgtatcaccactcagaatgttaccrctgaggtaaatgctctaawacaggggcatagagataccactggaacacacagaggcacaggctagctttacttagagaaatctgggaaggcttcataatgcacataccacctgagggttgtaggaggcagagaaaggctattggggatgcagtctatgcagatggaatggcatgaggaaaacgctaggatcccacaggtttctggaaagtctggggaagaactttgcatggatggtgtattaggccattcttgcattgcttaaaataaatacctgagtctggggaacttataaagaaaaaaggtttaattggctcatagttctgcaggctatacaagcatggtgctggcatctgctcagtttctggtgaagcctcagggagctcacaatcatggcagaaggcaaagtgagaacaggcaagtcacatggcgaaagcaggaacaagcaagtgtggtggggagaggtaccatacactcttaacgtgaccagatcttgctagaactcactatcatgaagaaggcaccaagccatgagggatccgtccccatgatccaaacacctcccaccaggccccacctcaagcattggaaattacaattctacatgagatttgggcagggacaaatatcaaaatattatatcagatgggctatgggtgatattaaggacagaatggagaatcagatcaaagggggaggaagaacagtttgccctatatgacacattcaggaatacaaaacttgatatttcaacagagaacagctatcactgcattacttttgtttttggctttgttttaaatcagaagtgtgatatgattagatttctgaccacagagtggtgggttttatgctcaatttcataaataccttttggtttggggaacaaagaggacactaacctgaactggcctgatcctgaccacgtgagagaagcaagataaatcccattgtatctggcattggtggtgatacagtaatgccttcttttatctttattccttcccagggatatatgtcaggcttcctataactaccttcaatttttagggtagaaactaaggcacagcatagcttaacataattcccagcttgaacagagactacctgcccagaagacttcccttgacccttcagggccatggtatttaagatattgcaataagttttatattcagagccctgaaagttcacagtacatgttctgaaggaaaagagaagacagaattaccagtacaacttggtaaagaactaaatatacatttcttaagaaatgtttcttctggatagggtgaaaaaaatgattgtcgtgattatgcagtaaaactcataagccacaagaaatatatgtggagttcccctttatgatgtcctatatcttttgtaaatatatactgtctgttcacgcacctgcaaaagaaggggcaggtatttttcttacctggttgttggactctttttttcccttaaaggaacataatttccaaatgacaagtggcgggaaactatctctttgtttaaaattaattcttggttttcacatattctgatttatagtatgattagttctctaagcctttgttctgtcttctaatatttcattcttagggtctagccaggcctcctagaggtctccagctggggttagttttctccattgaaaaaaaagtaaacatgtagtgaaaaacggcattgtttaatcaacacggggaaagtcaatccaccttctcttgtaggaagggttccttcctgagtacccttaggctctctatatatttcatgtgttgtcatcaatatactaatacaggtgttcctcaaaatatgatggggttatatcccaataaacccaccataaattgaaaatattataagtggaaaatgcgcttaatacacctaatgtactgaatatcatagtttagcttagctaccttaaacgtgctcagaacacttatattagccgacagttgggcataatcatctaacagaaagcgtattttataatagagggttgaatatttcatgtcaagttttaaatacggtattgaaagtgaaagacagaatggttgtatgggtacttgaagtatggtttctactgaatgtgtattgttttaacaccatcataaagttaacaattatacgttggagaccatctgtattctatataatatctctccttgtattttcttctcctttttgtgatgactacaatcagagcaggtgaaagaaaacccaccaatgcaagccagctcatttggttttctaataaaaggcccagtggtgtacagtgttgactaagatggaacatggatgttagttcttgacatcgcttatcagatataagagaaccmtgagacaggatgaataatggcatgttgacggtgctttccttatggtatttttgtcagagcaacaatgaactgcccctcttacaggccaagtgctatgacatttcagtcccttgtatagcatgtgggcagtctactaactattaaatattatagggtgatgatacaccaggcaaagaatataagataaaaatagagactttgacatctgttagacatggttcaaatcctggctttgctattttctaggagtgtggctcttggcatatcactgaacatttctccaagcctcagtcttctcatatgtaaaaatgagataatgataatagtagctacatcacagagttctttaatagattgaagaaataatgcagtagagagaggaagtataactaagtggttaagactgtaggttccagagtcagattgcctgtgttcaaataccaactctgctacttactagctgtgaccgagagcaaattactttgtctttgttgctggttaggttccaggaagcagaccctgaaacaacgattagcagacaggatatatattaaggcatgcccttaggattggcagctgtggaagggagaaggaagcaggagtgggcatagggagaacttgggctgcagtgcagttccagtgaaggcctcagctgaccccagaggaagttccagaactagaatggcccttcagagtgggaggtctcaagttggagcttgggaatcaggtatttacagcccgtggtgatcagtcactggatgcaactgctattggaaggaggcatgacctagtaggtaacatagttttttttagcagaggcaatctccaaagagggctgacatcagtaggccctcttctggcagcactcccagcagctgggaataagtctttcattcttgaagggggcctgcgtggttcatcacaatgtccaccacagtctacctccatattcttatctgcaaaatggtgataataatagtaccgacctcaccagtacaggcaagtgttcaaggaataggagttatggagccatagtcagactctcagatttgttaaatgttactgattgaaagggtcttagaaatcagtggaccattccctttaagaggcaaggaagccagagcacagtgagagtaagtgatttgccaagttcactagtggaatagccagtggggaattgggggcatgtatcaccttgccacagagccagtgagccataaagggagccatgtgactgggcttacacagtccctcacttcatgttgatgaagcaaatacataatttacgtccattaatgtcagctccttcacctgcaactcttggtgcaggagtgaactttggcttttattctattttgtttgtgacaaggatcatgtaagagctggaggaaccacataaacattattccaaaattgccaatgtccttcttgattgtttagaatctgtggaagctgaccagcattggtctttatgggaaaacttttctctgactctctgagactgaccacttttgcctctttggttttgttccaagggttctacgccagccagtggacaggatttactttgcaggcaccgagactgccacacactggagcggctacatggagggggctgtagaggccggggagagagcagcccgagaggtagggtctggggtcatagattatggggaaggaggcaactcatggtcctgacatgtaggtcaaagatatctgagagcctggagaccaactctccagtaacccccatcttaagacccataaaatactattttaactattgtctcaggtgaagtgaacaccttagcccgaagtaataatgaaaatacctaacatgtcacccgaagtaaaaagagcccatggggcaaacgatcaacctgactatacttgaaaggtaacctaggtctgatattctagaaccaaacatgcttctattaggactcaaaattcaattcatttcacaggaaagattttctgacagttcctctgatgtcatccctatttgaggtgtgttcataactattaaaatttatggtaagcctaatgattggaacctcttataccacaggagaaagaccttttggcgcctcttaaaggttgtatggagtgttctggcctttaccttggtgtttttgatggatatctcaagagacagttacttagtcctttagggagcagattagaagaaagatggtgtcrrttttgctatttgccagtgtgttctttcatttcagatcctgcatgccatggggaagattccagaggatgaaatctggcagtcagaaccagagtctgtggtaggctrtgttttatttcatgaaattagatatcttttctctaaacccattattttcaagaagagcacacttgtatatattcacataccttttcctaagtgattcaactaagtgatttaaacatgaatgtttaaataagtatcatgggttagggtagaggtgagagatttagatgaactttgataaatttgtagctgtcacattcattacagattattaggaaaaaatattttttgatgaggagggagacatttctcrgagacttctaaaaataataactcaataaatgcctgtcaaataaatatctagcctggtgattctccacatgaggtaggaaaagaaaggaaagtgtgttagcatctcctgtccagggacaaacaaatggaatgaaatggagaatatttagattaaaattttatttttaatatactcatcatttttgtaataaaatcctaggaagttttcctggctggaaggagggatgcatagaggttagagtgcaaacgcactttagaggacaaagtcacaaaggtcagaattattgctctatccttttaagtgtgaagtcaaagagaataggcctgccactccacagtcattctcttagtgcttctgccagggatgggattgtgggctgtagggaccattgattcatttactaacaagtatttatggcacacgtgttctgtatcagccattgtggcaaaggcacagcagcatttttgtggagctcaacatctggtggagaatgcagatgataaccaaaaagtacagaacagtgaagaagacatgctgagaaaaaatgcaaaaggagaatgtcatcctaggctggggtctcaggaaagaaagcctccctgaggaagtgaagggtccagtgaggaagacagggtaaacagtataagcagagggaacatcgtgtttactggtctagasgttggcaagaatgggtcatgttcagagagctggagaaagtacagactttctggaataaagtgcacaagccctgtactaatacccaatgttttctgaaccyaggatgtccctgcacagcccatcaccaccacctttttggagagacatttgccytccgtgccaggcctgctcaggctgattggattgaccaccatcttttcagcaacggctcttggcttcctggcccacaaaagggggctacttgtgagagtctaaagagagagggtgtctgtaatcacactctcttcttactgtatttgggatatgagtttggggaaagagttgcagtaaagttccatgaagacaaatagtgtggagtgaggcggggagcatgaagataaatccaactctgactgtaaaatacatggtatctctttctccgttgtggcccctgcttagtgtcccttacctggcttagcgttctgtttcaccrgtttccaagtttatygccctcaaaatctttagaatagttaaattggcttgtttaaggttcttgctgccccacaacacaccttgcccatgcacaaggaatgaattttttcctaccattatggctttgtgcttgttcttcctcttacctgtaatagcctcaccttcccwagttctttgcattcgtccttagratactgtattgttacagctgaaagacagtaaagaccatttagtcctcaccttctgttttagagttgagcaaactgaagcccacagaggtggaacttaattacctaagagccacaataagccactggtatctgggggactagaacacaaatccaaygcttttcccacctcyttggatgttttccccaattatcctccttcactccctgtcatagttaccgayggtgtcccgttgtgtgggtttactctgtgctaagttgtctwacacttctcaaatgctactcagtatatagccttaastcttactgttttgtgcggtgtgtctccagctgattttaacttttttgatggtagaaattttatctcttcttccttttgtatcctccattgtatcttcatacaaaggacagtacacacttgggtaattaaaaataaaagttgattgaccatatctgctgtcctttctttttgggtaatgactttcargctttggacacatcaaatcaagatccagtattaagtatataattgtgacttgaaarcatttagtcaaaatttccttgaagcctggatgatgcatgcatttgattgcatgatccatcatgggtggcatatgtgtgagcatgctgaaaatgatttataaagatatggtaagaatactaaaagatgcagttccttgccttcactaccccaaaaaatacctgccaaaataaatgacatattaataagcaagatgcttaaactattaagctaattataatatttcagttgacatttcatattccttcttggtgcaaagctttttactaggtacactcattaatttgaaactgcagtttcacagtccattaaattctatttggactattttttaaatggtatcatcatttcaaagcactcatacctctcgactcccaccgtcagttttcattggtatgttttttaaatccataaatggccattcttatacttttgtttaaaaaatgaagcttattcttagcataagtgaaattgaagaaatctcccaagattaattaataatagtatagagtttctgattttacagtggcattaacatgtatgagtttatggaaaatttagggactgtcttactctattttgtgttgtttgttataacaaaatatcacagacagagtaatttatagtgaacagaaatttattgactcatgattgtggaggctgggaagtccaagatcaaggaactggcatcttgtgagggcctttttgctgtgtggcagaaggcatcacatgggtgagagagtgcaagagagggctaaactcatccttttataaggaatccactcctgtgataacaaatccactgccatgataatagtattaacccatttatgaaagcagtgccttcatgacccaaacatctttcattattagatgtcaccttccaacaccactgcactggggatcaaagttccaacacatgaactttgggggatacattcaatccatagcagatactaaatgggaaacccaccaagattttctttgtaaccatttttttttattctctctaaaaatgtacatggcatggggtgccttcttgagcatcttctccaaaaaagtctccctaaaagttgatctcattgctaactctaatgcatctgctaagaaagagtcaagggctggccacagtggctcacacctgtaatcccagcactttgggaggttgaggcaggcagatcgcttgagctcaggagaccagcctaggcaacatggtgaaatcccatctctataaaaaatgcaaaaactagcgggcatggtggtgcgtgcctgtagtcccagctactggggaggctgaggcaggaaattgattgaacctgggaggcggggattgcagtgaaccgagatcacactccagcctgggtgacagagtgagactctgtctcaaaaaaaaaaaaaaaaagaaaaggaatcaccttctccaaaaatgtcctggatcactcattctccagctgagtgaggtgccccttttctttgttttcccaatgtcacatacattgacctcttgttctgtgctgaccacatgatactgcaattgtgtcgtgttaatttacatgatttgactgaggtgccaagttacattaaatatcagctaccaaggtgagtcctgagatagacaaaaatagagaacttcaaaggaaagatataaaaaacgtgtttttgttttctgttgtaacccctcaccagttttgagaatataaaaggagtagagagggttttcaaaggggcagatttgtacagatctctttagagagagagctgccattctctgggtccaacacagcacaaaagggagggatgggggggctgccttctcattccaagtctagtgagagaagcatcaagaaaacccctttgagagcttcacgtacctctgaagaatcaaagacctcgattctgctcgaggtagtatatatgtatgtatgtatatatatatatatatatttatctattatactttaagttctagggtacatgtgcacaacgtgcaggtttgttacatatgtatacatgtgccatgttggtgtgctgcacccattaactcgtcatttagcattaggtatatctcccagtgctatccctctcccctccccccaccccacaacaggccccggtgtgtgatgttccccttcctgtgtccaagtgttctcattgttcaattcccacctatgagggagaacatgcggtgtttggttttttgtccttgcaatagtttgctgagatagttttgaccagagagttaggggctgccacagcaactgccagaaaacaagctaagcagggattaaaattggctacccaaaggagaggcactgcctgttttgtggcagtcaaggttagagccagagggagagtctttgaaaaaaacacccaaaagtgtcctcacaagaaagagttagttctcataacagccaggcttggatcatataaaactaccttataagaggaacagtcaagtaggagtgttcagtaaaccactttccctcattgccttccacactcaacccataaagtcccagaatccacggttggcaagctaaggaaggaaggagtacagaaggaaaggaaaagcttaccacatgtcccttgcaagatggcacagctgcccctgaagctggtcttaactggaagaggggagaagactgagctttaaatcaagttcagagacttgatcattccacagtactggacatcaaaattactgaattgagactgtggtttgtggcttaaggaagtcataggattgtctgttatttaagagcaattgatgatagagtcatagacctgccagggttttcaaatgcaagaaatggagaaacttccctcactgagcaggtttaaatgaacagtggaagacaaaaaataaagtgatttatttacatcccattcaatacactggtattattatcatctattcttgagagcagagacagttttctattcatcttttcatcctccgtacctcctgtggtgcctaagccatcataatgtctaaaaaataataaatgaatggattcttgtaatttttattttaattctgaattagcaatcctgttatacttactcagcaaacagaatgctcctatgctgttttgcagagagccaacttaaatttttggcatactcattttgaaagtgtcaattgtcttctttactagattttagttgagatagcattaactggttggatacagtttccctcttgggtcgattgatggatctaaagctatgattctcaactgtgagtgcataacaaaatgactgggggactttggaaagaccccttgtacctaaatacatgaggaattgaatatagcagggtggtaggtggtgagtgtcttcacagaccttctctgtgaaggtcataatcaagggctaagaattactggttcaaagatgcagtaaagcttggagatctggcattgagcttttctcacaagactgctgctcagcctccatcctctttcacctactcagctacattggagtgaaaaaaagatgctaataacatacttagaataaaagcaaacagtgttgctccctaaaagttaagcatctgggccgggtgcagtggctcatgcctgtaatcctagcaatttgggaggccgaggcgagcagaccacttgaggtcaggagttcaagactagcctgggcaacatgacgaaaccccgtctatgctaaaaatacaaaaactagccaggtgtggtggtgcatgtctgtagtcccagctacttgggaagttgaggcaagagaattgcttgaacctgggaggtggaggttgcagttagctgagatcgtgccactgcactccagtctgggcaatagagcaagactctgtctcaaaaaaattaaattaaattaaattaaaataaaagttaagcatcaatttaacaagttaaagagtgatacatgtttcctggatcataggaactacttgattaaagaaagactatcttgattggaaggcatggttgtcttgaactgggtaccacccacaagtatagcctcaaacaagggcttttatggagaccattcactctggaaagtgatcccaggaagcaggactgtgaaacaagggaggtgggagagccaatccgaggatgtattattgagctggtcactggtgtgggatacaggggctcagtccttctggggaccctttgaggagtcttgcacaatgtaccctagaatagttaaagtgttcgctggaatgttaactcccttgaacttccaggtttgcccatgaattggaatagccactggggaaggtgctgatgtcagtttgcacatctggttgccgcgtctatggctagagtaaaaagatgggctgagaggatacagtggtgcctaagaggtgtaacgtataggaaccaatacacaacttaaaagaattctattgaaagaagcacagtatttcatttatttatttattttttaatttttttctttgtccaagggagagacatgttgaatcttagaaaaacaacctgtttatgtgacagtctcatggatattttagttataaagagaacatctcaatttgggatcttcaaggctgcataagtgggataaatcccatctatcggtaaggtctcatgccagaaagatgtctatgaaacactgagtgcttgccatgcctgtggttccctttttaaaaggtggtcagaaatgaatctttgcaaaaacgtcacctggttttttgatcctactaactggccacaactgattggactaggattgattcctgagtcaaagcactctataggtggccagtggtccatgagttggcctggctaaaagcctttctatgacagtggtgaagacaaagttgatacaaggagagagcaggctaagtcacagggaatgggagaatgaagcccaaatctgagtggctgctgtgccatgtgacctactgaggcatctcaatactaatgaccaatgctccgggacatcatgagatttgaatgaaccacagtggagctgatctcctctacttcctcactgcccctagttttcctatggaaacagagtgtacctaacagagacatcttttctctgccaacattcacctgccctcytatctgcttcctttaaaacgttaactctgcttgtccccagttactagtcctctgtcattgcataccctttaggatcttgtctcctggccaatatgttaggatccctttactttcttcttagccttggcctcaaactaaaaaggacaggtcctattcgaaagcaatggtagttttctcacccattcctcatttcaataatggagccatcaatcttgcaaccaaatagaataatctagaatgttctggactgtaggggaatgtgtagacaacttggtgaaatgtgttggtgggttttttgttgttgtttgtttcccgttaatttgtctaagtgctcataaggaatcatctgacttgaaaatcctcctggcgagtgatcttaatgacatttcagcctgtagacactagaagccaagctctggtattagaaataactgatctaatcagatcctacagttaccctggactgctactttctgatgtaattgctcttgtcatttctgctaagaccacatgacaagttactaacaagtcatataccactccagcagactgacatctcagtccctggcctccaaccctgatcactttgaactcttcttttacctttctttacatctctaatccccaaccacttcttccttaaccattctggttcactttattctccttgaaaatccatttccttgccaggcaaaatgctgagtggcactgagttttgctcttgaatttgacatatctctcttacctccaggccatttcattgcattatattttcttcccccctagcctgctgtcaaaatgttttcaataccagaatattccctgggttatagaaaatta

SEQ ID NO: 93611 - DNA, 197298 bp, Homo sapiens
  misc_feature (1)...(197298): n = A,T,C or G
tatcatagtctggaagctgtgcctgcccaatcctgcctcctctctgttttccacacggacatttacccctcaataaactgcttgcatttttgattccatctcagtttctgtttcctggaggacccaactggcacactaaactgtgagtgaacgagcaagagaagcagaattcaagggaaaatagttcttttgcaagacatattttcctatagataaggcagctgtggtagacctttgtaattctakttcagtaaagcagattgtgctgaatatgccaaacggcttctcttagctggagggagtgcctccctgagacctgtcaggcaatagtatttatgcgaccatttctactatcttagtgacccagtccctctttatgtggatgattgctttgcagccctgccataggtatttaccatcagggctattatagcctactgagtcatccaggagagaaatccaagttgataattaacatcctgaggaaggtaattgtgaaacacttaagcatggggctataacttctggctcagtgtcagtaaggacaacctgtagggcatatcatacttaatgagtcagtagctacctaagatgattataaaaacccaaagcatattatttttattgctgtgtgcaggagctgcagattatgtccttttgacctattttgtgttttcattcccagctaaataataaccattcgagagtggaggagatgaatgattcttctcattattaggaaatgctatatatctgcagtatgtttttctaaatagaaaacttgtagggtaggagcttttctcctttccctcatgagttaatgttctgttttaattatgaacgtgattctccttcttagagttagtggaaagtagtagacaaatgcacatcacagtccatagacagagcatgcattgataacaaaagggtcagaggttgggtttgaccttggaaagaaaagttggagcagcacccttcaaacaaaaggggcaacacattcacggacaaggcaactattcaaccgaagttttacagtctccctcaactgttctgctagtttcaatcactgatggtttaaatgtaaccgtccattactcccagaaggatgttatttcatctctactcatttctgatagtttcttctccttcttgtctatgctgcagtctacatgctctatttaccaggtacacaaagtagatgacttttaccatagtataatggtatcagttcaggtcctctggtaagcagacatcaaggacaagttagcagtataagatgtgtattggggagtaatgcctgtgaaaaatgactggagagaaagcaggagtagacatagaaagtcatagaaagatcatgatgccaatcagactcgtgattgagtgtggcttttgttgcaggaaaaaaaaatcagactcgtgaaaggaaagaaggaagaggacagaatctggcaggcagaacctcagaatgcaatgcaaatgtggttaacgcaatagacagcacagaaacaaagggtgtccaatagcagaggcccacactgggcagagaggctaggccctagtatatcctcaccatgctcagtctcagtcattgtgtcgggggctgcctgagaaaaacatggtcttcgctcaaacactgcagtggatcccaaaggtgaagcagctggaggctgtcagctagctgtccttcttgccttgcagctgatcagcaagttcttcattgaaaggaaatccaagaagcacgcctccacagccactaggataatctagtctcttgggactatgatacaaaaagcgaaggcttatttcttggttatgttacatgttatttgtggattaactgtggttctattctattttgtcccaagttcaggacccaagctaagagaggagccaccatttagagcattgccagtaggtgtggtagagggagagctccattaggtttcacactaacaagagctcacaattcattggccaaactaggtcatatgattcccacccaaccacagaggagaagaaagttcaatcctaccacatgcttggaaagcagagagcctaaaacaagcaacaccaacaattacaacagtgaacaaattggttaactcccaaagcctcctttatgttctataaataacaatttgtggggtactcaataagcccaaaggtttgtattggtttttttccctgataacttataagtcatcatttctctaagaaccctttctatttatagcagtagagacattaagtctccctgttttgtaaggaataaatccaatgctcccttttggttgtttggaagcaaggcaagtagaaattcaccatttcgggaggaagcattggagctccagctctttcaactattgggcagaatcacccagcatccccacctctgtccatttctacaaactgtaaaactctctaagctttctgagaaggtggtgagaaatttttccaggaacctactatgagagaagaagatgaggccacaaactatttcttgagagtcaaagttattaaaaccaattttggtgtttggaagtatttctgtctgaggcctaatgttagaaaagaaagccatacgttgatgaaaaaattttcctgagaatagaaagagacttgatcaggatgctggcttctgcaccagtatttacattgccaaaagagaatatggtcctgggtttacgaaaagaccaactgaagattctacacaaaatcttctcctggtcatgggatttaaccccaaagaagtacctgtgagtggagatactaactaacaaagccttgtaagtgaagaactgtaacttggagaccaaggcaaatgtgagataatctgtaatatgggtaaaaggagattctagcaccatatcaaagagagcacctcagctatcacaggtcacttaatagaaacagaattgaattgcatggtaaaggaaatcaaaatattttaccccaaaatatatttctttgacaaattttgaaatcgctgtcatagagccagaagattgagatggaagaaatttgtatctgtagagaatctctactaaagcagccaggccttccctttctaggcttttcctggatctggaagaagtctactaaaagtctgataactttaaaagtctgaaaagaaacacttacaatttattccctctgagggctactacctatgaggcttcatctatataacaagactacttttgctagccaaacctcttcctttctcactcccatgacctgtcttgccacgaaaacctgatttaccaacatatctgttttgggccatgctctgagcctgcattctttctattgcctcgagataatagataaacttctgtactctgttggggggttggatcttccttctgaaggatcccatgtatacatgttaaataaatttgtatgccttttctcctattaatcaatctgcctcatgtccatgatttttcagtgagggccttggcccccacaagggcaagacaagtagaaccctttggagttccaagcaatttctttgcttttctcctcctcagggtgcagcaaggtggacccttaggattgtaggattggctaaaccactattcttgtgcttgttacaaagaagaaaacctagagagagaggggctaaactctctgctaatatgaatctaagaagacaagagggctgggtggagtggctcatgcctgtaatcctagcactttgggaggccaaggcaggtggattgtttgagcccaggagttcgagaccagtctggacaacatggcaaaatcctgtctctacaaaaaatattaaataccaaaaattatccgggtgtggtggcatgtgcctgtagtcatagctgttcaggaggctgaggtgggaggatcacctgagcctgggagatcagggctgcagtgagccatgattgtgacactgcactgcagcttgagtgacagagtgagaccttgtctcaaaaaaaaaaaaaaaaagaagaagaagaagaaggacaagagcagcttggggcattgtacttgggggggcattattttttttccctgaatctaatgtgatcagaaaatgttgatttgtaaagctatgttttgaacaccccaacaagaactcctaagggaaaattactctaatttgtttttgtatgatctgtcttgattcctggggatttcatttgaatatggacttgtacaaatcacaatcatcagtaatatttctctgaatctttttcccatgcctgctaaagtaagatcttcgggttggggtggagggagaggaaaggacagaggcactatttctaggagtctccaagggacaccttgcctgagcccacagaaatatttctttttgcmactccatggcattagccatttcttttttctgctgtgtttccctgtagctgagatgtcaggccacccatgccctcaagaggcaatgtccttcagtttataacaactctgtcatcataggtgagagccttggcactgccacgggtgagataacataacagggcaactcactgggttatttagagcctttgttctaccatatctgggctatgttttcctcagaagcagagacaattcctctttcctcatcttggcattttaaatgctactccaaaacaaagctgcactgttttagatcctgagtaaaagcatttcaatgcagctattctgccagttttttcctgtagttttctcaccccaggacttcagcgtcagtcagtggggattagattggagaactggctgagcagtaggacatgttaatactcaaaatcatcccaaccccgattaacatgggcattgttattaggaaggacagttgagacaatccactttgtttggaggagttatttcccaagagacttcttgatctttcatcgaaggggaaacctggtgacccctagctccactgagcagaggcaagaagctcacagacagactcttgctacccatgcagagatcatattgccccatgtttagtgaaacacagtgactggacaatgggggtgaaaagtgaggagtgagcactccgaagcttgaaggcaggggtcaggtgtctctacttctctctagtatttagaccacaccctcttatatctgttatccgcctggtgctaatctgttgtgagcacaaaagataagaagcagagagacaaggcaatgtcttctttccaagtgaaggtatattgtgagcataggtactaacgggaaggtggcaaatacgctggaaaataccctgacacatacagcattagcacacaggtattttttgttggatgctgtaaaattcagagaaagtttgccaagaggcagagtgaaaaaaaaaattgggttattattttagaaactgattttgaaagaaggaagattaaaaaaagaaaaaaagccttcttactagaagatacagctgacctcagaaataagcagatgcgcctccaccaccaggagacagttttagaaaggattcccccttgttagctcaagtttattcttatccctaagcacaaactccctaggggatttggacacaggctgattgcagaattccatatgttgagagccagagtagcataatagcagggaatacagactttgaaagcaacctgcctgtgttgaaagaccttagatgtgacatttaactagctgtgtgctagtgagcaactgacttaacctctctatgtctcagttatccctttttgatagatgaggtgaggacgcctgccttacataactgcagtaagaatcacgtggctatatgtcaaaagcgcttagctcagttctctgcacataatcattcgaaagatgttggctttaacattttgttaccatctaattttaagattgacacagtagaaatcagaaatctaatatgtatgcagatatttagactcagggctcaacttgctttaaaactttgttctaaagaatataatttacttaagtatatttgaatttttacaagttatttgcacaaatgtgcagaaatccaattgtattaccaaacatgattaagacccaccatcttgaatcacggaaaacacgtttccggcaaagctgggctctgagattatggtacagtgctgacatctggtggcagcaagccctgaaacatgaaattgaagttctctcactaaaaggaaataggtaaacacccataaataagccttcataaaggaaataggtaaacacccataataagttttcattgggcggataggttttagaactccttcaaactctaaaatataaatgagtcttagaatttttatagataagaaactccaaatgactaataaacatactaaagatgcttatctcccctaaaaaccaaagaaatgaaaactgaagcaattagataccattataccatttttatccaacagactgagaaatagtaaaaagactgataatactaattggagatgagtatggaaaaattgggactttcaaacactgctgtccaaatttgaagtgctattttgctgtaccaatagacatttagcagaatctggtaaaagtgatgatgtgcatggcctgtagctcagcaattctagttcagggtatgtattccagaccccaggaaaagcctgtgctcaaagaaatgtggtaaggatacaaataatacrtggcagcattatttgtaacagcaaaaaaaaaaaaaacctggaaacatcctaaatgttcagcaataggatgatggctaatatgtcacatgcacatacttaaaaggataaaacagtaaaatgaaatgcactagaaccacatgcatcaacatggataaatcttgaaaacaacagtgagacatggaaacttcagaatgtcacatagagtatgctatttattgaatataaaaacacaagagaatactatatattgttttggaaaactaaacatataatataaaaatataaaatgggaagaaacccatcaacttcagggtagtgattacctttagggagggaggagggagaataggattgggaaggggaataaaggaagtttaactataactgcaatttcagttattaaaatttcttaatctctctaacatttttataccatttattttttgctatttattgtatccttcaatattttctgcacatttatatacatacaatggaatattactcagctataaaaaggaatgaaattctgatacatgctacaacattgatgaatcttgaggacattatactaagtgaaataagccagtcataaaaggacaaatattgtataatcccacttctatatagtacctagaataggcaaattcataaagacagaaagtagaatagagtttactggagctgggggtaggaagaatgaggagttattgtttaatgggtagagattttctgtttaggatgataaggaagttctagagatggatggtggcaatggttgcacaacaatgtgaatgtacttaatgctactgaattacacacttaaaaatagttacaatggctttatgtttatatatatatatataaccacacataaaaaaattaaaaacctataagtcagttcctgccctttgggcaaccactccaagcatggcagagaagtaggatatctccatatctgtgctggcagttgtacagaagttggtggagaggcaaagaggtggctgtcgctggcatttctttttttttttttttttttttgaattagagctgtagtaagaggatgaaaccaaagtttaggtttcggcatctaaagactagaaaaattgtattttattgcttcttgaaatgctagcttttgctgccctctaaccaacaggagaccagggccagctgagccttcttgtctttgagtaaggtctgcttctttcactccccctgggcccacctcccctggggaggtgtgacttgattcaatttcctgagaatctggggtgtagtgaaaggatgccagaaggtggcagcaaaagaccacctcgtggaaaagaccttctgctttcttctcttcactctcctgggcatctggcagaagttggctttgattgccagggtccccacctcaattcaagatgaagcctagtgtagtaacaccatgcctggggccaagagagacacaccaagcacaaggtaatcaagaggcaataattcaagaaagggtgcttccaaaggcaagggaaggataggaaaagatataggtgaacctggccagttaaactcaatgaaacttcctatgtttggggctctgtggacccaaagctgggtaaagcaatctctttccttgagacatagtctagtaagagagattaaatatatgcgcttacatgaggaaaaacaaaagatcaaggcccaaggtttttggaatgagcccacgttgggtattttcctttcccctccagatctactttttctacccttttccttacctctccctgtccagagatgctgatctgtatagattggaagccagaagataaaggcacctgtgaaaatgttggcaagatgacaaggaaataggtaaatgtgctcaggcttttattcccaggactccctcctgtgatgttgccttggcctggccctgttgcggaagatctgttcctctcaatgggcctgctctacaggattctctctcattctagtttccagcaacctttccttcccctcatctcttctagcctagtggtagtagtagctgcttctagtcttgggttcctgcactctcttgtagtcctcttcaccccacctatgctttaattaaaccctttgtaaataaaccctccttaaatgatcctaattcgtgtatgccatctgtttcctgttgggatcctgcctgacacaacacctggctaaattatattcatcctctacaactaagctcatataaaacaaggaatagcaaggagtggtttacmtgaaggctgtggcatgttttcacagaggactatgagtaattcagtaccaccagaaaataagttataagactagacgtggcagttcagttraaggtgacaaggagttaatatgagacacgaggttctcttgatctggcacctagcatcttaaacttatgtctgaggaataaaggcagttcttaaagggcaccgattagttaagtggtttagaatcttgaatataatttctacccaacatagagatttaagacagtagttaaggcataaagttagcaacatggaaaccagttaggaaaaatttaccacaacctaaagacatggcaatttgaaccagattttttttttttaagttttaagttcaggggtacatatgcacaatgtgcaggtttgttacataggtaaatatgtgtcatggggtttgttgtacacattatttcatcagccaggtattaagcctagtatccattagttatttttcctgatactcttcctcctcccaccttccatcctccaataggccccagtgtgtgtagttcccctctatgtgtccatgttgaaccagattcacggtacttggaatgcatatgataaatatttagaaggtaaaacatcaatagacctggatattcaaatattagggatgtcaaggaataaaataaaaccaccagaggtttaaaaattacaaaattgggtgctatggtttgaatgtttcctctaaaactcatgttgaaatttaactgtcattgcaacagtattaaaagataggacctttaagaggtaagacctttggctgggtgcggtggatcacacctgtaatcctaggactttgggaggctgaggcaggcggatcacctgaggtcgggagttcaggaccaggctgaccaacatggagaaatcccgtttctactaaaaaaatacaaaattagccaggcatagtggtgcatgcctgtaatcccagctactcaggaggctgaggcaggagaatctcttgaacccgagaggcagaggttgcggtgagccaagattgcaccattgcactccagcatgggcaacaagagtgaaactccatctcaaaaaaaagaggtaagacctttaagaggtgattaggtcatgaggactttttcctcatgaatagattaatgccattatcacaggggtggactagttagcccaagagtttggccctctttttctcgctgtaccttgtgcactctcaccttctctcaccatgtgatgccttccaccatgggatgatgcaacatgaaggatttcaccacaggcggaccctgaatcttggacttcccagcctccagaaccatgagccaaatttattttgtttataaattgtccagtctcaggtattctgttctagtaacacaaaatggactaagacatttagtcgattaacttcctaggcaaaggaaagcatgcctttgaagaaatgcactgatttcttcactgagagaaaaaaatagtttttaaataccaggcagcaggtttcatagtggttatactaattgaggattaaaaactagcactctggctaacatagaatgaatccataggtctgacaaggttggtttactcaattcctattattcattggtgaggaaagcatcatcagttaggtccagtcagtgtttggcttaccaggggcactcaaacagtgtggttttagttttttgaaaacaaaaatacttcatctgtttacagacagttgcaatgacgcacaacatttagttttggtatttcttaggcaagtgttgctgtacttaaaacatcttcctttggtaatgagggcactggggaggaggacatgggggaagggaaggtgatgaaagcattgaagatcctctcaggttactgccttacatgatgaattggataagaataccattgactgtggtcctgaataccaaaaaaaaaaaaaaagggggggttatgggtaggcaggtgatgagaaaaaaaatcagacatcttggccatagtgaatttgaaataccagtgggatagacaagtctgcaatacagaggctctaaagaaaggcttgagatacagctctggcagccagcattgctcaagaggagcatgaagaaaggcagtgagcgaagaaaggcagtgggcaaagaaagattgtgatggttaattttacatgtcaacttggctgggcaaacaatgccgggatattcagtcagacattattctggatgtttctctgaaggtgtttttggatgagattaacatttaaattggtggactttccctccataatgtgagtgtgcctcatccaatcagctgaaggcctgaattgaagaaaagaccaactccccccaagcaaagaggaatctggccagccgatggtcttctgacttgaactgcaacatcagctcttccctgggtttccagtctgaaggaattcagacctgaactgtagattttggacttgccagcctccataatcacatgagtctattccttaagtggctctacatacacacacatcctactggttctgtttctctgaagaaccctgactaacacagacatctatccctcagccttttgctatttacattaaagtaggaaagtaactattttcgggtggaatgaaaacatctttcctttcctgaaaggaatagagatccttgacagcaggaaatacatattagtcaagcttataccacccatccctaaccctgcccctcatccaggatatggagaaccagttttctgttgctcataattttaactctagtgatactgacactagataatgactctggtgataggactattaagtctcctcctgactggccatcagacttcttctgagggaaaaaaagagaccctatctctaaagggattgatgaaagaaaatagggccagcttctccatatcttgttcctgcaaaggtaaggcatagttttgggcactgtcctcttgaggagaagttttagcatctccagactcattctgtttcataaggctaacaagaaaccctgagtgggcatctgcttgagaatcactgacctagggtacttcttttcaaactctaacatgcatatgaatcacttggggaccctgttacaaagcagattctgattcagcaagtcctgagtagggcctgagcatctacatttctaggaacctcctgagttatgcctattctgtcaattcatggtccccagtttagtagcaaagtcctaaagagcaggaagttacaaatgcccaactgacttctttacaaaaatcaggatagctttttgaagaattaggcaacaggcttcacgtggcccagtggagagctctgagtaataactgttctcttgatagttgtcttctgtgcgcacatttattttgggggaccttacagataagagtaacttgttaaggactagtctcttgtccatcagaagtgagaaggggagataaggtatgtcagcaattcctcatgtgtcttgtcttcgtgaagttttttctcttttttatttttccaagactgagtcttgctctgtcacccaggctggagtgcagtggcgcaatctcggctcactgcaacctttgcctcccaggttcaagcaattctcctgcctcagcctcctgagtagctgggattacaggcacccacgaccatgcctggctaatttttgtatttttagtagagatggggtttcaccacgttggccaggctggtctcgaacacctgacctcgtgatccgccagcctcagcctcccaaagtgctgggattacaggcgtgagccaccgcgccaagccctgaagtaatttttataggtttaaaactatatacacagaggcctggctattatgtgcttggcctcaccctctttgaccagcactagatattgctctcaatcagggtctctgccggtttaaacaaactgattgtgaaaagttacagttagcaagtagcatttgtaatgaattcccctcctcctggttcaacatctaaatgtaaacatacctctattattttccatcagtactgtcactgacaggaatagaaccccacaaccattatcccattacatttatttttcttgctaatgagtttgcactagcagcaacggtctacccaggatccaacttatgtccctggttccactaataccagatccaacttccattatgtgtgaagtcacctttccaagctacaggcttgcttactgcctgtgggatgttgggaacttaggagactggatgttttgaacctacctccagtgaaatgttctattgggatggatatgatttgacgcactgtggaacgtgctccaggagagggatccacttacctgaaactccacatttttatgaagaagtagagaggagagagggaatatccaaccagtcttgtaaacatcaattaaaattccttgagctcacagagtcagaaaaatatctttctgataggaggaacatgccattctcaaacatcaggcaggcagggaagtttgcacacccatgccagaaccagctagggaaacagcatttcctaagctacctatggtacaggggaggggagctacttacagtggatgagtgggtggctggggggtgggtgtgcaaagggaactatctataggggtggggcaacctgggctgtctaatagacaaatgggcttatgtctgtctcctctaaaagctattttaagaggcccacagtgtatacacaacctctgtgggatggtataattaatccataagtaattaaagaacatgagcctagggaagatagcttcttaaaccaaaacatagtggggcagggtggaaaccaatgaaaaaagaattgaaagaaaataaaggactaagaaaaaccaacacctgtcatgtcttgactttaggaatcagacataagtgagcggagaatcttagttctgtccattcaaaaccaattcagcaggcaattaaagctttagagatagcatagacacatctagaaagagttggaatctaacagaacatgaaccaactcaagaaaacacagaaactatcagagtccaggctgataccataagaaaagaaacaaggtggctctaaactggagagaatgctgtacccagccctgccccaacttgggagaaggttgactaactgatcttgttttaaaatataggagtaaatatttgatagacttggaaaacacacaaaaagtaagcactagaggtaaggtaaaattatcccaaatcccgcaactcaaagagaatttgtgttagatttcttctgctcttttccttaggcacattattttctctttttaaagactgggattatgatatataacagtatcatgcagtactatttgaattctaaaacttttgtgaagtattaaataattaaaattgaacatagctgcaagacttatagtgaaaataaacaggtttttcttccatgctccaccttaacatttcataagtttacttattatagaagatgaatattagcactcttatataataccagtttctctctcttttaatgttatataggtttctggttaaaccagtatttaatatttacctttatgattactatgagtcactactaagccaagtggtacatatgattatgagtccttgttgatattcttctacctcattcctggaatttgcctggcttttcttgttttttatcatcagttatatatttgtataggttcaaaggaaataatttggaaattcaacatgtcttacaagacttacaattttagttatcagtcattagtggagaaaaacctttttgaactaaaaaacactactattatattgcttcagctttgtgtattgaaacagatgcctataggttctcaattctttccagaatttccaagtccccaaaaatattatttgatgatgtattatacacacttcaaagccccatttctcttatactaaatgtccagaagtagacatgttttcaggagatattgatgatgtactatttgtcaacaggaaagaggaagagaaggaaggaaggaaaggcaggtctttttcttgcttggcattcattttcaacatttcttctttctgagagatttcttacattcacctttccatcaagacttaagtacatgttctgagcaatagtcctaagtgcccaagtggagatgtctgctcattactgagtattgggtcaatggcacttccttgagtataccagtattttctggatttttccttaacagcttctgaatccaagttccaaaacactaagaaaatctgaagcctttttgtgcatttttgtgcatctacctcaaatgaatcttcaatttttgaatcacactagcaattgcctgattcactttttgctttacttccagcaaaatcatttttaatttgtaatcttttttccaaactcttcatctctgccatttgcaaacgtctggacattcccttttatcccatactgtggcatcaatactcttccctttttcccctttcactttctttcaagattggctggagttgcatggttttctcttccttcttcccttcattttgcagtcttctaatttgatcttcaagcagaagctgcataatttcctatggaacaggacaatcttttcatgtacactaaaaggacagtaaacctcaggatattttgcatgtttggatatgtatctgtcatacttgagtactaaagccatggtcacatgtattgcaagggagtagaatacccttttttcctattttctactggagatattaaaatcattgcaatctatgtcttgttttccacaaaaaataagcgatttcaatatcatagtactggggacagtgtcctgaaatttccttttcctcagcagaagtattacaagcctctggatgaaaattgggaatccgggaaggctgtaaaacaaggagggcactaggtgcagaaggggcagtgcccaggggaaaggctgggcatcaagaaggtgctacacctctgagaaaagtggtagaggtggtaaggatagaagctgctgcagcgttgctcagagcatccagttgtccaacagggggacagtgctgtccagaggccccaacatgggtgtcaaccgtggggttgggtgcagcaaccatatcatagaagggatgaaaaactagctgcgtcagctataggacttgccagcttgggaaactcacccacaaatgccttttttgtcttatttttcattacctcactttcctatctattattaattcttcacgttctataatagaactctgaaactcttatgaatgctactttctacataatcaaaatctaatattttatcatggggaaaaaatccatgactgggcaattatttttatttttttattttgatttatttgatatgaccccagatgcacaggcaacaaaagcaaaaatagacaaatgagactatatcaaacttaaaaagcttttgcacagcaaaggaaaccgagtgaagagataatctatggattgggagaaaatatttgcaaactgcacctcttataaggagttaatatccaaaatatataaagaaacagattcaatagcaagaaaataaataacccaatttaaaaatgggcaaaggacttgaatagacatttctccaaagaagatatactaatggacaacaagtatgtgaaaaagtgttcaacccaactaggaaaatgcaaattaccaatacttaggaaaatgcaaattaaaaccataatgagctatcatctcatacccgttaggatggttattgccaaaaagacaaaagagcaagcgttaatgaggakgtggagaaaagggaacccttgtacactaagaatgtaagttagtacagctattatgaaaaatagtatagggttttctctaaaaaaactaagactagaattacttatgatccaacaatcccacttctgagtccatatccaaaaacggaagtcactgtgttgaagagatatcttcactctcatgttcaatgcagcattattcacaatagccaagatatggaatcaacctaagtgtctatcaacagatggatggattttaaaaatgtggtacacgtgcacaatggaatactattcagcccttacaaggaaggaaattctgtcatttatgacaacatggatgaatctggagaacgttatgctaagtgaaacaagccaggcaaagaaagaaaaatactacgtgatctcacttccatgtgtagcctacggaagttgaactcctggaagtatagagtacagtgatggttaccagaggctgggagaagtgaaagagagatgggaagatgttggttaaagggtacaaaaattccagttaggcaagaagaatcaggttgagatgtattatgtaaaagtgatagatgtgaggtgatggacatgttagcttgatttaagtatatcaaactgatacctatacttccatgtctactgtagcactattcacaatacccaaggtatgtaatcaacgaaatattgatcaacagatgaatggataaagaatgtggtatatatacacaatggaatattacttcgtcataaaagagaatgaactggatggaactggaggtcattatgttaagtgaaataagccagacactgaaagacaaatacggcatgttctcatattttgaagctaaaatagatctcatggaggtagaaagtaraatggtgattaccagaagatgggaagggaagaaggatggtagtggatgaagagaaattggttaaagggtttaaaaatacagttagatagaaggtataagttttagtatttgatgatacagtaggaaaattatagttaatgataatgtactgtatattacaaaatagctagaagagaagaattataatggtcccaacacaaagaaaagataaatatttgaggtgatggatatcccaattaccctgatggatcattatacattgcagacaggtatcaaaatatcacatgtaccccccaaaatatgtgccaattaaaaatgatgtttaaatgtaatttatgcatatcttgttaagattttaaagaccaaaaacacccttcagtgttaaactcaagagacttttcattattttaatgcaattcaattgtattaaaaggaaagccattaagtatccactatgtgtaaagaattatgctcccagggcaggagatacagagatgaataaggcatagtcctggcccaagaagggtctttcatgttactctcaacaagcaaatgagtaacctatcaaacgaaagatctataataatcataatgttgtattccagcaaatgattaccaaaaatgtttttcatgatttatagtgaaaaagccatgttttttgaaaagctggcagaaaatacttaacaatttagaagtatgctgcaataagtacaccttcaacttattacaggtctccacagagtaacagaggttctgggggtaaagataggcataaccctccaacgaccaataaatttcagagttaaagttatcttttttagaaagcaatgtatggcctaatgcagtttactttacatccaaaaattagtttgatttaatcattccatgatgtatacttatatcaaaacatcatgctgtgccctgtaaacatatacaattatcaattaaataaaatttttcaaaaatgatttcaaaaaaatctagtgttttgttttcttggaaccacctctcctacagccctcagtttttcttccacagctcactggatgttgatctggtaaggtaatgcaagcttgttagagtcccaccaactgtcataccaataggttttctctaggaattttgcttttggagatgttgagcaagccctgtctccagtgtgggatggaagggaagagaaaaaagccccatggccagcatttttagggtgagcttgagaaaggattgtgagtctccccactcaattaggaatatcttcatttcatcattcctctcaatgtgacagttgaaggatcaactcctattgtgtttaatgccctgaaatttagagcttctctggtacaatgtttcctcagaacaagcctccagattccagtgccattctgggttaagtggtctccaggatttataggagagggaaagggggctgggagattaatgagttcattatacagactttttaaacgactcctttattttcgccactacgactcatcttctgaggtacagtatcttgtcaagcattttcttgtcagcagaccaaatcagaatacttttcatggcatcacctctgccaacacttgctattagaaaggagacagaggagctgataacatttctttcttagctttcaaagatgtgttgatatttttccactgttgtctcctctcccatcttctttctgcctgtttctttacagaaccaaattaaaatgagaagcaggaattctttaaaagtattaacccccaaagacaaacagttctaatccaatatgtataagcataaatctacccttttccttgggttttgtgagctttaacctagcaaaattgttttaacttaagtttgtattttggaatacaaacagcttgacattttacttctcaaattagtatatttactgttcctccctcttcacctctcttttctcaaacaacctgattgttattgattaccttgtccttcttagctttaacggtataaaattaaatataaatgctatcgtagcaaacaatgtgacctctcagctataaaagatgaggaaatcagcatatgtataaaagctgataatgtagaaatgaccattacttcccagcatccctctccttttcattctatgtttattggttacaaaatagaatgtgaatgtccaaatttatttgaaacaatctttcaagcatatttgatttcgtaagttcttttagcatagttttttcagtaattttatctgattgaatttaatgtttaatatttctaaggaaagggctcattccctgagatctagaatgctcattaaaatatatttataggtatttcttttgttcaaataagggcaagcaaagtactcaagaaaataaaacatgacccaagaattttacatgcagcaactactcttcaagaagaattttatatgcagcaactactcttcaagaagtagtgaatattgaggaatgaaggcaatctttttatccagaaagcttttaaactagaaggccataccatgacctaggaagattaagtcattatgttttaatcatgaacatcttatgtccaaaacaaaaatgaatctttgggcagccaggcaaaagactgtcattcacaagagaaagagaaaaaacttgaagctataaattaatgcttaatttgaaaccattaaaagtactgaatggtggcccagaagtaaagggataaaaagaatttaaaaggatgagtgagaaaagaaataggggagctccaaaacatgcacaatttcatttctttcttatttttctttcctattccttgctataatttcagcaatgcctaccttcttctacatttcctcttaatttgtgtatttttcttccatttaaagtgtgagctggtagagctcagaaagtattggctgggcacagtggctcatgcttgtaatcccagcactttgggagctccgaggcaggtggatcacttgaggtcaggagtttgagaccagcctttgcaacatggtgaaacaccgtctctactaaaaatacaaaaaattagccaggcgtggtggcaggcgcctgtagtcccagctactcgggaggctgaggcaggagaatggtgtgaacccgggaggcggagcttgcagtgaaccgagatcacgccgctgcactccagcctgggcgacagagcaagagtccatctcaaaaaaaaaaaaaaatacaaaaaattagccaggtgtggtggtgcgagcctgtaatcctagctacttgggaggctgaggcaggagaatcacttgaaccccggaggcagaggttgcagtgagctgagatcatgccactacactccatcctgggcgagagagcaggactccatctcaaaaaaataagaaaagaaatatgggttttcctgggtcagtatattttccatgagctcttatacatctacttttgctattgttttagagagataattgctttaaattttctttttaggataacatattttagtttttattttctccgtgacaatatttttcttgtattagtctgccacaaggtattcctatgaatttcctgtattttttttttcatctctaaacaggtcatgtgctgtttccttttttttttttttttttttttttttttttgagagggagtttcactctgtcacccaggctggagtgcagcggcgcaatctcagctcactgcaacctctgcctcccaggttcaagcaattctcctgcctcagcctcctgagtagctgagattacaggcgcatgccaccacgcccagctaatttttatgtttttagtagagatggggtttcgctatgttggccaggctggtcttgaactcctgacctcaagtgatctgcccacctcggcctcccaaagtgctgggattacaggagtcagccgctgcgcctggccgctgtttcctttttaattactcatctttagttcaraaaagcttttttctgccagtcaaaatcatttacagatttatggtggatggggtaggccctgttccaaacaaggaaaattttatccaatggatatagacttagcataaggaacacctctatgagtacctcttctcccaacagccacatggacaaaatgtggcttgtctgtgtgcatttctgttcagcttcaccaacttttccctctaagaaccaggaaacctttggcagccaggctgtgtttcccatttctactactgccatcaaggaatttatgtttagggtgtgtttatcaccttaaagaaatgagttttatcagcccttactgaaatctacagccacacaaattctctttccatttcctcccatatgtattccagtttgattatcactttgggcactcattccactcattttgtggtttgggtttttagtgaaagcagaagtccactaagatggaacacatttctttttctgcctcctggggtatgtctggatgatttccaagaggacagggaaatgctaactttacacctacatcttcagaccaaaatatctccagaacaggaattcttgatgatcttttggaaggctgaaataatacagggttcacaggtctcttcctctcatatatcctcacattttacccagcttctacagcaaagcaagtaccagagaaaacgaatgtctatataatccagccaagcttttgaattaagaatttttctttggtttatatatgtattttttagagaccttgaggaagcaagttgttcaggcaagggtcactttggggcagggaacccatatacacttctttccacttagcacacttaactgccatcaaaattctgtatgtctttacaacactgaatcatataacatctgatgggattgtattctcacgaaatttttcctatccaaagaagggccaggaaggaaaaagattactgtactcctgactgcaaggtcttcagcattcagtgatattacaggatgttgcaggaactgtaccctattataatgggggcaattggtccctaaatggatatcatgttggggatgcctaaggatctgggttcatcaaggtttctggtttccaaacaaaattcagtcactatttgaacttctgcatgtcacactagatttgaagaagaggaaagtaccttgtctatttaagctaaacaggcctgataagaggtcacttccaaaacagaatgtttctgaagaaaagtcttttttttttttaattttattattatactttaagttttagggtacatgtgcacaacgtgcaggtttgttacatatgtgtacatgtgccatgttggtgtgctgcacccattaactcatcatttagcattaggtatatctcctaatgctatccctcccccctcccccaaccccacaacagtccccagagtgtgatgttccccttcctgtgtccatgtgttctcattgttcaattcccacctatgagtgagaacatgtggtgtttggttttttgtccttgcaatagtttgctgagaatgatggtttccagtttcatccatgtccctacaaaggacatgaactcatcattttttatggctgcatagtattccatggtgtatatgtgccacattttcttaatccagtctatcgttgttggacatttaggttggttccaagtctttgctattgtgaatagtgccactataaacatatgtgtgcatgtgtctttatagcagcatgatttataatcctttgggtatatacccagtaatgggatggctgggtcgaatggtatttctagttctagatccctgaggaattgccacactgacttccacaagggttgaactagtttacagtcccaccaacagtgtaaaagtgttcctatttctccacatcctctccagcacctgttgtttcctgacttttaatgattgccattctaactggtgtgagatggtatctcattgtggttttgatttgcatttctctgatggccagtgatgaagagcatttattcatgtgtctgttggctgcataaatgtcttcttttgagaagtgtttgttcatatcctttgcccactttttgatggggttgtttgtttttttcttgtaaatttgtttgagttcattgtagattctggatattagccctttgtcagatgagtaggttgcaaaaattttctcccattctgtaggttgcctgttcactctgacggtagtttcttttgctgtgcagaagctctttagtttaattagatcccatttgtcaattttggcttttgttgccattgcttttggtgttttagacatgaaatccttgcccatgcctatgtcctgaatgatattgcctaggttttcttctagggtttttatggttttaggtctaacatttaagtctttaatccatcttgaattaatttttgtataaggggtaaagaagggatccagtttcagctttctacatatggctagccagttttcccagcaccatttattaaatagggaatcctttccccattgcttgtttttgtcaggtttgtcaaagatcagatagttgtagatatgtggcgttatttctgagggctctgttctgttccattggtctatatctctgttttggtaccagtaccatgctgttttggttactgtagccttgtagtatagtttgaagtcaggtagcgtgatgcctccagctttgttcttttggcttaggattgacttggcaatgcgggctcttttttggttccatatgaactttaaagtagttttttccagttctgtgaagaaagtcattggtagcttgatggggatggcattgaatctataaattaccttgggcagtatggccattttcacgatattgattctttctacccatgagcatggaatgttcttccatttgtttgtatcctcttttattttgttgagcagtggtttgtagttctccttgaagaggtccctcacatcccttgtaagttggattcctaggtattttattctctttgaagcaattgtgaatgggagttcactcatgatttggctctctgtttgtctgttattgttgtataagaattcttgtgatttttgcacattgattttgtgtcctgagactttgctgaagttgcttatcagcttgaggagattttgggctgagatgatggggttttctagatatacaatcatgtcgtctgcaaacagggacaatttgacttcctcttttcctaaaagagttgggaggatgtgggtgggaaagaaaaaaatgaaagatgatttcctaaagttaatttatcttctttctgggaaactcaggttaatagagacccattaaaaacaaacaaaaaacttaaaggcaaaggcttatgtgccactaatttttaaggaaagtatcatccaacagaaagaaaggtaaggagggaaagatgaggaaggcatattactaaatttgagcaactggttctatgagattgccctgtttggtatcaagagcaactgtcttcccagaggctgtataaagagctacttctcagagcagtgtgcttgtggaaggaagaggaagaatttgtctgccagctgcctctcattgcttaaaatttcagcccataccaaatcatctctcctgtgctattctgatccttctaggcctcagcatcaagcatgccccgggagcwagagataagcactctgtggcttaggtatagagctgctgtcaggttgcacctgcatgaagttggaatccatgtagatttcatgactggccgtttgttccagcaayatctgctgctgcaaaggcaacataatgataaaaggatcagtccatccagaagccataacaattttaaattgtatgtaccaaacagagcctaaaaatacataaagcaataactgatagagatgaagtgaaaaatagacaaactcccaactatagctagggactataacactccctctcagtgactgataaaactactagacagaaattggcaaagatatagaagaggcgagcaattcaaccaataggatctaactgacatatatgaaacacaccgctgcaccacccactagtagaatattttttcccccaaatgctcaaggggcattcaccaagatagaccatatgtatggccataaaacaaatttaaaagaatgaaagtcatacagagtgttgctctccaaccataatggaatgaaacttaaataaaacatggatgtctctaaatatgtagaaaataaacatacttctaaataaaccatggataaaatatgaagttaaggcaaataaaaatacacagaagttaatgaaaatgaaaatgcaatatattaaattgtaggtgatgcagctcaagcaatgctaagggagatttatagcactataggtttatattagacatgagaaaaggtcttaaaacagtmcaacttgttacctcaagaaactggaaaaagataaagtaaacccaaagcaagcagaaggaataaaacatcagcagaaatcaatgaaattaaaaactagaaaacaatagagaaaaaaacaagtgaaacaaaaatctggctcttcgaaaaaagtcaatagaattgataaacttctaacaagactgataaatagagaaaagatacaatcacmagtatcaggaataaaataagagacatcaatattaattttgcagctatcaaaaagataacaagcaaatactacaaataactttttgttcatgaatttgtcaacttagaagaaatggatcgatttytcaaaagctactaaaactccatcaagaggaaatagataatatgagtagctgtgtgacgattaaagaaatcaaatttataatttaagagcttataaagaagaaatctccaggaccaaatggtttgctggggaattcaaccaataatttaaagaagaattaacaccagtatttcacaatctcctccattttatgaggccagttattacctgatacaaaaccagaaaaatgcatgttctgcatttatggtcattatgcttcccatgttaagtgaaaccgttcgtttcctaaggctgctgaaaaaaaaaaaaagcaccacaaactgggtggctttcaacagaaatttattctctcacagctctggaggctagaagtctgaaatagagatgtcagcaggatcatgctgtctctgaaggttctaggggagaatctgttccatgtgttttgttgtcttctgatgttagctgcaatccttgctgatacttggtttgtagacccatcactctgatctctcttgttatcacttggcattctcctttgtgtgtgtgttttccttctctcataagaacagtcattggattaggactcaccctaatccagtgaggtctcattttaacttgattacattttcaaagaccctatttccaactatattcaattcatgggtgccaggagttaggatttcaacatacttttctgggggacataattcaacccacagcaccatctgaataagtagaacaacatttgaagaaawgctttgtttaatgtgatttcattaattaaaaaaagaggcacagatagttgatgccaaatttaaagatttacttttaacagaaatcacatctatgtaaccatgataaacaatcaacatcctccaaaatgcaattacaaatgcaatcctgttatcaggagcaatgttactgcaagcaaaggaaatacaaacagttgtccaatttcagttgctttatctatggtttcaatgattgtttacaaccatttacttgcaatgcctgaatgtcatcaaaacaagagactgttcatgaattcctttcattctgaggtggttgaactgcaggcatttactatctcactccctccttcatagactcacactttctcatcttcacccaccaagcagcaagtgtatctatcagtcaaacaggaaaacagaagccacttcaaggatttgcaacaggtgaaatttaacacaataaattgttcacaaataacagagtaaatgaaaggaaaaaaagtggtgaggcaacgtagaaatgaggaaaaaccggaactgactacaattcttawcctagaaggtcaaaggaaagaagcaattctcagagcccagggggagttgaaagaggctggaaacatagcagaagttgggtttcaggaaggaatggaaccattgccaaagctgtacctaaggctaagaaggcgatggagagagatcctaacttctccccaccctccaatctgatctctgacccttgtctcctattggtcaaatccagccagaaatcacctttgtagaggccaagggaacgcagctttatgaggaagggcagagcaagaaaagggcaagaagtctgttgggaaataatgcccgggtcctgcacatcttactcctctcaccaaactttactcaggcaactcttctaccagtgacactttttgtattgcctttttattggcatgtatgatgtctaatattctactgcttatgtgtttgctgctatgtagaaggaagatagctcatatttgttgaaccctgaaaacaaacatacccagctaatgaattcattgttaagtaactaggaatcacagtttaatatgctattatacaaaaacctcttgtgaattgctataggtgtttaagagtttgtttttgttgttttttagtagaatttagaggaatggattaggatctggaaatggaatgggaacacatttttyttatttaaagtaatagctcctgcatttccaaaattctctgccaccaagttttgggaaacaaattaagagtcagaaattaagagatgcatggacttgcctaaatctgctaacaagtttttcaaattgggtctgtagagtcctctttctaactcttgatttatattttatttcttccaagattttagagataacctatagcctagacattttctacttggatatatgctaagccttgcttttttttttttttttttttgagacagagtctcgctctgtcgcccaggctggagtgcagtggcatgatctcagctcactgcagcctccgcctcccagattcaagcgattctcctgcctcactttcctgagtagctgagactacaggcgtgtgccatcatgcccagctaagttttgtatttttagtagaagcgggggtttcaccatgttgcccaggctggtctcgaactcctgaactcaagtgatctgcctgcctcagcctcccaaagtgctgggattacaggcatgagccaccatgcccagcgaagtcttgcttttgatcactatttataaaggattttttgtatcagattcatttaaaacatcagtaggcaaattaggttaccgaccctattatgagttagatcatcactgccttgagacctagatctatttgaaatttttttaaaaggttacaatgttttctgctgtgaactcctgtcctcaagcaattctcctgccttagctttcctagtagctagaactacaggcatgtgccgtcatgcctcgctcttgttactgaattcttacattcacatataacttcacttaggatggaagagtgctaaaaatagtaataatttttatttcctttaaatcaaagttatacaaattaagagaaaaataacgtgtttgggtaggacatttattctctgaataatgtcctttatcatgtcatawgtttaaaaacaaagtttatggaaagaacagtgatataaaattttatatatgggacaaagccaatagagtcatcattcttcacgagaatggtgatcctgatactaggaagccaggaatattgcagacattgcattccaatcacagccttgcctcagtattctatgatttcacaaaagtgagacaaggggccagtgtcagtagtcccctctctgccaacacaactgataatatcaaagagaataaacgtagcagcaagaagggtttggcctccaggcatgtcaaagaagttacagaaacacacatggaaggccctggttcaaagcatagtatcaaacacctgaaagcaacatgtggcaacttgcaaggtagctgctggttcacaaattggacaccaatacagcagtgggagaggaaggatgagtactcagtggagagactcttccaaacaaaggctaaccgcatcttctagggatcatttggtgggctagtcctaggtgggctcaggtgctctatttaagaatcatagcacaattacacagccattttcaaacactgtgactacagygccaccaatatgacacctttcaagccccatacttgaatttctacagctgggttaaaagccatatcccacactaagagggtgtgacatagtcttggccacagactgggttctagaaggtgagtatctggaaaatgtggtcaaactaactgccacagaacatactttaagaagttgagtaggaatatattaggggacaaaaaatgtcaaaccctagctttctgctaatatgtagttccttgctccatagacctcaagtcattttcatgtgctagggagaaagatgactaacacagttatctgcctcttaagagttattacatctagtaacagactctattatattgtattttaatgttggaatatgaagtatttaccaagacctgtggcaatacaaaacaaatgtgtgacggtactgcatgaagtagagggtattctggcacttgaggtctatgcattctctaaacatgaccaaattgctcaatacactgccgggtattatctagtacacccttaggtgttaaaaaaaagtctcactgggctattcatgctcagtaatatgagcatgaaaatgagcaaggatatgacagctcaggctgtcataggatccagaatttacatcaaaaaaactagacatttagaacagtacgtttccatattatatctcgggatgtgatgcaggttttcccaaggccctgtggagctctgtctgaagcacgaaactacttgcagggaacagaagaaagccttttggtgaggacaaaatattgcctaataggttgagcaagcccaagacaaatgaacatagcatgactcctgagaaatgaggtacctcagcttacaacactccaaactttgggatcctgttccttctcaggtgatagaagattggcccatgctataaaatcccaagtattccttcagagtaagaagcaactaacagtacttgaggctaacagtggatattcaacttaggtgattaatttccttagatcaagacatcccaatattccaatataaaaataaaaaacaaaataccaatgccaatttcctggttttgacattgtactagagttatgccaatgctactattaggagaaatggatgaaaagtacatgggactctctgttctatttttgcaacttcccaggagtctatgattacttaaaaaatgttttttgaagtaatagagtcagagatcttgcccaaagtcatagacctttcaaaaacttataattagatcctaggatagaataacttgtttgattaactagccttacgaaacatgctaccacagtagagatcaccttgacccatgagctacaggccaaaataagcgatctattacattaggggttcttaagttgggggtctgtaatatccacgaggtgtttcagcttgatttagaaagcatttatctttatttttagtaacctccaacttaaatttaatacttcctttagctaatatattcaaaccacagcaccattagcagaacctgtgaattgtgaatttgtcacaatagaaatcagctattttcatttcacattaccttgttgcagatttcaaattacaacttgtgcttatcattatttcaaaactatggtagtaaatagactggccaccagatcttatatgactgctttctttgtgtctacagacagtaaaacgtagtcgctcaactctgcgtcagtaagatattcagctactaaacaacaaaggagaaagttatttcatgggtaatcgaggcagtcacgttgctttcgagtactccctatctacatttttttttttttttgagatggagtctcgttctgtcacccaggctggagtgcagtggcgccatctcagctcactgcaacctccgtctcccaggttcaagtgattctcctgcctcagcttcccgagtagctgggactacaggtgtacaccaccatgcccagctaatttttgtatttttagtagagacggggtttcaccatgttggccaggctagtctccaactcctgccctcaggtgatccacccacctcagcctcccaaagtgctgggattacaggtgtgagccactgcgcccagctacagttttttttttaatctattcactaaaggtggcaagtcattctcattaagttgttgcaaaactagcactcaaatgagagctcttaactctcaaatgagagctcttaactctccataaggcagcatgactttcataacagagagtacatagactacaagggtggaccaggcaagttcaaacacatctaacagttgcagtaacttcaaataatacgtttaacagttattactaatagattaaacaatgatgtaggtaggtcatgcacagggtaaacatgaataacaagtgattttttttcttcttatactctttttgcacactgttaggaaataaagctatatacaaggcacatacaaggtattttatgaggggcatttacgtattattctatgaaaacaccccacatttaaaatataacttttgaaggaaaaccagtcacacttgtaaaccattttcctaggaaggcacagaaagctacataactgcaatgctggggggagtgtcttaccacgatgaagatgcaagttcatttctttgaggaaggatagttgtcaacacctggaaacaccgcagaactttttcagaaagtcatttttccttaaaggcaaaattcaatcatggattcataatctttttgtaagtataaaactctgtcaaagatcttggcctagccaaagatgacctattgattttaaaaaataatggctctgagacacaattcacatatgaaaagaataacccatttctgctgtacaattcagtggtttcttagtatatttacaaggttgggcaaccatcatccctatctgatttccaaacattccatcacccctaaaagaactcccatacccatcagtagtcattcctttctcccagcccctgaaaaccactaatctattttatttctatagatttattctaaacatttcatagaaatggaataatccaacacatggccttttgtgcttccttcacttagcatgatgttttcaaggttcgtcccttttatcaccaagtaatattccattgtatagatatgtcagattttgtttacccattcagttggacatttgggttgtttctaccttttttggctattaggaataatgctgctatgaacatttatttacagagttttgttagacacattttaaattctcttggtatatatctaataatagagttgctgggtcatgtgataattctatatttaatattttaaggaactgcctaactgttcttcatagcagtggattagatgaagccaaccccacagattctaggacttcagtgaagacagggcagctctgcaactgagctgactctgaaaagactagcactgcagagaaaccaccaggtcagaaatactggccctataatctcaaacagtaactgttctgatgctccagtgcccatgttgctttcatcctagaccatttcatgtcaatcccacccacttgtccagctgttctgttcagttataactaaatattgaaatgcagaactcgaagtccatagggaacagaatagcaacattcttcaggtcccagcttactaaggaaggggaacgtggagcagacccatagctctagtcatgaagtctggtaacccacagagaagccatgggatttttcatcacaagacgtgctctatgcatatgtatgactgggcaatggcactggctcaattattaagtccaggaagaagtatagtaagtcttctcttaacatcataaactcttagaaactgtgactttgtgcaaaacagcatataacaagaccaatttgaccataggctaattgacataaacaagaattaagttcccacagcatgcctctggtcacaaaaaacatcaaacttctaaataaagaccaaaacacttctaacattaaacactgaaataaatgtgagccatacatagaaagattaacaaaaacaaggtaattatttacctgcttattccagtttggaatcagttgaccagagcctgtcctggcagctgaaggcaccagggaggaactcactgtagacaggatgccatcccatcacagggcacactcatatacacacccactcacactgaaaccatgtagacacaccaattcacttcacatgcacagctttgggatgtggaaggaaactgaagtccctggagaaaacccatgcgcacatgggaagaatgtgcaggctccacacagacagtggccctggctgagaatcagtgattgtcatcaacattaaaacaaaataatgttgaatgaaatgacattatttgaggacctactgcacatggagtgagggagattgggacccagcccaatggctgctcaacctctaaataagtagattttagaatggctgcttctaaataagtagatttgagaatggctaaagttcagctaccttcccctctccacacacatttgcacctacctccactgaacaggagatggggaactgcaaccagctatgttcatgctagcacttatagcggggkcatgccatgctgcaggggttgctataccatggcacccaaggctcagaaagcttttgcccctgctgctaggaagcacctggcccagtagacattgaccagcaaggccctacattgtatctcccatcctcatgctctcatttcatccttctgagaagtgtggatgagtaaacctgtctccaagccaacatgatgggtaattcaagagaatgagcatatttgtgaatcaaaccttggtccaacaggccagcagcaaccataagccacttgttgatggatagcccctgctgaggggagggcaatatcccacatgaccactcctgtgtagctacccatggataagcaaaattttgttttactttactgagactttggcattaggatccttccagctattaacctcatcagcattactacaagatccacccattattttcgcagttttgccaccagacctrtctatgtgtcccacagtgtcctgttcctcatattcaggactccaagtgctctatctctacaaatacttcaaacacagggacaagggagttgcctctacactttatataacagcacaactagcctggatcccggcagctatagcaaaaggagactcactttgggaagccaaacagattgagtttgttgacagtaacttgcagcaggggctattccagggcttggctaatggagattcaatctctgccacatgactgagatcagagtgttgcccatcccttaattgctcttgatccttcaaatctggaggtcacagatcttcagtaaattatacctctgtgataaccccagccttgccagccctcaggaaggacgttcacctgttactaaaactgaggaaaacaatatggcttgggcaataaatgaatgcccacccacagcaaggacaaaatccaaggttacagatgcagttagagcagtttacctgggcgttatcttcctgagactctgctccaagaggcttgtgtaaaatagcatgtaggtgtttaagaggtagaggaagtcacttgtgggaaaaaattgaaagtctgaatcaaggttttttagaatgacttaaagaatgaataggaaaagtagttacgttttttagtttgtttgcagacataagatgagaaataacacagaacagagagaaaaccaaaggaattgccaacagtaatctttagctttttagcagtcacaggcatggagccctagcagtgtgtggccaaggaaaggctttatatcgtgagtgaagctgtccttccaaagtttaactcatttcgttacttaagatccttaccaggttatagccaatactgagaagtttgttggagaatgccatttcccaaataaacctacrtcaagatgtattagaactttttttttttttttgagacagagactcgctctgtcacccaggctggagtgcagtgacgtgatcttggctcactgcaacctctgcctcttgggcacaagcaattctcctgcctcagcctcctgagtagctgggactacaggcgtgtgccaccatgcccagctaatttttttatttttagtagagatggggtttcaccatgttggccaggctagtctacgaactcctgacctcaagtgatccacctgcctctgcctcccaaagtgctgggattacaggtgtgagccaccacgcctggccagaacttcttcctcattcatagctgggagattaaaccagttgtgcaggaggacaggcaacttagaaagcaacctgaaacagcaacatccaacagactcaggtctctttccctgagaaagattcttaaactggtgctttctgaatgaatttttttttttctggaaaaccaactaacctattgaccaccaatcttagctcaacaggctaaaaccaccaaggacaaacctatagttcaacaaggtcaggtttattgacccattgcaataaggaagactggacaacagaggagtgttagagagcaactctccccaaaggacaaggtggttatttgagggtttgagagaagacagtataggtaagtaatgggctcaaggaaaagcagaccaatgtgtaagggagtcagcatcaaaaccagtctgcaaagtagtcacaagctcctgtgtccttgaagattacaaagttaagatagatgtggaacactgtattctgtaaccacttttctgcacctgggttaaaatgccaggctgattctctctgtcacagcaactcagaaactctaggcaagagtgggtgattggttttttgttcttgcgatagtttactgagaatgatggtttccaatttcatccatgtccctacaaaggacatgaactcatcattttttatggctgcatagtattccatggtgtatatgtgccacattttcttaatccagtctatcattgttgggcatttgggttggttccaagtctttgctattgtgaatagtgccgcaataaacatacgtgtgcatgtgtctttatagcagcatgatttatagtcctttgggtatatacccagtaatgggatggctgggtcaaatggtatttctagttctagatccctgaggaatcgccacactgacttccacaatggttgaactagtttacagtcccaccaacagtgtaaaagtgttcctatttctccacatcctctccagcacctgttgtttcctgactttttaatgattgccattctaactggtgtgagatgatatctcatagtggttttgatttgcatttctctgatggccagtgatgatgagcatttcttcatgtgttttttggctgcataaatgtcttcttttgagaagtgtctgttcatgtccttcgcccactttttgatggggttgtttgtttttttcttgtaaatttgtttgagtacaccgcatattctcactcataggtgggaattgaacaatgagatcacatggacacaggaaggggaatatcacactctggggactgtggtggggtcgggggaggggggagggatagcattgggagatatacctaatgctagatgacacgttagtgggtgcagcgcaccagcatggcacatgtatacatatgtaactaacctgcacaatgtgcacatgtaccctaaaacttagagtataataacaaaaaaaaaacattaaaaaaaaaaaaaaaaaaactaaaaggtctttgatgtcattcccccaacacacacatatccaaagaaaaaagtaaggggtcaaatatataatatcatgttcaaaataaattactgttattattgttaaaaaaaaaaaaaagagtgggtgatttaatgttactsttctaattttaaacacttaagtttctgatagtctatgattttggagaacacatttctcagtaaaaacacaatagttaaagaaggaggtgcttatgacatatacagctgcagtgacctgaaaacatattccttcctgataatgtacagctggctttatttgtatcggtgattgtaccaacttgatgaatagcaaggcagatttttaccttctgaatgtaagctaatttttactatatcacattcaagcagggcctttccagtgctcctcatttgtttgccaaatgtttttaaaaaaatgaagtatttgccaactctcattaggtctaagttctaacagtactgcaagcaggaaaacctgaggtcgttagtgctttgcaaatgaggaaacccaggataaaaagcttacttgagtcctaaccgtattggaaaggcaaactcatatgtaaacaaaagttacactagggaaaagttataaaggtaactgattgagcaagagtctagaaaagggaggggtagtcagaatagaacagaactagatgttctagttatattacaacagaaaaacctttccagtgaaaacaactggagttaaaatagttaaccctttgctgacaatgagaagccctttattattgcctctttctcggtttcattaaacaaagaaagctccacactgttagattaattttggccaaatgatttcagagccaaagacaaacaacatttaaaagtccctgacattgaaatatgattaaaatgtgagaccatttctagagaggagttagcacacaaagactccccggaacatgaagggcagtgctgatgtaacttaggctggttttgagttaataccaaaaacttgcttggctagaaaaaaataagcagtctcatttcaacttggccacttactaactctgtatccttgagaaattgcacatctaaagcttcagttatttaagccatagagcacagatcactcactgatgagtgataatcagaccacagatgcttaacaacgaagtgagaacaaaaatgggaaaactgtgagatatgaagcactgtaccatgtaaaatattattgctgatgagccaagattctggtctatttgaggcaagtgttaaatccaagaagaaagccagggaacaccaatttcaagataagtcctactatgacagaaataatccagtggtggacccctaaaatttccctcttagctctctgagtacatagtaggaaatcacttttagaagtttttagggtgttttctgaaaaatcctcttgattaagctcacagctccaacactttaaattaattgtactcagaagagaattggcatatgagggaacaaaaaacagaagccaacaagaatgtaaagccttgtgctatggttgcctcatacagtgatagtctctaaaaaacaaagtacctcaaagaaaattgtaatgtcttgtttctcatctggcccaagtggttgtgttagtcaagcagagctgtctagtttatttacttatttatttattttttgagatggagtctcattctgtcacccaggctggagtgcagtggcgcaatctcggctcattgcaacctctgcctcccaggttccagcgattctcctgcctcagcctcctgagtagctgggactacaggtccccgccaccaggcccagctaatttttgaatttttagtagagacagggtttcaccatgttggccaggctggtctccaactcctgacctcagttgatctgcacatctcggcctcccaaagtgctgggattacaggcatgagccaccacgcccggctgggagaactgtgtagtttagaactgaacggcaaatatcagagttagatgtagaaacttaatctcatttaagaataaaatagtggccgggcgcggtggctcacgcttgtaatcccagcactttgggaggccgaggcgggcggatcacgaggtcaggagatcgagaccatcctggctaacacggtgaaaccccgtctctactaaaaatacaaaaaaaatagccgggcgtgatggtgggcgcctgtagtcccagctactcgggaggctgaggcaggagaatggcgtgaacccgggaggcggagcttgcagtgagccgagattgcgccactgcactcccgcctgggccacagagcgagactccgtctcaaaaaaaaaaaaaaaaaaaaaaaaaaaagaataaaatagtttggagtaagataaagcaaaaagcatttaagtgttctttctgctaaattattctactagtactttcttccagttatttgctacaatttccatgcattgactatactgcaaaattcacgtgtttcatcttgaccaaggacaaagtaaaatcagctctttgctctcacagttaacaaaccacttgttactcaaccggactgtcaagagttgtcaagaaatgaaaacagcaaactagaaaaaggctaactagaggaagaactattgtgcctaatgaaaagatcaaagcaattgagaatgaaggagcacctacctttatgacattcagaaaacataaatggtgtttggctaccctctttatataaactgaccttctgactggctggttgaatactgactcacttttgaccttatcaaacaggtgctcccttttaatttttgttctgtgtgtcgtgtgtgtgtgtgtgtgtgtgtgtgtgtgtgtgtgtggtgtggtggtgttgttgtgttgctgttgtttttttgagatggagtttcattcttttgctcaggctggagtgaggtggcacgatctcgactcactgcaacctccgccctccatgttcaagtgattctcctgcctcagcctcccaagtagctgggattacaggcacccgccaccactcctggctaatttttgtatttttagtagggatggggtttcaccatgttggccaggctagtcttgaactcctgacctcaggtgatccacccacctcagcctcccaaagtgctaggattacaggcgtgaaccactgcgcatggccctttttaacttttggctcagaggtattcctattggaaaatcagagccattaaaagcctaatgtaggacaaactaattaaattctaataaagtttgtggtttatatcacaatgtttataccaaagtttatttcttagttttgagaaatgcaccacggtatgtaagatgttcacattaagggtagccaggtaaagggtacacaggaactctctgtattttgtttgtaacccttctctaaatctaaaattatttcaaaataaaagcttattaaccaaaaaagtctactgtattctcagcattgtgctccacaaggtgatggctagcctccaagagctggatgtattcttgctctgtcagctattcagcctctacagtcaattcagcaatataagggaattttccaggcagcatccagtacagacttctttgatgaagaggagaaacatctctaaaaacagagctttgttcacgatgggaaagaacgtgggactctgcaagacttgttactacctgcctgtctcacttccacccctagggccactggattctggagtccatctaaagggcctcaggaggactataactgtcagggaaaactttcactactggaaagcttgttagcactttcctcttgcaaatgatccttccaagaaagctcatcttctacttcattggcatgtgggacaaatgttgaagtttaatttgtaggcagggagttctccatcgacacacactgtggcactctgctttgatggctagagtgcctgcttaggcaaacctagtggtgctgagcaacatccttgacacctttgtattgaggcattcctgctaaggattcattatgatgtcgtaacaagaagatccctgtaaaagactttggtgggtattttacttggtgggagtattttgtgctagatggccttttgctagttgtttccttacagatgatagattatttactctctattggaaggttcctgcctctagtttgagatgtattaaagctaacattttctactccccttcctcaataaattcttcagcctttcttgatgtttaaaggagcattaaagcctctaggctaagctttatttatttgcaagctccattactaagccatccgtgtgactcagtgaaagccttttattgaaaaagtaaacatcttaaaccaaatcaatcacttgctttttmtcagtctatcaaaaacttcatatcattttkttgtccatcagatataggtgaaagaaagataataaaaagatatgttgaatgggggctgtggatgggaagtagaacaagctaatgttttgtagcattccctataagattcaaggagcattgggaatataatgagaaatgagcttccttccttcatggagcttacctgctcatagaggagggaaataaaaatcgatcaaacatagacattgataaagtaaatgtaaattgtcatagatgctatgcagcagacaaataaggggctgagacagggaatatggtggaaggaaggggatctctacctggaatgagttgtcagaggaggcttctctgggaaaatgatttgagctgagacctaacgaaggaaacaaccaaacccataaagattggaagaagcaatatatgtaaatccctggggtgggaaagctgctagtgaaaactggtggggttgaagcmcactgagcgaggggaaaatggtccaagattgggctggagagatgagcaggggccaagtgattcagggcctcataggtcatgggaagkaggttgggtttttttccaggtatagagggaagccatggaaaagctgtaagctaggaagtgacatgatctgtctaagactttaagaagattacttttgctgctatttgacatgatgtactaaagcagatcaagaggggagctggaaggccagtttgaagctgttgcactgctccgtacctggatgaggaagatgccartggagaatggtgaaagtgggcagattcaggatatgtcttggagaaagaaactactaaacacttccatggattagatgtatgaagtgagggaaaggaaggagactaaaataactactaagtatgacttaaatgacaggacttgattgtaagggctgtcattacaaagtaaggttttaaaaataggattttctttttacaaaagataataatctcaatttttaaaagtaaaggttggtgtctttggtttttaaacttttatgtgtattagaagccattgtagacttgttttctttgcttaagatatagatgcttaggcttctactccagccctactgaatccaactgggaagacatagggcccaggcatctgctcttataacaagctgtgaagagttctgatgtagtttgagacccactggtttaaagagaaaaacgtgagatgcacagacacaacaatttgtttaaagaatgggccgggcacagtggctcatacctgtaatcccagcactttgggaggccgcggcgggtggatcatctgaggtcaggagttcaagaccagcctggccaacatggtgaaaccttatctttactaaaaatacaaaaattagctggacgtagtggtgggtgcctgtaatcccagctactcaggaggctgaggcagaagaatcacttgaacccaggaggtggaggttgcagtgagccgagatcgtgccattgcactccagtctgggcgacagagtgagactccatctcaaaaaaaaaaggaaaaaaaaagaatagataataaaccagatttacctacaagtttattcaaaccactctttctggttaacacaaaaatagtattcagataacaatgataaagaactcatgaatatcctaacaaattgtgtttctaaaagataaattgaatgactggtaaagaggaaaggcaagcagcaattttgaaaggaaagaattatctctactcccatgattctatatttgaatcaacttgttttgtgtttataaggatatatcaggtaatataattacacacacgcacacacagcgggagagagtgatttggctaatcagtaacagatatttctgccatagtttataaaactccgaagtgtttttgataccctcaacaaaataatgaattcggtaaatattagtggagaagcactataggagggaccatagaatgttacggagtacataaggatgggaggcacgagtggtggtttacagtgatgaagaaaggcagaaagggaaaaggtatctctacaatgtgacattcatagcatacattatttccctgagtctttagagaccaccgtaagactgaagtcatatgttcattttataaatgaagatacaaaaactcaagaatattaggtactgtgtttaatcctgctgcgagtgagcagtagaaccagaatttaaaccaattatgtctggttctaaagcctgtctatgctttttgtgtgcgtgcattggcacagaaaatcaagtgatacagtcatccctcaaatttttcagcaaatacttgatggaaaggaagactgtgaaataattgctgaaagctgaaatatttcttcctcctaacatggtggacattatatgaagtctaccaggaataaatataaatttgtcatgaccataagtcagacaggcaggcaacaagaagggtatttattgtattgtgttatgtagtcactctgctgcagcattgcaaaacacagttctgctgcaagtattacattattgaggtttcctgaagcttgacctaagcctaatataaattaagtaaacatatttttttaagggggatgggtgtgaattttggtaagttaaatacaattttaggttaaatataaatttgaggagcaacaataaggcattaaatccatatcaggtttttgcttctgatgaggtattgactcccttggagatatcattcatcattcaaacatagaaagggccaagcaaattatttcaagctttttttaatatcatgaatgtggcacagccttatgaaaattaaacaattttatggccggacgtggtggctcacgcctataataccaaccctttgggaggccaaagcgggcagatcacctgaggtcaggagttcgagaccagcctggccaacatggtgaaaccccgtctctactaaaaatacaaaaatcagccgggtgtggtggtgcgcccctgtagtcccagctactcaggagactgaggcaggagaatcgcttgaaccagggagtcggaagttgcagtgagccaagatggcgccactgcactcaagcctgggcaacagagcgagactctgtctcaaaaraaaaaaaaaagaaaagaaaattaaacaattttaaatgcaaggtttcctacaattcttttcacaaaacctagaaatgttgattctttattctctacaaattactggtttccttgatctccctgtgccctaagataaaattagactttttgaaaggaaatgaaagacccttttccatgaatattcatatcaaagaacccctcacacttgcctatctatcagggtgactcattgtattagtttcttatgactgaattaacaacttaccccaaaacttagcctaaaatagcaaatgtttatttaacaatttctgtggatcaaatatttgagaatggcttagaatggttctgattcacgatctgccaagacattataatcaagatgtcggccagggctgtagtctcctgaaggcttgcctgaggttgaaagatcccattccaagctcactcaggtggctattggccagagtcatcagttcttcaccagatggatcataccatagtgttgtttgagtgttctcatgtgacagttgttttcccgccagaggaaatgatccaagacaaagagaagcaagaagtaagccacaatgtaacttagaagttataaaccattgtttctgccatatgccattgatgagaagtgagtctctaagtccagcccacactcaaaaagaatgaaattaagcttcaactcttcaaaggagaaacatcaaataatttgtgaacttattttaaaaccacgataaccactgaagtaaaaaaaaaaaaaaaaaaactaatatagttccctgtgagacagaaaaagtttctattaaatactagtggtactcttttgtgatttctaaatcacagctaagaatgatgaattgctcagtaagaaaacactatatcaggtgggaaaccatttttatacaatggtggtcatacagattactatcaggcaagctatcctagaggttatgaaacagaaaggcttattaacgaaattataaatgtttaaatcatacacagtctttaaataagtttaaaacacagagtgagaaacaagaggaaagagatggggtaccttaatacacttaagatagggtacaagcagggtggaaggactgcacacctgaatccttagaacgttcttctgttctctctttctctctctctctctcccacccccaaatccccaccatactacatcatgctacattgataatgtagttataaaattatgtgttatgggatctcaggccacaaatggaagattcctgggactaatggcacacacttgctctgttggagatgtacagggaccagcacacctgaacacagatgtagcttattgatacttctgctgaagagctatgagatttatttgtttttttgggaagagcacatrtgagtccagtattgtactctactggatgtcaccaatggatgaccaatttaggggctacacaactgtcagtccaaaggtagcataatcatgacttggtcttggcctgtccatcactttctagccataataacactctattctattgcatatttcatttattctatcttttaacatatcttataggttactaatttactatttacatttaaacacttttatatattctgcctgtatcacaaactacatgcttatttattacttacacttaacacattctataaattttgtctgtattttataagcttctagcttactatttattgttaacacttcttatgactttcttctattccatttaattttcttttctatagcagagttgaattattgaattatggcagaaatatgaattatattattatcctcaaataatacaacaaaagacatttcacaatgtttccaaaagcagagacagctcttctcttattgaggaaatatgtttttcctaatatgcagttgggttatataatctctaaaaggaatggattagcatttaaaagaggtgattatgtcactggataatggagctacatggctgtcagtttgcttggacaataggaaatctccacaaaccccttacccccacctctgcctctgaacaaccagtgacaaacaaagtctacccagaaaatacaggagacctctagtaatgacttcaggaaccaaacaggatccagagagcctcttgcaggttgagttctctggaagcagatgctgtgatagaatttggggtgcaagatgtttattaggggtcaacgtgttaggaagtgagagcagagggagcaggtgagctacggtgtaggttcaatacatcctagttcaattcagtggagatctctgaagagaacattgcccattagagttgtctcccattaggccaaaataacagggcctttatacctctgcctcactcagtcattgaatgcttgctaccctggaaggactcaacctccaacagggctgctctctgcagatgaggcagattctgaaggactgacagccggaaactgcctgctgactatacttctcacagctgggtaataaatccttccttgaaggagaatctagcgggtatatctctgtgcctaacacagaaccagatagatctttccttctggggtagcgtgtggttttcctgacagagaagaaagagtattcagactgagagatttgaaagaaatcgttcttgggaagaagaggcccaacctgagggtgaaaaggccaattaggagttaagggaagctgggagagattgrccttctccaagggaagacctatgtctttgggagcatcccttgggagatggaaagcaaagtctaatgcagctagaactttaatttgtatctccctctctatacctcttttctaaaaatgctttatccctgtaggaacagggtgtagaggcagagtatccagagcaaataggtctgttgtattctatcccccattccttgcctaaggagaaaggagagtacatctgctgactaactggaccagatctctgagagcacagaggtgatttccagtcctggaaagcttcccacagttaagcccgaggcagaagaaagaaccaagacataagataatttttctggagagaacataygcagaaaagaccaagccttttgactatgttcatagattagcaaatgatggctcctaagaaagaaggaagggactccagaaaactcctgattttgtaacaaacttcccacattgtggagtgaagtagcttttwctgaaatgtttacctaggaaccagaatatatttttaatcgacctaagttttgagtttttcagttcagtcacaggttcctaccaatggtggctggattagtcaggaaacagtaacaaataaaacctaaaatctcagtggtttaacatgacaacaaattatttctgactcacatatgatcagcacagtcaatgggggactgtgctacacaatcagtcacccaagtcttggaagctccaccatcytgaatatataccattcggaaaacatggccttcacccacttccaccacacacaacccattacctagaatccagttacatggctgaaatttcaaagcaagtgaatttggagactgtaactttcctatttatccagacagtggaaaatgaaatgggatttggtgagcatatagcattgtttctagcacaataaggaacagctggctgtctggttttgcagaaaagcctggtgaaccttacaaaccctttctcagttggttcttacttttatctgggctaaataatcctggacttggaaacacatacaggcaacacagaacaactgcttttgagaagaggatattaaactacacttctgagatgaattggtacccagagtttattgccttagcttattaataaaccttcaagcagttagggtaaagaaatgatgagtacagctgaaaaaccattataatattttcaggttcaaatattttagaaatagtcttcacaattttaagaaaaccagaatcagtagaggactgatgtgctctgtcaaaacaccaaggagtaacataaacatccttctatagtctccagaaattatttcttacagaaagtaagataaggccaggtgcagtggctcacgcctgtaatcccagtactttgagaggttgaggcaagtggatcacctgaggtcaggagttcgagaccatcctggccaacatggagaaaccctgtccctactaaaaatacaaaaattagccgggtgtggtgatatgcacctgtcatcccagctactcgggaggctgaggcaggagaatcgcttgaacccgggaggcagaggcgtcagtgagccaagaccccgcctttgcactccagcctgggcaacaagggcaaaactccgtctcaaaacaataaaaaaagtaagataaagtagttccctggggttgtttctgtggattcttttaaaaaaacatgaaaaagcagactgtttccagaacattcatgacatctaaacccatggataaatacagcatctgaatatcttttattcattccatcttttgctcagttcaataaaaccatgacttattagcaaacaggtaccataaattgcatcattgaaatgagtagataacttacctttagtctacaaatgtttattgaatatgtattatgtgtggggcagtttcctctggagctataacagtgatcataacagaaaaattccctgcccacttaaagattacattttaatggataaaatcaaacaaacaaagaatttagtaaagcaaacattgtgtcagaaagttgtaagtgctatagagaaaaaacagagcaaggaagaaggatggaacttgagataggggttgtcactgctcagagaattacttggggattagtttctgggagaatagaaaagaaatgatgggtttcttatgggtactgccataaacagggacaaagatcatggtgagactttttaaaagtgtttattttaggttaggggtacatgtgaagctttattacacaggtaaactcatgtcaagggggtttgttgtatgaattatttcatcacccaggtattaagcccagtacataatagttatcttttctgttcctctccctcctcccactctccaccctcaaatagaccagtgtctgctgtttccttctttgtgttcataaattctcatcacttagttcccacttataagtgagaatatgcagcatttggttttctcttcctgcattagtttgctgaggataacagcctccagctccgtttaaaggacatgatctcatttctttttatggctgcatagtactccatggtgtatatgtaccacattttctttatccaatctgtcattgatgggcatttagattgattccatgcctttgctattgtgaattgtgctgcaatgaacattcacatgcctgtgtctttatggtaaaatgatttatattcctctgagtatatacccagtaacgggattggtaggttaaatgatagttctgcttttagcattttgaggaatcaccatactgctttccacaatggctgaattaatgtatactcccaaagatcatggtgagattattcttgattccctcaaggcaaacagtggtagtaaagctgtaatgagtggagagatggaagtcttgccagaaacacacagagatctggtctcccttttcattcctgccagtgatgacatggagactggggagtagatgattgtaactagagaatgtagacctctgggactccatctgcactcttgctctctattgatggaactgtgaatttcttaaaacctcttatctattgagacttgtcaacttaaaaatcacaaatttataaatttagaaaagagactttgttttgtataaaggtttatagtctgcagggcggccattccacaggctgggaagtatggccttcagtagagaccagaaataggcactttgagggaggggagggtggaagaggaacttacgttgaacaggttggccaagtatatatatttaacaggttatagcaggagctatgaatattcacaaaggggatcctgacacatgggtattcaacaaacatgtatgtgacatacaacccaagttcatgttagggtagagacttaacatttaaatgaattactattaggccctatacatcaaaagctaaagcagggacatggaggcaatcaggtgtgcagcctctgtaaacaaacgagaaccagtctatgattggtggtctctcatcagaagaaagttactgaaatcattctccttcatggcttttggtataagaggttagttagtcagtgcctggyggtggatgagccacaaatgtttaaaaattgtttatctcaggccatgtgcggtgactcacgcctgtaattgaaacactttgggaggctaaggcaggcagatcgcctgaggtcagaagttcaagaccaacctggccaacatgatgaaaccctgtctctaccaaaaatacaaaacctagccaggtgtggtggtgtgaacctgtaatcccagctacttggcggggctgaggcaagagaatcgcttgaacccgggaggtggaggttgcagtgagctgagattgcaccactgcactccagcctgggcgatagagtgagactcagtctcaaaaaaaaaaaaaaattgtgtatctcaaggccagtgcttgtttagctactagtgaaaaagaaaaatgttgtggcagatagaacatagtttattctttaagtgtggtggtgcgtgayttaacccttgcctggcatgtttataatttggtatcttattgtcacaaagaccccgttctatcaatcttatgatctctatttaacactattgttggttaattgttgtgtctaaaccacaaaagggagggaatataacaaactgtgtccaacctcttgtcacatcatgactgggaactcaatttttaaaatttctctggggtccccttggccagtccattcagtggttgggaggtataggatcttatttttagttctcagattcaatacatgttgaatgaatcaatctctatgaaatgcatttttaaatgtatggtatgagcaatctatagcaatctaaaaagtagtttggtgccaggcatggtggctcacgcctgtaattccagcactttgggaggccgaggcaggtggaccacgaggtcaggagatcgagaccatcctggtgaacactgtgaaaccccgtttctactaaaaatacaaaaaaaaattacctgggcttggtggctggcgcctgtagtcccagctactcgggaggctgaggcaggagaatggcatgaacccaggaggtagagcttgcagtgagcagagactgtgccacggcactccagcctgggtgacagagtgagactccatctcaaaaaaaaaaaaaaagtagtttggtaattgtggtggctttataatgtgtcgacttagctacactgaactacatttcccagaattctctttattgtatgtttcctgttgccatcagccgcaagggagattctgggaagatttggagcttagacaggaaacagtagccattttgtagctcacacaagttgttgctaatctgctgactcatgtgttgatgtgaagtagtggctgaaccagcaacttctctaccttccctggatcctccttcagcttttccaattcctatatgtgtgtttacctccatgatgaagcagaacactcacaccattaaggtcagaactgacatggatttcagtctctccttatgagatcccagactgcattttcccttccccactttacagttatcttttctcatgacacactgctctgtggacttaacattctaacatcagatacaaagaaacacagacatacacacacacacacacacacacacacacacacacacacacacatccttgtggctctgtctctctagttgaaccataatggatacaaatattttaattattaacatccccagggagttaagagaaaatattgcatctgtgaaacaagactagggtactacaatggaaaaaccacttagaaaataacaatcaaaaaaagttattagaagtgaaaaacatgatagcaaaaatttcaaaaaccaacagaagatttggaaaacagagatgaagaaatctcagaaataagagcaaaaaaaatatgtcttccaccttatactctctctcaggctcttcttgcttgtttgctcttatgaagccagctgccatgttataagctgtcatatggagaggcccatatgacaggaactgagaatggcctccagtcaacagccagcaaggaactgaggccctcaatctaacagctcacaaggaactgagtcctgacagcaaccacatgtgtgaatttggaattggctcttcctccagtagagccttgagatgactgtggccacagctgacaccttgattgaggctcatgagagactctgagccagaggcacccaggtaagctgcattcagattcctgatccacataaactagaaaataataaatgtttgctgttttaagctgctaagttttagggtaatttgttatgcagcaatagataattaatatgctgatagtggatgatcgataatctaaaattagttatttctattcagaagttctaagtgaaatattatcactgttattacagacttgtatcccaatggaatcgtgtgcaggttaggtggaaagcattagtgttttggagtataataaagtatgtaaacgtcgttctactctctctccctgcctaaaagtatcatagagtaaacgtggcagtgaataagacattctcagaagaggaaggtgagtttccatgggtcctggactaacatgagaatttggcaaggctgggaatcctgaaatcgaaacaaagaagtgtttgtctgtaattaggctttcctagaaagttttcagaagtgactaactcacatcctgatataccaagatacctaaccctatgtgaagtgtgtcattattaggactgtgtataagtgtatgtagtactgccttactataacttacaaaccactgagaagggccaaggccctccagtttcagaattaggcttaattcttggattattcttcttttattgtatgtttttaaagaaatatcagaactattaaataccaataaaaattttgaaaaataaacataactattatatatcatttaaaaatttttaaataaaaaataattgttctgtatttaggaaacattccataaaagcaatgacaactgtggtatttagataatggttcaaggatttctgggtaaaaaatgtgtcatatagagttgcttttctaactttcaaatggagatttcatattgtaatgagtcttttatgcatgtttaaggattttaaaatatagaggatgtggaaaatgaagaagatgaaatgaaatctacattgttgagctccaacagaattagtagttttagattagaaagtgtctttctgtatgtgatatttttgggtcagtattttaccaagattatgcaatgctcacttactattgattttttagtatctatcttgttgtttcaaatctatgacttgctaagggataggccaaattagcaagtaaaaatgcatgtaaataattataggaaaatataataaaaattgatttcaataacttaaaactctctaaacacagaactgtcaaatttacttttttattttaattttatttttatttataattttttattttaatttttgtaagtacatagtaggtgtttatatttgtaagacacgagatgttttgatacaggaatgcaatgcataataatcacatcatgtaaaatggggtatgcatccctgcaagcattcatccttgttgttacaaacaatccaattatactcttacagttctttttaaatgtacaactaaattattagtttctatagtcaccctgttgtgctatcaaatgctagaacttattattctttctacctatttttttgtacccattaaccatcccacctccctccccaccatccaccactgtatttcccaacctctggttctcatccttctactctctatctccatgagttcaattgttttgatttttagatgccacaaataagtgaaaacatgcaaagtttgtctttctgtatgtggtttatttcacttagcataacgacccccagttccatccatgtagttgcaagtcacaggatctcattctttttttacggctgaatagtacttcattgtgtatatgtaccacattttctttatccattcatttgttgttagacactttggttgcttccaaagtttggctattgtgaacagagctgcaacaaacatgggagtgcagatatctctttgatatactgatttcctttcttttagttatatacccagcagtgagattgctggatcatacagtagctctatttttagttgtttgaggaacctctaaacaattctccataatagttatactaatttacattctcaccaatggtgtgagagggttccctttttccacatccttaccagcatttgttatcacctgtcttttgtataaaagccattttaactggggtgagatgatatctcattgtagttttgatttgcatttatctgatgatcaatgatgttgagcggcttttcgtgtgcctgtttgacatatgtatgtcttcttttgagaaatgtctattcaaatctttcaccttttttctttttctttctttcttttttttttttttttttttttttttgggacagtatctctctgttgcccaggctggagtgcagtggcacgatcttggctcactgcaacctccgcctcccaggctcaagagattctcatgcctcagcttcctgagtagctgggattacaggcgtccaccaccacaaccagctaatttttgtatatttagtagagatgaggtttcaccatgttgtccagaatggtcttgaacttcttaactcaagtgatccacctacctcagcctcccaaaatgctgagattacagtcatgagccactgtgcctggctttcacccattttttaatcagattattagatttttttcctatagagttttttgagctccttatatattctgactattaataccttgtcagatgagcaatttggttaggtgaattcctaggtatttaactttatgtgtggttattgtaaatggaattactttttaaatttttttcacattgtttattgttggcatatagaaatgctactgatttttgtatgttgattttgtaccctgcaactttactgaatttttaagttctaatagttttttttggtggagttttgagatttttccaaatataagataatatcatctacaaacaaggataatttgacctcttccttttcaatttgtatgccctttatttcattctcttgtctgattgctccagctaggacttccagtaccatgttgaataacagtggtgaaagtgagcatcctcgtcatgttccctaccttagaggaaaggctttcagtttttccccattcagtattatactagcagtgggtctgtagcatatggcttttatgatgttgaattatgttcctattatacccagttttttagggtttttatcatgaaggttgttgaattttatcaaatgctttttcatcatcaattgaaatgatcatatggtctttgtcattcattctgttgatgtgatgcatcacactgattgatttctgtatgttgaaccatccttgcatcccagggataaatcccacttggtcatgatgaatgatctttttaatatgctgttaaattaagtttgccagtattttgttgagaatttttccaacaacgttcattatggatattggattatagttttctttttttgatgcatgcttgtctggctttggtatcaggatagtacttgccttgtaggatgagtttagaagtattgcctccccctctatttttcaggatagtttgagtaggattggtattagttcttctttaaatgtttggtagaattcagcagtaaagccctcaggtccctggcttttctttactgggtgactttttattatggcttcaatcttgttacttgttattggatttcttcatggttttggatttcttcatggttaaattttggtaggttgtatgtgtctaggaaatttgtccatttcttctagattttccaatttattggcatatcatttctcatagwaatcactaatgatcctttgaatttttgtgataaaagttgtaatgtatcctttttcatctctgattttatttatttattctctcttttccttagtctagctaaaggtttgtcaattttgtttaacttttcaaaaaaacgttttgttgcattgatcttttgcattgttttcttcatttcaaattcatttatttctgctctgatcattattatttcttctactagttttgagtttggtttgctcttactcttctagtgctttaagatgcagcgttaggttgtttatttgaagtttttcttcttttttgatatagacacttatagctataaacttcccttttaatactgcttttgctgtatcccattggtttgtgtatgttgtgtttccattatcatttgtttcaaaaagtttttcaatttccttcttaatttcttcaatgacctactggtcattcaggagcatattgtttaatttccgtttgtacagtttccaaaatccctcttgttattactttctagttttactctattgtggccagagaagatacttaatattatttcaacttttttgagtgttttaagacttgttttgtgacctaacacatgatctgtctttgagaatgatccatgttctcaggaaaagaatgtatattctgcagccattggaggaaatattctgtaaatatttattaagtccaatgtttatctgctgattttctgcttagaaaatctgtgcattgctaaaagtaggatactggagtatctagctcttattgtattggggcctatgtctctctttagctctaatatttgtttatatatctgggtgctctgatgttgggtgcatatctatttaaaattgttatatcctcttgctgaattggcccctttaccattagtgaatttatttgtctcttttatagtttttgtcttgaaatctattttgtctgatatatgtatagcgtatagctacttctgcccttgtttttgtttccattggcatggaatatctttttctatccctttattttcagtctatgtgtgtatttattggtgaagtgtgtttcttgtgggcaacatattattggattttgtttattttatccatttagtcactctgtatcttttgtttggagagtttagtgcatttacagtaaatgttgttattgataagtaaggacttactcctgccattttgttatctgttttctgggtttgtgtgtgtgtgtgtgtgcatgtttgtgtatgtgtgtgtgtgtgtggtcttctcttccttccttccttgtttctttccttcctgtcttccttttagtggaggtgattttctctgatgatatgatttagtttttttgcttttaatttttttgtgtatctattttatgttttttggtttgaggttaccacgagacttgcaaatactatcttataatgcattatcttaagctgataacaacttaggactgtttgcataatcaaacacacaaaacgaaaactaataaaggctctatgccttaactttgttccccctcattttaactttttgttctttctactaatatcttattgttctctatgtcttgaaaagttttacttattatttttgattggatcatcttttagtctttctacttaaaataagagtggtttacacaccacagttatagtgttatgatattctgtgcttttctgtgtacttactattgccagtgagttttgtaccttcagatgatttcttcttggtcattaacatccttttctttctgattaaagtactccctttagcatttttttttttttttgagacagagtcttgctctgtcacccaggctggagtgcagtggcgtgatctcggctcactgcaagcttcgcctcctgggttcaggccattctcctacctcagcctcccaagtagctgggactacaggcgcccgccaccacgcctggctaattttttgtatttttagtagagacagggtttcaccatgttagccacgatggtctcgatctcctgacctcgtgatccgcccgcctcggcctcccaaagtgtcgggattacaggcatgagccaccgcgcacagcctccctttagtatttcttgtaggacaggtctgttgtcgatggaatccctcagcttttgtttgtctgtgaaagactttatttctcctttatgtttgaaacatattttcatcagatatacgattctagggtaaaagttttttcattcaggactttaagtatgtcataccactctctcctggtctataaggtttccacagaaaaatctgctaccagacatagtggagctgcattgtagcttatttgtttcttttctcatgatgcttttaggatcctttttaaatccttgatctttgagagtttgattattaaatgcattgaagtagtcttctttgggttaaatctgcttggtattctataacattattgtatttcgatattgctatctttctctaggtttgggaagttctctattattatcccttagaataaattttctacccttatttttttctctacctccactttaaagccaataactcttagatttgccctttttatggtattttttagatcctataggcatgcttcattcttttttattcttttgtcttttgcctcttctgactgtgtattttcaaatagcatgtcttaaagcacactaaatatttcttctgcttgatcaattctgctattaaagaactctggtgtgttcttcagcatgccaattgcatttttcagctccagaatttctgcttgatttttaaaaaatatttcaatttctttgttaaatttatctggtaaaattctgaattctttctctgttttatctttttttttttttatttcgagacggagtctcactctgtcgcccaggttggagtgcagtggcgcagtcttggctcactgcaacctctgcctcccaggttcaagcaattctcctgcctcagcctcctgagtagctgggattacaggcgcctgccaccacgcccagctaatttttgtatttttagtagagacggagtttcaccttgttggtcaggctggactcgaacccctgacctcgtgatccacctgcctcggcctcccaaagtgctgggattacaggtgtgagccactgcacccggcctctctgtgttatcttgaatttctttgagagttatcaacacagctattttgaattctctgtctgaaaggtcacatatctctgttcttctaggataggcttctggtggcttatccagttcatttggtgaggtcatggtttcctgaatggtgtaaatgctagtcgatgctctttggggtctgggcattgaagagttaggtatttattgtagtcattactgtctgagcttgtttgtacccacccttcttgggaaggctttctagatattctaaaggacttgactattgtgatctaagctgtatctgctttagggggcaccccaagcccagtaacactgtggttcttgcagactcatggaggtacaccttgatggtcttggacaagatccagaagaattctccagattaccaggcagagacttttgttctcttcccttatgctcttccaaacaaacaaaatctctttctgtttggagccacctggaagtgggagtgttgtgacacaagcatccctgtggccatcacycccaggactacactgggtcagacctgaagccagcacagcactgggtcttaccaaagttctgctgtaaccactctctggctactgcctatgtttgctcaaagccctggggttgtacattcagcaggtggcaagccagttaggcctgtgttcttccctttagggtggcaagttctcccaggccccaggcatgtccagaggtgccatctgggagctagggactacagtcaaaaaccttagaagtctacttagtgttctattatactgtgactgagctcacactcaaaccacaagatgcagtcccttcccactcttccctccccttttcaaaggcagaggagcctcaccccatggccaccatcaccagaagcccatatagagtaataccaagctagcactgatgttcctttaaggcccaaggactcttcaagtcagcttgtggtgaatcctgcctggcctgggactcacccttcagggtgatgggtgcttctctgacctgagggaggtccagaaatgctttctaagagctaaatcctgaaattgggaaccccaagagcccacttggtgctctaccctgccgtgaccaagctgatacctgagatgcaagagaaagtcccttttacttttccctctgcttttttgaagtggaaggaatcttgtccaataggtaccaccagctgggaatgtgctgagtctcacctgaagccagcaagtctcagagtctcatccaaggcccttgacatagtacctggatatcgctgctggttattcagggcccaagggctcttcagttagcaggtgatgaattctttcaggactgggtctttcctttcaaagcatcaggttcccttgcccagggtgtgtctagaactgtcaagggagcgagggcctggaatgggggcctcacaactctgactggtgccctgtcctcctatggctgagctgatatccaagatgatagccttccccactcttccctctcccctgctttcctctcctattcccccctctcctctcctctcttctcctgtcctcaaatagagggaaagggttgcttttggagccacaagctgtacattctggggttagggatagggtgatgccagcactcctttagccaccccagctggtgtctcagtaggtcatggaacccccagtccactgtctctgagcccagttcagcagtaggactcacctaaggtttgcttgtctatttagggccctggaacactttagcccatggtggtgaggcttgtgggaactcaggtagggaccactgggattggccattctcctccggctaggactagtttaaatgctccctctgtgggtgggtgtcagctgagtttggtctggttttgttttctgttaaacagggaagcactgactagattgtctcacagttgctgccatctcctgctccccagcatacagaaacgctctctgcaccagactgccactgctggaggatgggggaggggtggcatcagcaattcaagactgtttttcttatctctccggtgcctgttttaatgatatgaagttaaaaccaagtactgtgagtggtcatctgatttttggttctgatgaaggtgcttttttgtgtgtagatagttattaaattggtgtcctcgcagcaagaagkattggtggagccttctattctgccatcttgcctcaaattttcttttgatgatgatactagattttgagaacggaagaaccaactagagcaattaccagaattgtgtattaaaagaacagcgtattgtgttttccctgacatttaagctatctatttaatgcttaactattgtggtgtggaatgatggtttaaatcaggaaatcaatcatttgacttcaggtctggaacttttgtttttcctgaatgggtataaaaggaagagtgctgaagaaatgtctaacaatatgcaggaagaggtaatgccttttccccaccttctcttcagtcacctaaaataaagcttatcatgtaatttattcatattggagtgccccaagctatcccctgaatttatttacaattctaacatatgttattcattcattaaacaaataataaattgagcacctactatatgtcagcttcctatctagttgttgggattataactgcaagaaaaatagaaacagttcctgccctaatgaatcttacattgtatgggggatatagataattaaaccaatggccgggtgtgatggcttacacctgtaatacccaacaaatgtaataaaatatcgtaagtgccattactggggaggaattaaagaagcacatggcagggagacctaaactagtacaggcaatcagataagtcttccctcacgaagtgatattttagccaggcaaaagataatgcctctcattaagataatagaggaggaagagcagttatgtcaggtgtaagaaaaataaaaatgattttttcaacattcataggttcttagctggaatggacccctgtaccaaaagataaattaacaagagaaaaacaaatttattaacatgtatatttcatacatgaagcatacacttggagaataagtagttctcaaagaggtagctttgaattccagcttatatatcatcttcaacaaagaatggtcaacttttggagaagtgacaagacaaaggaaaaaggctttgaatctctagaggtggaaacttgagggaaggcaaataaatggcaggtaaaggctagttagtaaagcttatagattcctctagtagcatctacaggccaataagggcttacactgtcttgttttctctgatagagaaaggacaggatatcttttgtctctgtaaatttatgtcctgattttaagcaaatagagggagagcagggagctttcctgcatctgctgcttaattgccttcagctcaactatgattcatattatggcgtggcacaggaaagatggattttattctagatctgttgaataggcttatggcacctaggcacaagcgatattttggtggcattgagatgtatctttgtcttgagctcacaagaaaggtcagacttgggactcttcaccctgtggatagtaaaggaagccggaggaataaatgagttcacctagtcagagggcatggagtgagaagaaaggacacctagagaagaatcccgacagacaaaacatccagaaacaggcagaagaaaataaaagctggcaaaacagcgggaagaaatccaagggtatggcatgccagcagtgaagggagaggagagcttcagggagagagagaacattgagtgctcgggaaagccaagtaaaatgacaacggagaaatgttaattagattccaacaagcagctccttgataaacctggcaaagccagttggagcagagtgttagaaaacagaatacagattgctaaagagtgggagctgaattaggagaaacatccagtacagacaacttacccaagaagtttgtgaatggggattgaaagaggtagaggctgaacgagagggcaagaaaaaaaatgaattgcataagcaataggtgaagccggatgaaacccaaagagactctgttctttgttttgtccttttaatgatattaacttgagcatattcacatttcgatgggatagagagtgtagaaaagaagcggataaaaataaaagcaggagagagcaggagtcgggggaaggggcagaggttgggagaaggaaatgaaaatagccataaattataacaatactacaggagataggatccagagcacaggttttactgcaaggaatgaggaaaagactggtgcagatgttgaccatggtttgtagatgtaattgcagggagttgagaggattttgttacacgggttctcaaacctcgtaagattcaagataagaaatctgaaagtgtggacttacttggggcaaatacattgacagtaataaaaaataacagttggccaggcgcggtggctcacgcctgtaatcccagcactttgggaggccgaggcgggcggatcacgaggtcaggagatcgacaccatcgtggctaacatggtgaaaccccgtctctactaaaaatacaaaaaattagctgggcgtggtggtgggcacctgtagtcccagctactcgggaggctgaggcaagagaatggcgtgaacccgggagggagagcttgcagtgagccgagatagtgccactrcactccagcctgggcaacagagtgagactccgtctcaaaaaaaaaaaaaaagtaacagttgatcacaaaagatactcaattcatttatttaacaacattcagctagtactataataggttttataagtgttaccagaaacgtgtttcaatccagaccccaggagagggttcttggatctcccgcaagaaagaatttgaggtgagtccatagggtagagtaaaagcaagttaattaagacagtaaaggtataaaagaaatggctactccataggcagagcagccctttgggctgctggttgcccatttttatggttatttcttgattatatgctaaacaaggggtggattattcatgcttcccctttttagaccgtatagggtaacttcctgacattgccggggcatttgtaaactgtcatggcgcgggtgagagtgtagtagtgaggacaaacagaggccactctcttccccatcgtggttttggtgggttttggatggcttctttactctaaacctgttttattagcaaggtctttatgacctgtagcttgtgccgacctcttatctcatcctgtgacttagaatgcctaaacatctgggaatgcagcccagcaggtctcagccttattttacccagcccctattccagatggagttgctctggaatcacatgtctctgacataagaatacttcagtaaaaaactcattgtcttggccgggcacggtggctcacgcctgtaatcccagcactttgggaggccgaggcaggcagatcatgaggtcaggagatcgagaccatcctggctaacactgtgaaaccctgtctctactaaaaatacaaaaaattagccagagtggtggcatgcgcctgtagtcccagctacttgggaggctgaggcaggagaattgcttgaacccgggaggcggaggttgcagagagccaagatcacgccactgaactccagcctgggcaacagcaagactccgtttcaaaaaaaaacaaaagaaaacaaaaaaacaaagaacccattgtcttaatcttatgaacaagtaagaaaaaacaggcttcctgctctcaggaaatggtggctccccaattcatctatttgcttccaaaagaaacccaggaatcaacattgattccttcctttccctcccctatgccccaccatcccctcgctccagaaaacacaccacacaaataaatatatacataccatactcaattcactggggagcctgtcaattctccttccaaaacagatctggaatttgacttccatttccatcttttctgtctcaaccttgatccaagccactagtgttttccacctggaactaatgcaatcaccgtctaactggtcttctctccatatctaccttggtccctttcggtccattctctatacagcatctataacatagatcagatcattattctcccctacttaaaacctcccaatgatttccaactgctcagaaataaaattccagatcctagccatgtcctgtgtagaagcagagggaaagcttccctttcaccctctctgaaggctcactgaaatgagctgacaatagacactatcaggataagaaacatacaaatttatttacgggcacatggacacaggagttcggcaaatatgagacccaaagaagggccagagatttgagacttaaataccctctttatagtggagaagaaacatgggggatgtaggtaatcctgatgggtagtaaatgcttttcaggggaaatgcatgggcccaaagagcaaacaacttggctaggacgaagttcctctgagctctgggggaggtggtggcaatttgtgggaagtgagagatagaatttcactgtgaacaaaggtggccttattatgcagatgaagtctcccaggcaatctctgggagctgccctcagaaaagtagatgaaaactctatctgggtgtggtgatgacttttagtctttttacctgctctggtcattaatcttttctgattatttgatgagaattctaaaggagaaagttttaagacaattgcatttcttctggaagaacttcccttaatggcataaagggacttcagagaaagcccctgtctgtgcttcaggaaagaagggatcagagcaggggcagagagagaccttggttctgaggcttgtttctgaggccttttccttccttccttctctccctctctatttccttccttccttccttttcttctttctttctttctctttctttccttttctttctttctctttttcttttccttcctccctccctccctcccttccttccttcctttctgtctctctttctttcttttctttctttcttcctttctttctttctttcctttttgatagctgttgttgctgttattttcttctgaagtttgagttgtcaggcttcagttcgcagggctttacaaaagcacagcttagttttcagtgactccaaattagaaaaaataggggaaaaaagaaggaaaaaaatgaaaacattattttgaagacttgtagccaagaaaaattagaattctgtccaaactgtagaaaataataaaaactgaaaaacattaggcaagactagaatctaacaacaggtgtactatagttttgaaacaattataattattacagataatgtaaactaagtcatgtcagaattataggagtttaccatgattttagaacacataccaataacatatttatacaaagacggctcaaagaaaaccaaacaccatttcatatttgacaatgtttcctatataatttttataccaaaaaagccaaatcatgctatttttggactttagggaatctaatatcgtaaaagattaattagatcagaaaaaaacataatttataatttgattttgggaagtttgtcaaatatcaaaggtttaattaaaacacttgatatcacagttcattgtaaaataagtcattcatttgaccaaagtgataactcaaggatttcaaaaaaaaaaaaaaaaaaaaggtgaaaaccttcattatctgagagaggacacttaattttccaaacaataagtcttgataaaaacagcttgaagccaattaaatttgtttttcaaaattttataagcggtatataaaattttaatcttgatcataagatataacttccataagccttttataacctttataatctttattaaggagttggttaatgcttcaagaaaaccttgttaatctgacacaggggcccatatgctggtcttgcatcagcgtgtctttgacattaatgattaattaacagagaaactgaacttattttatctctcaaaatcagcctttacaatctcacacgcccacctcttctgcaatagtccctggccttgaggagttgaatagctttaatttctggccctgtgtctcaggaatgcagtttattttgattggcatcttctactgggcctgaagatgaggctttaattactgtcagtgtttaagatttagcaggacttggtgtcctttttagactcaggggtcaaagctctgtaactcaatgtcacaggaactttaaaagcacatacagaaaggtacatggatgtaataactttaattaaaaagaagttttttatcttagttttttccctaagcaagccaaaatgtaacaataatggcatagaaattgttttgataaaccataaaatctattaagccagttaccaaaaggcaaaagaaaagaccttccgcactgcacagaatattatgttggaaggaaactttttctttagacctttaagaamacattgttagcatcaagccacaacaaacagaactggaggaaaaaacttacatgagttgaagaaaatgagttgaaggagagcattactatttcacgccctttaaaaggggagagaaaaccgaaaatggcgagatgcaataaaagttgaactttgggttaaaaaaattaaaatatattacagattattaagggtaaataaatcccttaaggaaattttattgttctaaccagttatttagtgtataagggtttttttaatgtcaagcccaatctctagaaacacccttataattttcctttaattatagacaacttgatcatataaaagtttttttttttttcctggtttgtcctgaacatctctctttcttaaacaaccagtcattttattctaggcctaaatttaccatacaagattctttctcatataaaattacttctctttaagctttcttaccaaaggaaaaaaaaaacctctttatttttataaatttccttattgctctcttatttcctggtttcttttactttgttttatacgtaatctttaaataagctttgaattagacaaaattgttcacctttttaaaaagaacacacggccgggcgtggtggctcacgcctgtaatcccagcactttcggaggccgaggcgggcggatcacgaggtcgggagatggagaccatcctggctaacacggtgaaaccccgtctctactaaaaatacaaaaaattagccgggcgtggtgacgggcgcctgtagtcccagctactggggaggctgagacaggagaatggcgtgaacccgggaggcggagcttgcagtgagccgagatcgcgccactgcactccagcctgggcgactgagtgagactctgtctcagaagaataaaaaataaataaataaataaataaataaataaataaataaataawataaaaaggacacattttttttagaatgttttcctacaatatatttttattggaaaatgcccaaataatgaaatatctattatttaatttaatataattttagattctaaattataatgagtttgtctacaagtatttattccattacatttgcctagtaatttaattttaatcgtttacctatattatttataaaaactgcaatagttatcatttaaaattatggaactgccattgcaaaattataactgagacagtgaaaaagagctgacctaactgactctatcttgcttcaaacctccaagctgtcttgttcattcctgggcataggccaaactaactttgggaggaatttagtttatagtttagctttgaaacaaagatggtaacagtccttacccaaaacaaatcttactgcctgtggactggacagtctaaagccacaagattagaagttatggtaatcttaataaattcaagatgtagctagtttcatgaaaccagtatcwatgtcttacttattaaaaattacataagcaaatattattctgtcttgggctaggtttgtagttytgtaactcctatgccaaattttgacaccctatagtatgtggcaggggttaagtatgaaattgcttgattaataaatgcaaacaaaaatgtatgctggacagtcttaagacatttctaatattactttaccaataattttaaagctaggttatttattgaagattttacttaagttacataaacttcaaaaagcatttgactagtgttttcttttttcctgataaagtattggatcaagtgcttttattaaaccaattaattagaactctttcatacattttcagtagtgaaactttgtgtacacaccacataaatacatagacgtattaggcatgccaatagaagcacattttatagattcataaaaacctttttttccctatcttggaccttcaaattcttgataacctgttttactaccctatgtagttgtcagctaaatagctttaaatttgcatattaaaggaaacaactcaggtgaaaatcaaatagcaaaatttacatcataaggcatggagagaaaaagtctggtgtgctagagggaaattaaaacagatttaattgccaattaaacataaacttatagaaattataaaggccttttaaatatatacacacacaaagattctgtagcttttacttcagaactttagccatgagataaatacaaattcacctgcttgcgaaaagaacttgttggattcaaacagtggcttttatctgaatagaaamataatagcagatttaaagcaggcagaaaagaaaatagaggaaaaagaggacttaggaactctatagtataaaggtcgaccttagggttctttttccttcatataaatgtgcacaaagaccatattacttccattttacataaactctggcaagtcgaggtgccatcaaacctatggagtgttcacaagggtgtcattctccttgttttctcctcattctcagattatttgtttctcactttttttttcttaagaggaggaactgagctatggcctagggttttagtgtggtggatctgtgtgtgctgcttgtgggcaggactccacagtgtatcaccactgagtcctttctgtcaggcctctgagcccaagctaagccatcatatcccctgtgacctgcacgtatacatcctgaagcagatgaagaatcacaaaagaagtgaaaatggccggttcctgccttaactgatgacattccaccattgtgatttgtttctgccccaccttaatctgagcgattaaccttgtgaaattccttctcctggctcagaagctcccccactgagcaccttgtgacccccgcccctgcccccaagaaaacaaccccctttgactgtaattttccactacccacccaaatcctataaaacggccccatccctatctcctttcactgactctcttttcagactcagcccgcctgcacccaggtgaaataaacagccttgttgctcacacaaagcctgtttggtgctctcttcacacggatgtgcgtgacagtttccacccccttacatttctcagtttctctccccagtggtctatgacctctgaaatgactcaaaatgccgggtgatcagcccttatatgtgtttcctggaagagccttttttttttttttttttttttgagacggagtctcgctgtcacccaggctggggtgtagtggtgcgatctctgctcactgcaagctccgcctcccgggttcacgtcattctcctgcctcagcctcccaagtaactgggactacaggtgcccaccaccacatccggctaattttttgtatttttagtagagacggggtttcaccatgttagccaggatggtctcaatctcctgacctcgtgatctgccggcctcggcctcccaaagctctgggattacaggcatgagccaccgcgcccggccgcctttttttttaaactaatttttgttggggatttccctgtaggactgctgcacattgtgggagattaaccccccagacacccctaggaggcccctggtcacccaggggtgccttttggctgggaggagaacaatgccttttctcttcagagctaagaaaactcagtctctcatttatctattaaaataacagctcagctcctcacacaaatgtgcacagacaatccgaatcgagattaactttgggagaaaaagcaacagagaagaccctttagaatgcatctctgaactaaaattagtatctttaaacaacaacttcctaggagaagaaaaaaaggaaaacaacagccaagacctcttcctgtaaactgggctcagccaccactactttgcagctcttgtccgctattatactcaccaaggtcaaatcctctcacagtacaaggtaaatctctggtacctccaaagataaagaggtcaggtcatgcaatacaagaaaacagagctttagacctaagaagaatctgcccatgactcttgaaactccacaaggaaaacagaacaccccaaaaggggtgagtagcgcctttgttctgaattctttaaaggggttcaagtcattagaagccttctctaggttttttggtactgcagatggcaagggggaaggaggtatagagtggaagaaaagtaaacgaaggatttttttttaagacaagcaaacacaggaatcaaacacgtggttttttgtgttttgttttgttttgtttttccttttttttgcagctgcgaggaactttagccaaattaaagaggatttgttattcataatttggaattctcactcggatttgaccaagtcgggtagagtcggtcaaacctgatgggagaaagaccagaacgaacaataacaacaaaaaaaccaacaatattatcactgagcgctctaatggtaaggagaaattaagactagctggttattaaactttagccaagacaaaaccccaattcagctacttacctagggacaggtctcaggctgaagactgctttctaccatcctagaagcaggaacaaaacctcaaactcgtcttccctgctgggagcgagctcaaactccataaaggagttacctgccttctatcattatggaagcaggaaattttgccttccttgttggaagcaagtaaaactccaagaaaaggggagttgtaaagcaaaataaactagatctcaaccaaattttgggagatctgggattctctggagggggacctcagacctcagcaaattgtcctattggtttgagccataaagttagctcatgctggtcccaaacactgataggagatttgtcaaaggtcggggcacccccactcagaatccccccatggttaccaaaatgtgaaccccaaatatctgagacaggtctcagttaatttagaaagtttattttgccaaggttgagggcacgtgcccgtgacacagcctcaggtgttcctgatgacatgtgcccaaggtggcaggggcacagtttggttttayacattttagggagacatgagacatcaatcagtatgatgtgtaagatgtacattggtttagtctcgaaaggtgggacaacttgaggcaaaggtgggacaacttgaagcgaggagggggtttccaagttataggtagataaggacaaatggttgcattcttttgagtttctgattcaccagtccaaataagccaatcagatatgcatttatctcagtgagcagaggggtgactttgaatagaatgggaggcaggttggccctaagaagttcccacctggacttttccctttaacttagtgatttggggaccccaagatttattttcctttcacagtttacttttattgtctgtcttcccctctggaatgtaaattctatgagggcagaaactacatctgtcttatctctacttcctgaaaaagtacctgacatatagcaggtattcaaaaaggtagcttgaataaatgaactaatcaaaaccaattgaacaataaacaaggcagaatgaaagtgtatttaattacacataagataaaagctatgagaatacataagaagggatgattaattaccattgttaaatgataatagttacagtgagataaggtttaaggcaaaactaatctatgctgtcagaatttagaatgatgttttgttttgcagggggctgcaggtaatgactaaaagggaatgtgagtcaggcttctaaagtgctggtagtattttgtttctttatttgtttactggttacccaggtatgttcagtttgtgactataaacttatgtgcacttttctggatgtataatgttcttcaataaaagattaaagttggggaaaaacatagttatatggaccatattacatcaaagtactataactgatgttcataatgatggtctaattcatcaaaaagattaagtttagtgtgactattttcaaaaacgtcaagtgtataatgtagttttaaaaagatttccatgaaaaatagttaacattatgccacgatgttgtgtctataacatgctgacttagatggaacaccttatgtttcaatgacactcaagaagtaaggtattaacacattaatatctttagaacaaccacaaacaccatgctggcattattgcccctgattttgcagaagtacctgagggaggtaactcgatttcttcagttgcacataaagaaagtggttgctccaagaccaagattccatttactctgacttcaggagcaggacagtatgcttctttcaatacatggtaatatggaaaaggagaggcagatccaatggcattgagccatctcaaggagaagggtctgctaagaagatgatctgtgagtggcccccaccttcaagactcttcttgagtcttcaagttttgaacatctcccatgcctcctcctcacttcctttgagtggtacttggcattcttttgagcagtgaaaccatgatttttcaacagatattcatgaactcttaccatggttataccttggtttagtagagccatcttttatttctaggggccattgtgcatctattctctggttgtaaagagcaacaaacatatgcagaaatgactctgaaaaatgactatattctgttgaggtctaaaaattttaccctaaagcatgggtaaccacttcagcattcaagttctacagctgattgactttgactcaatcaaggactatcaggtcccaattgagtgaggaagtggagtgttacaggaaaaggaagaaatgaggcccactctggtatacagtggttctgagaaggctaggttttccaggctgtcatatctggagggcttagtgcaggcctcttcttaagcaaacatggtaagtgcatgcagatcagataaagcccacatagctacagagccccatgagcctcagaaagggcaattctatggcctgggaagagcctgaacttgatccaaagctctgaagtaaacttctaggtaagatccataattgacataagacctgagaccagattagttgaacaaagccacacttatcctcccaggcctatgagagaccattggtagagagtgggaggcaccgtgtggcagagaaagagtcattgccccctaaaattccaagtaatgccagtgttttcaaccctgtagtggatgctatggttggtcatcccagattccaccttcagggctgagacagtcactcattagcccagctgccaggaatgttggtggctggtaaccatcagctgagtcyctgtccaggagtttctgtaagccaaaaagagccacttgcctcaaggtcctgctgcctgcatagaggtagacatcatccaatgaccatttatgacaggagttgaaagcctggtccctgtgtctcaaagtgagactaaggggccatccttgggagatcagctgagatcttttctgtgactgtatcacagctcacctccacccagtcctgcttccttcactttcccactttcaatgttcacttcaacacttccgggtatcaatctttgtgtataggaagatccttaacacacttcctatacacaaagctctggctcagagtcaacttccccagaaacagagaacctgacttcaaacaatcccttattaaaacataaaaggtatcgtaagtttagaaatcagaaaggccatgagtataaatagctaaaatatgaatgcagcagaaaataccttccttagaacattgttttagaagtggcaaactaggaaactttgaaaagaggtcagtatgaaactgtgatttttttaaaaaagatttcattttgacttagttttaagggtgtttcagcctgcagttatttcagaactagagatctaagcagatgtgctgagttttcattcgtggaaaattttgcatcaatagaccaagggttgatatttttaatgtctaagaagctcatacacatcaataaataaaaacatgaatacttcaaaagacataaatgtttaatggtgtgagtatgcaactcaaaagcagcaaataataacaatctctagtaataaaaaaagtaatcaaaactaaacaatattttccctattaaattaggacacattaaaaaattataaaatgtctaaccctggtgagattttaatgaaacataactgttacttactgccaatggtgagcaaattggcacagtctttttgggaatcactttaacatttgatattaaaactaagagaataatattacttgttaaagcaattctatttctggaaatctatcctaaagaaataattccaaatgtgggaaaagcttttctctacgtatttttttttatcacaacattaactcaagttgaaaaaaacatgaaaacaaatacatgtgaaatttgtttaaaagagtcactatatatatatttcatgggctgttatgcaatcataaaaagtgattacaatgagtttatgaaaatttgaagaatgcttataatttagtgttaagtgaaagaagacacatactttttctatttcctctctgctgttgagtagaaagtttctcttccattgataccactttaaaactgttatatcctgcatttaaactatgtttttttatctcaacaatttaagatgctaaaaaggtgttttctgtgtcagttttacttacttttaagatgattcttatgttggatatgattcattcacattagttttctctaggaattggacagaatggttcactgaaactttgactggaacacagcacagtagcaggttaaaacactgtcctactgtgcagtggtttacaataattttagggcttttaaacactcctggatcattgccttaactgtatttgctgtagtaaatgcaataagattttacttaaccaccaaagagattttgcctcaaggtcatttcacccataaagccatcaacagtaaagctcaagggcattctggcagggatatggcaacctgctgttgttagctctggtaggaagagctgtacttcaagctgaacttcatcattaactggtcagtccccacgttatttgagcagtgtccagccagaagtgaaggtaatggctttgtattttgtacacatgttccagagtaaaatccacagtgaggtactggaaacacagaaatacttctactatattgcatttctctgcatttctagaacaatagtccttaagggaagaaatgctcattagattgcttggtctgtgacttcctagacctcattgccctggatgagtttgacacatacaagtctattcctttaccagagcaatacttggaaagtcacatacatatcagcaagaaatgtgtcaattttcaaatgctttgaatgtttcgggctttaaaaaaatttcaaacccaaaaatatggtgagaaatatatcatctttcctcatgtcatataactttgcaaaaattattcctaatgtgttaaaatatcttagctactgcacatataaagttaatggttttcttatttttcatacttgaatgttactgccttattccttctcattgggttgtaattttccataacgggttaatagaagactggattttaaggtcagttaatgtttgttagaaccatattatttgtcccaaatacagataattcatatgcactgctttaccaaaaataaaaaaatagaaacaacaaaaaagagggagagaaaaactttcctctttaggttcaattataacaaatccgtttcaccaaagtgacactcttaataacagaatatgcaaggatgtggaagaactggaattctcatagattgctggtgggaatgtaaaatactgcaatcgctttaaaaaacagtgtggccatctcttaaaaagttaaagttaaacatgtttttacattatgatctagccattctacttctaggtatttatttaagagaaatgaaagcgtaagtccatacaagacttgtatacgaatgttcatggcagctctttttttttttttttttttgagacagagtctttctctgtcgcccaggccggtgtgcaatggcacgatctcagctcactgcaatctccacctcccaggttcaagctattctcccgcctcagcttcccaagtagctgcgattacaagcactcgccatcatgcccggctaatttttgtatttttgtagagacagagtttcaccatattggccaggctggtcttgaactcctggcctcaggtgatccacccacctcggcctcccaaagtgctaggattacaggcgtgagccactgcaccaggccaagcagctctatttgtaataaccaaaacccggagtcattgaaatatccatcaggaggtgaatggataaacacattgtggcatatccgcaattgtccaatatccacaaatacccaatatcagcaataaaaacagaatgaactgttgatacacacaatgtggatgcatttcaaaataattatgctcagtgaaagaaaacagataaaaaagaatatgttgtgtttgacctcgtgtatataaaattctagaaaatgcaaactagagtgacagcaagcagatcagtggctgcctaggagataggtgtaagggaaaggcaggaaagagagatgacaaaggagctcgaagaaatttgtggggctggtaaatatgttcattttcttaaatatggtgatggtttcagccatgtatacaaatgccaaaatgtgtcaaattatactctttaaatatgtgcagttcattatatgtaaattagactttattaaagctcttaaaaaaataataggccaggcagggtggctcacgcctgtaatcccagcactttgggaagctgagctgggcggatcacgaggtcaggagttcgagaccaggctgaccaacatggtgaaaccccatctctaccaaaaatacaaaaattagctgggtgtggtggcgggcacctgtaatcccagctactagggaggctgaggcaggagaatcacttgaacctgggaggcagaggttgcagtgagccaagatcttgccattgcactccagcctgggcatctcaaaaaaaaaaagaaaaaagaaaaaagaataacattcagtggaacaaaggttgtaaaaaatgtgataactaagtttctttgaaaagggatataaaatttaaacatcctgttttttttaaagaatggcttgggggttacataaggagtaggactagaactggaaaaaccttgtggaagggacaatcactgagtgactttctattcactaactcaccagctatgagatgtaggggccaaggtccttggctctctggaggcttgaaagtgatatgaggcagactaataggagaaaargcatacaaatttagttaatgtgcatacacaggagccttcagaatgaagacacaaagatacaggggaaatggtccattgttatgcctaggttcaacaaagtatggacagccatgtagaaatataattggaaaagaagggcattatttcatgttaataaaccgtgtgggaagacacagcaaggtctatcttcttggcctctctgagcaacattccttgtctagatttttcttggcctctctgagcaacattccttccttctgagtgtggggcagggccatctctggaatgagggtcttatgactgacaaacaaggaaggtcagataatttctttatggccaatttttacacagaaaggcagagggagcattagaataataattttaggttttatgacaagttttgtggggaaggggttctggtttctatgacccagcttggggaagagggattataatttctatggctggccttgaggagaatgggactgagacatgcgggcagaaggtcagagagaaacttttgccctctttctaacgccttcattttaggcattgttttctgagccccaacagtaaaaatacccccagaatagatagaaatagtctagattattatatcaataattgtgtagattaaaataccaatggccaggcacggtggctcatgtctgtaatcccagcactttgggaggccgaggtgggtagatcacctgaggtcaggagttcgagaccagcctgaccaacatggtgaaactctgtctctacaaaaatacaaaaattagccaggcatggtggtgcacrcctttaatcccagctactcaggaggctgaggcacgacaatcgcttgaacccrggaggcagaggttgcagtgagccaagaccatgccattgcactccagcctgggcaacaagagcaaaactccatctcaaaaaataaaaaaataaataccaatgacaacactcagagattaagggagagcaaagtaagatactgagcatataaaatcctggtccaaatataatccaaagtttctccacccaagagaaagggatataaaaaatttaaaagcccttagaatccacagaaggtattctcctgacaaattgcagcttattgcataggccagaaaaggtgttaggaatgcatgtgaaaacacatattatcctgcaaatctcttttttaaataaaactctacccatggaccatttttccaagcatccattagtatttaaaacacaaacccaattgaaaaattttacatttcacttagggacacaccaaggaaggggttggagggagggggagaacataaaggttagaggcctgaggatctgccattcctgatttaatgtgccaagaaacagataccctaaatgagttagggttactggatctgcctttcctcaaagcaaggaaataatcctattgaatatatctcccctctgaggctgctttggaactgctgtttcaccctaaatcttctctggatcctcttggcaaatggctttgagatgacataatgaaaatggactttgggtcttgtttttaatttcattcatgcaaacggaaagatgggttccatctaaaagttctgatgtggacactggcaagtgttggaagtaacacaaacacaaaacaggcaagaagatgaggagaaaaacagagaatacaagaagagatgaaaggagggaagaaagaccctgtatatgattatttggagttaggaaaggaaattggattgcctagaatggcagacacttggaataagtgggaacccacaacatttactgatggatacagcttcattaggagataattgttaatttagtctaaaagaatgaatagggaacatccaggtaaaaatttatatatagagagaatgaagcccaggatgcagcacaaataaaggtgtgacattatgtgctgctattactagtgcatagaatgtgtgtatattgagggtggagggtggggcaggtgaagaaatgtgtagagggtcaaaaccaggaaactgacattggcacaatacaattaatttgactacagatcttattcagatttaccaaataacagtgttttaaaaattgaagtgttgacatttcaacagtgacatgtatattagtcaggtatcattactaatggcttaygtggaccgtcattcagaaataacttcagtgatgctggtgaacatgtactaacctatataagtacatttcctggtatgaggcacagatggcccctgtcttagggaagtgtgcagtccagttggggagctgatgtaggggaggaaaaacaattttctctttatccttcgtagttcttagttgagatggatccttgtatcaaaggtaaattaataggagaaaaacaaagtctaataacatgtatgcttcatgtatacaagggatatattcagggagaatgagtaaatctcaaaaagttggctttgaattcaggcttaaaaaatcatcattctctaaagcaaagaaagagaagaagaccagttatggggagatagctaggaaaaggaaaagcatggtaaagaaggataaggtttgttacacagatttaagttgattccttctccattgacaagagtctttattgatttagaatcattcctctcctcctgatacaaagagggagacacccttataaatgaattatttcctttatagatgtaaatttcccttacaaaaggataacctctactctgttttcagagtttcccctgtgtctgccatttctcaaaataatctttatgccaaaaagctatattttggggtggcatattctggtctcctacagtcacattttggggtggtgttggggtggagagaacaataccacaaagtatagtgcttgggcatgctgaacacttttgaattaaaggaaatcggaaggccttcgaagctacctcaaaaccaaggactttctaaccttctctggtttttccccgactagcacagggagagaatctttctggaatttcctcatctgactaagaaatcttctttccaaataaaatgcaattgtcttaagactccctccctaggaataaataaccaagaaaaattaaccagcagggacgaaaaaacacaaaaagttgtcactatgcccagacagacttttcatctattcttctgaggacagctccaagagattacctgggaaactttatctgcataataaaacaaccattgttcacaatgaagttctgcccctcatcttcctgctacctcacccagagctcggaggaactctgtcacaggtcattgttatttgggttcattcgtttcccctgaaaatcatttattacccctcactgctaggtggggtgtcagagccctggcatcagaaagtgatcgactcatgggttggtaggaagaatttaccaatgacagtataagtttgaaaaaggaaagttttattagaaagaaataatgctgtagacgagtgcaacggggcacctcagaaagacaggactgagtgtgccatggtggatttttttcctcaggggtatttatggaccttaaagcaggagcttaagggtaatttggagtatattagtcacaaaggtcatgataaatgattacatttgtagacattttggtgccttaatgtcagcaatggttgcacaaggagtttcagtttgcatgcattccagggatgtatagaaattctagttacttaaaaatttgggggaaagagacctggaaccagatgcctgctttagataatagggaagtctaattacttctgaattcctcagataaggagttttgtctctagatggtctgcttgctggtcaccaggtgatcttgctctcctcattttctgcctgaaaaatatcttggtcaaatctttgacccttcatattcccccatactcatgtctagctgctgcctcttagggtctcaagaagaaagggaaaatggcwcagtgaagagcggtgtcgagtctggttacctcctgctgaaagggagcattgaggggatacattgtgttttcccctttcttgctctctgtcatgaagggaatgaaagtcatgaaaacttgttcacagggaagactggattccatcaagaatccccttgtaaatggaagttgctgttgcaggccagtattgggattgcatagtcatctgtagatggaatcattgtaatcaggaagatataaacttaataagagcgtttaagaggcagggaccaaatattaaaacaagaatgatatggatgaaaggtgcaaagaacgggggaagccaagtgatttatggaaaccaatcagtaaaggttttgggccagtcttggttaccttgggaaagtgtgtgtagccatttggcttgtttgaaaatttcttggaccttaattttcacttctccagacacattaatatagatgcaacagattttgttgatgacagcacagacttctccttgctcggcttggaggtaatctagaactcatctattcaaaaaccatttctgctagtgagtttaaagacttttctagcaccgatagacttgcactagctttggctaaggctatttcaagggaggcagtaagttctcgtagtgtgattttatggtaagtaaaacctccccaaggggcaagaattgcaatgcttcctacaactccagtcacaataaatcctagggccctttttcttcttgaatggaattatagattggaagttatgctcaagacagtaatttggatgggagctattgttcccagagtgcaatcaccataatgaagagagaattatcaaggtggtatagtgccaaagcttgaaaagggtttaaataattcttagcagtgccacaaagccataagagcccaggatgggcaggtaatatagtttcaagctttttggactaagaggtcctccactgctgaggcttttaagtgggtgctggggggccatccctaggatactaggtctaatgtttttgaaaaatatgccatagggtccttagagagccccagattttgggctaagaatcttaaacctattcccctttgttcatgtacatacaaaaagaaaggcttagtcaaatctgttagggccaaggtcggggctgagatttaagcttgtcttaaagtgtttagagcatgcttcatatcattagtccaggatagaggtagttcctcaattcccttgagggctcacataaaggttttgctattaatccaaaggaaggaatccatattctggcaaagctactgtttagtttcyggagttgtcacatttaaaacgagatcttttcaagcactagagaagctctttgtaccaggggttaaaataagactgagaggtgcttgttcttgcccttgcccttgccctagtccttgtactgtaggatccctttgttgggtaggttggcaaggttgtggctgtgacagcacagaaggaagagatgtcccccttctcatgagggagagaggggcactcactcttccaatgaccctcttgtttgcaatgaggacagggtctaggggacagcttgtaacccagaggtttgggacattctttactccagtgtcctggatttctacagcaatgccaggcccccattcttttagtattatagggacgagccttggggttattagctaacaaaaaagaatgtgccaatgctgttgccgtgtatttagcttggcaacagcatttttttctcctctaattgagccttttttatttttggtgtttcctcctggttattaaaaacctaaagtctgtatttaataaagtaggaaagggagtttgtgggtcttgctctaacttttggagttttcgtctgatgtgtagggaagcctgacaaaatggattggccctcagggcttttggagtctaaatttgtatatttatgcatggcctccaccagtctagcttggaaaagggcaggattgtcagatggctcctgagtgatttcttgtaatttagaaaaattaacagattttattacagcctttctcattccttccaagaaacaatttatcatatagtctcatctgcccctgcctctgtttgggctggcatcagcagcctggtattgcaaattgggttgtgtgttggggacagcttctgcaccagctctatcatcattaggattataagcatgagcgtcatctgcccaagctggaactaaagaccatatgtgtgatttttcttcatggaagcagcaagtagttaataccacaaatatgtcttgccaggttaaatgaaagacaatagttaaagcccccaattcttgaatgaacttagagggatcctggctaaatgaacctaacttggattgaatttgcaaaaaatcaaacactggaaaaggaacataaactcgaattgttcccaaatcttcatttgccacctcgtggagagacaaaactatactagtggtatatgtgactcctgtgtgagtatgtgagagtgataaagtgtctagatatggaaggggtgttgattagcagatggagggggtgtaggtgaagtgggagcaggctgaggagagtgtgataggcaaaaggaaggatcatctaagacatagaatcagggagggaggaagttccttggaaacatatgcgacaatttttatgttattttgggttttgggataaagccaaaaagacctgaacatttgggacctctgaatcctttccaaggttctggcaaaatgaatctagttgtaaaataatgttcccgtccagggttggtttaattaagaggccaatttaaattatcgggaagcttatattgaacccaagctgtattacaaaagaaaatcatacacttctttttgagagtgtgtgggtcaaaatgggactagtttttaagtatgcaacccaagggcgagtcgagtggaattgaagaatgaattgaacccatattggattttggtaaaggactacaagatccctggggcaaccctgagggatttggacctccctttttccattggcttgctctattcagtgatgttccaccatggatatagggcctgcccttgcctggatgaccagtccaagagtgcccttgtttgagtggtcagctcaaacctaacgtgaaggagaactcacccataacttgggatgaggtgcttgtgatgaaggtgaatccaaaattgggtccacaaccagtagagtgtgtctgcgcagagttgagattgctgctgctcgtttccaagtcacggtttacagagtgttaagtgaaagtggacttgccatcctgacgggcaatagggaattcactcttttgtcttggccttcccgtaacaccagggagtgccctcagccagaaaccctcaattaccaaagaatacttaagctgattagctggcagtcagaaaacagaaaaaatccctggccagtccctcacccctaaaggcaatgacagacaggtgtcccttccctagggcttcaggatctcaccgaagagtggcctccgccaaggatcttcagttcccgagagtaaagaaccagatcatcaagggaagcagggaggaaaaaaagaaaggagaaatcccagtaaagtctcactatgggcgaccaagatgccgagcaaggtatcagagccccagyatcraaaagtggtcagctcatgggttggtaagaagaatttaccaacgacagcataggtttgaaaaaggaaagttttgtttgtttgtttgttttgagatggagtgtcactctgtcgcccaggctggagtgcaatggtacaatctcggctcactgcaacctccgcctcccgggttccagcaattctcctgtctcagcctcccaagcagctgggattacagggccctgccactgtgcctggctaagttttgtatttttagtagagatggggtttcatcatgttagtctggctggtctcgaactcctgacctcaggtgatccgaccgccttgacctcccaaagtgctgggattacagacgtgagccaccatacccacctaggaaagttttattagaaagaaagaacactgtagaagagtgcagcggggtgcctcagcaagacgggactgacagcgtcgtggtggattttttcctcagggatatttatggaccttaaagcaggagcttaagggtacttgggagcatattggccacataggtcatgataaatgattacatctgtagatattttggtgccttaatgtcagcaatgcctgtgatttttgttgttgacaggtacggctaatactacagtggtttgttacctacattcatagtaaaaaaatattaatttcagttagaagttagcaaaaatgagtatgtaatttttttttccttttcaagatcacagatcctcctgaattctattagttgacttcaagttgagaacttctggtctaaaaatctgtggttttattgtatacctccaacactggatctgctagtgtgtcctgagaaaactcccattaaatagcaaactacatgctcagagacaattgccaatcttcacatatccctcacctcttcaagtcatagagaactggtcaggagcatatgcagggcctggcatctctgccacttgcatagtatctgtttgtgtctttttatccttaaatctctcttttgtcctgtccctgatgaccttagggcatgttcttttttctttttactttttttttttttcagtaattatggtttcagtttttatttccctctagggaaaacctttaaaagttttattttaatgtatcacagatgtaaactggagggatttccacaaacatgagtgctctacacttgtagtaagagttgttagctccaaatttttattccaaacaaacatgaaaacaattgaaaataatgagacgctaactcatgctcatatttatcaatctaagtggtgctaaagaactttcatccccatgcaaaggactttggtaactgataacaactgaccgataacagatgtcaygtcccactttatctttttaaacattctttttgagctcagcaaatttacaatggtatattcaccatgcatatacactgtaattacaacttcatttttaaattttttttttttttgagacatagtcccgttctgtcacccagggtggagtgcagtggcgtgatctcggctcactgctacctccgcctcccgggttcaagcaattctcctgcctcagcctccctagtagcagggattacaagcatgtgacacctcacctggctaatttttttttttttttgtatttttagtagagatggggtttcaccatgttggccaggctggtctcgaactcctgacctcaggtgatccacccgcctcggcctcccaaagtgctgagattacaggcgtgagccaccacgcccagcccatttttgaaatttttaaggaactcattcaaagcacaacatagaaagtggacacagatccagagccttgcttatcagctgctgtagtaggtcatgttgacatggtcgaccatcaatcaggatccyaataagaaacacatgacaaactcagctgagatttttgtatagagttttaaagatgggaatattcacaaaagtatgagctgggttaagaaaactgacaagggatattgaagcatccagggactagtcatgatgggaagccactacttgacctgacaggatatggggaggaaaaggtgttagggtatcccagctgagagctggagctgtggacaatgacaggacagaagctatagttagaaaggggcaatcatggccatgtctcagctgtggaagatggggtgaggaaagatggtgacagtgatgaaataaataccatgactgttctctcctgccctttagtctcttgtcaatccccactccaatgccccaacccaaccagaagctaaaaggcaggggcacccaggtgatgcattccatgggggtcagagcaggacagagaaaggtggaaaatcaatgtggaggagagagaaacagagaataaccagtaccttccctccacacttttgaacagtgtttttacaaaaatagggtgaggaaattgaaggcagtaatctggtttaaaattcaagtccctcttaagatgatgcttttaaggaaggtcttgtctgcctagcattccatattgatcaaattgtgtagataattgtttgtttaccttaccattttactttgccttcctggtcccagtcagtgggaatgcctagagctgcatctcttaagtgagtctgatttgaacttaattgcttatctgctgaaagaagggcactgcctggttttttaaaaatcattcttgttcaaattgtgtcttgaaatattgaaagttaaaagaatgatttaaagagcctggacttaaaattgcccagagctgcatgattcagaggattctctgactcttgtctatttagatggaaggaagagtaaacacgtttataaatgtcagacatggcccctgtaggggctattgatgcagacagccagagccagcgttaaaaaaattatccaaagggcttgattcaatatcactgctgaccagaagtctgggaaagaactgaggtttaggtgcttgaaagccctaaattacccttatcctctgtccctgcacataagaacttctttaaaggagcagcagttcttgtggtatgagcatagaagcttcatcttcaactgttgagtagctgggatgctgtaccttccaccccaccacaatacatccaataccttgctctgagcttaagtcacctgtcacttattaaggaactaaacaacatacatttatacttcttgaatcggggagggtcctctgaggatttaattaggtccacatatatcatatctcagtgataccatcactagttatcaccatgataatcagtgaagccccttcccataatggaatgggttatacttcaaagtattattctgcttgttttcaatgttctcccctgctccctcttctctctcactgatatacgatggttcaatttcactcttccagtctacattgaagttgaaataaagttacacagaaaacataaaagaaacttttaaatytatgtgtcaaatggaaattcaaatggaagaggaaggacacaaggatgggcggaatgaactttctgtcatgaaaaccaaagagccaaataaaagggattcagtaggggctgttgttgaatgcagattccccttcctccacccatgccaactcacagcatgtagacaggccacctttcaataatattggatatttgtaagtcttctccactcacacccacctctgaccaaaaggtggagatgggaggcatgaaaggagaacctcagcccctggtaaggtagaactgaacagggccaattgggagtatcctccttgggcagggcaacagtagacacacatttactgttctacattcatttaaagaactgtatcagaaggattaagttcagctgcttttgacagaaaaccccaaataatagtgacttcaaccaaaagaagcatatctgtcatataaaaatgtctagcaatgtacatactccttctaattattctgccagctttcttctatctctttgtctcaggtggcaatgaaaagaggaaggaaagaagagagaacaatctttccctttaagaaaactttgtgggagtttcacatgacatttccaattatatctgttgaccagaacttagtcacacttaactggaagggaggctaggaaattatggtctttattctgagcagcaaaactgtggttccatttctaaggaagaaagagaaaacagatactgggggataactgtctcttccacagagataatcacagtgatctttcatttacaatgaagtagaagattgcggggagaaagacagatgaaagaacagaaataatgctcagattcttggtagttatgctttttaagagtagaagtatactaagaaaattggtgcctcataatgtggcaacagacaaataaaaggtaattttaacatatctgtactacatgcaatagaagatataatgcccacaggaggaccagaggctagacatttattcaggactggagactggacaaaaagggctgctgtcagggcctgctacataatttgcatgggccagtgcaaaatgaaagttcagaactccttactcaaaaaaaggcatgctggcagggtgtggtggcacacacctatactcccagctactcagcaggctgaggcagggggattgcttgagcacaggaatttgaggccagcctgagaaacatagtgagccccttatctcttttaaaaaaaaaatcctaacactatgcaaatagagcaacaatgggatgacaaggaacagaggacatgcatattacgtggatctcctcagctcatatgcatcctccattgcccagtgaagtctctttgggcttcatttaaaaaaagcaagttcaaaggtaaaatcattaagcatttcaagacagaaacagcagggcattaaacctagggcaagacccttctaagaaaggggccctatatgcccacgaagccagccctgggtgctataacaggcatggacatgcatcactcatatccttcaagaaggctcctgcacagatgtgagaagtgtggctagctgacagccccttgctgtgattttcttcaggatctgcctcagctttagtgttaacttcacaatattcttggggaaacacaagccaatgactaaacaaaacagtcttcataggaaaacccgcagtgaatgactaagcaaggcagtggtatggagctagacatttattccagttgagtaactccgggcttctctgagaagtatctttcactgggaactcccacttggctggcagagactttccagatctgcatctggatagccctcttctgamgtttcctttcagaaagagagataaagtttattttttgtttgtatgaagatgaatttcttttgccttcacaattgaataacaacttaccttggtaaaggatttttggctcaaaataacttttcctctgaaccgtttctccccagtgcctaatattgagcaaatgtcaagcctagagaacagttaaaagaatattttgaccaacaccaacatagtcttgacctggactcaccaattgtcatagatattaccacattttcattatttgtctattttctttttttttttttttttgagtcagagctctgctcttgttgcccaggcgggagtgcaatggcgtgaccgcagctcaccgcaacctccgcctcctgggttcaagcaattctcctacctcaacctcctgagtagctgggattacaggcgtgagccaccatgcccagcttattttttgtgtttttagtagagatagggtttctccatgttggtcaggctggtcttgaactcccaacctcaggtgatccacctgctttggccccccaaagtgctgagattacaagcgtgaaccaccgtgcccagccttgtgttttttaataaattatttaaaaataagttgaagcactcatgacatttcacctcaaagaacttcagcctgcatcttctaggaataagaacattcttggcctgatgtggtggctcacacatgtaatcccagcactttgggaggctgaggtgggcgaatcatgaggtcaggagtttgagaccagcccggccaacatggtgaaatcctgtctctactaaaaatacaaaaaaattagctgggtatggtggcgggcacctgtaatcccagctacatgggaggctgaggcagaagagtcgcttgaacccgggagtcggaggttgcagtaaaccaagatcgcaccactgcactccagcctgggcgacagtgcgagactccatctcaaaaaaaaaaaaaaattctccccataactatagtactattatcacatgtagtaaaattaacactaatcaataatatcatctaatatgcagtccatatttaaatttcctccattgtcacaatggctttctaattttccaaaccagaatccagccaagttttacaaatagtctttgatcatgcctctttattctcttaatcttgcacagtcccaatactttttagtttttttcacattaacttttattgaaggatccaggccagttgtcttgtaaaacagcctgtatctgaatttgttggattgttctctcatgattggattcaagttaagcattttttggtaagaatactgcataagtaaggttgtgaactttttttttttttttgagacggagtttcacttttgttgcccaggctggagtgcgatggcgcgatctcagctcaccgcaacctctgcctcccgggttccagtgattctcctgcctcagcctcctgagtagctgggattataggcatgcaccactacacccagctaattttgtatttttagtagagacggggtttctccatgttggtcaggctggtcttgaactcctgacctcaggtgatctgcccgcctcggcctcccaaagtgctgggattacaggcatgagccaccacgcctggccagttgtgaacttattacatgacatcaaaggacatattatattagattattgatgattgattatcttaagtttgatcatttggcttaggtggtaactgccagatctcttacctgtaaaggattgtttttccctttataattaataaaataatctgtagggtgatacttggagaccttgtgaatgaacaatttcctaataatctttcactcctggtttttagcatctgctgagatgcttgaattgattactacaagagttcaaagtggtcgtttttaataatgccttctacatttactacctgatatttttctgtaaagaaaaactttcctttttaacatctttctccttatgttttattaacttatttattttggtataacacaatgggctgatggattttctattaatgttttattattgtcatcattttttgatgctcaaattgttccaacttcaggcaacattacttatagcaaaaaagtgcctctgactggtaaatagcatctggactggtagacttcataaataaactctaaatgctcaatgcaaataccataattttgggcttcctttagtgtggtaactgttataattggctatgtcccatgtgagggatcctagaaactatgcctgtgtaattattacaaaagttattggctcctatggggcataaggctgctaaatcaggctaagttccactgttgtctgaagtgaaacttgttcccttgtacgtaaactaccacttgggaaactaatgagaatagccgcaggatagctagtctgactgctctttgatctgctgtaagaacacccatggaaggtaaacgctccatgctgtcctgctggcaagctgtggtttgttgtatccctttgagtgtactgatgccaaatacagtccatggtagttttgtgagtctgaaggtttagttggacccatgaagaatccctaatgggagttgcactatttaaaaaagaatactcagagaaacttcacttccattcctactccttccatcccattttcattcatttctccatataygatttatccttcctatatatttttgaaaatataagtaatatatccttacacaaagatacaaatagacatacatacatatagacatattcaaaggtatgctatatatatattctctcataccttcattttactacttttttttttttttgagatggcgtttcactcttgttgcccaggctggagtgcaatggtgcgatctcagctcactgcaacctccgcctcctgggttcaagcgattctcctgcctcagcctccctagtagctgggattacaggcattcaccaccatgtccggctaattttgtatttttagtagaaacagggtttctccatgttggtcaggctgctcttgaactctcgacctcaggtgatccaccctcctctgcctcccaaagtgctgggattacaggtgtgagccaccgcacccggccttcattttactacttgaaaatatatccagaaaatcactccatattccataccagttcacagagatcttctttcttttcttttttgtaatgactgaatagtgtttcattgtgtagacttatcagtgtttatgcaaatggtcctctatagatgggcatgtaaattgttttgaatattttgctattcaaaataattccacaatagataaccttgggcatattttttcactgtttgtggaagtgtattattaaggtaaattcctaggaggattgctgggtcaaggggtaaatgcataggtattttgttagatattaccaaattcctcactatcagaggctgtaccatttgtacttgagccagcaatgtatgagaatgccatatgtgtctatagaccaagaatagcatttttggcccagggcagtggttcacactgtgaaatagtgaggaaatcataaggagaaaatgcattgagatatacatggcataaatgaaaagtgagttggctgaaataagaacttaaagtaaaaaacaaaacaaaacctaaaatgaaatgacagttaaaatctgcattagaagcagtacaaatagaattagaacttcagaaaattaaatcagtaatgtgaaggataaatttgattagctctcaaaattcagaggaaaaggacaaagatgacaacaatgataaaggacatagaaaggtgatccaacaagataactataggtgtttctgaggaagaaaccaaatatttaaaacagataaaataatccaagttatagtagagaaaaactccttgcccaggaatgaacaaaaaccccaaattaaaaacccacagattgaaaggatttatgatactacacacacgcaaatagacacacacagacacacacacagactcttattatcctcacaaatttgtttaatttcagggataaatgaaacaatttctcaagagtattctgtaaacgaagacttattttaaaagatgtgagggctgccaaatagaaatttttcaaattgatgtctaggaaatatcatcacaattaagttaaccagtcatttcattgatgaaatgattttgaaatttatttaaatatataagaatatattaataaaaggactatgtaagaatattgctaagaatttgttaaaaaaactattgggaagggactaatctttctatctgataaaatctaataaggcaacaataagtaaatcaatgtgacattgatggtaatgtggcaaaaataagcaggtcaatataacacaagagacggttcaaaagcatatcactgtttatgttacatgaggtaaaacaaatcagtggagaatggaaggatttttcgacagacagttctcttatgattggttagctatttgtgtgggggagcagagaatccatttaggtcctcaccttatagcacatagcaaaatacataccagtagattaggcttaaataattaaattttaaaatatcaggttgggcatggtggctcacgcctgtaatcctagcactttgggaggctgaggtgggcagatcacttgaggtgaggagtttgagaccagcctggccaacatggtaaaaccccttctctactaaaaatacaaaaattatctgcatgtggtggcgcaggcctgtagtcccagctacttgggaggctgaggcagaagaatctcttgaacccaggaggcagaagttgcagtgagccgagattacgccactgcactccagcctgggcaacagagcaagactccgtctcaaaaaaagaaaaaaagaatttaaaatatcaaaccatcaaaaaactattataaaagaaaacagattttttccttcaaatctttgaaagacaaagcccttccaagttgaaaaacaatggaagaaatcactaaataatagatataaccacataaatttatttatttatttatttatttattttattatactttaagttctagggtacatatgcacaacatgcaggtttgttacatatgtatacatgtgccatgttggtgtgctgcacccattaactcgtcatttacattaggtatatctcctaatgctatccctcccccctccccccaccccacaactgtccctggtgtgtgatgttccccttcctgtgtccatgtgttctcattgttcagttcccacctatgagtgagaacatgcggtgtttggttttttgcccttgcgatagtttgctgagaatgatggtttccagcttcatccatgcccctacaaaggacatgaactcatcattttttaaggctgcatagtattccacggtgcatatgtgccacattttcttaatccagtctatcattgttggacatttgggttggttccaagtctttgctattgtgaatagtgccgcaataaacatacgtgtgcatgtgtctttatagcagcatgttttatagtcctttgggtatatacccagtaatgggatggctgggtcaaatggtatttctagttctagatccctgaggaattgccacactgacttccacaatggttgaactagtttacagtcccaccaacagtgtaaaagtgttcctatttctccacatcctctccagcacctgttgtttcctgactttttaatgattgccattctaactggtgtgagatggtacctcattgtggttttgatttgcatttctctgatggccggtgatggtgagcattttttcatgtgtcttttggctgcatgatgtcttcttttgagaagtgtctgttcatatcctttgcctactttttgatgggattgtttgtttttttcttgtaaatttgtttgagttcattgtagattctggatattagccctttgtcagatgagtaggttgcaaaaattttctcccattctgtaggttgcctgttcactctgatataaccacataaatttaaatattatgcatatctaaaatgtcataaacagcactaaaatacaaattggagtaaactctcttcagtgaaaatagcaagcaaggggttactatcttttataaagcactttcagaaatcaactgcagaaaggcatgaagtgatcattcacaacagaagagatggaaatggctataatacatttttgaaagatgtatttcaccagtaagcaaataaatgctaatttaaatagcaacgccatgctgatttttcacctttcaagttaagaaaggttaaaagtgaacttgtttattgtcggagtgggtatagtaagaagatagccattcttaggcattactaatgaagtataaatttgtataatcttttggggaagtaatttggtaacttcaatcaaagagcttaaaaatgctcctactttcttacctcataatcctgttttaggattctatctcaaggaaattgtaaaaactacatacaatattttatgcacaaaatgttcgtctccatgttatgtattatattaaaaattggaaagtactaaacgcttaatgttagagggtaatgattaagtagactagagtaggcaattgaacatagagagtgatatatatatatatatatatatatatggcatgaatatataatgtagttttttaaaaattaaaatgtgaatatgtattgagtaattcttacatgtctggtactaccctaaatgttttaatgcatttgctcacttaaccctcgcttcagctgtgctagatatcttcattttgcttctccgggtgctactaccacacttctctactctgttctggcccctgaaggctgacctgtgtcaactaagggaaaaaaatgaagcttttaaagaattacagttaattttatacagaagtcttactggagactatagaccaaggcttatagctcgggagcagttccatcagacggctcgggcacagtatttcagcccattgcttatagacaagcgtgggagttcagtacctgcaaaattgcatcaaacctgcttggaagttacaatgaagcagaatcacatctagatttgggtgtaagagtacatctggcaacagattacggaagcataatcaccaaccccatcagacgttaccttatgtgtagggaaaggcaaggactagggtcatttatcttctaaggaatatagtgactcagacaagaaacatggggggccgtgtgctctaccctgttgtgtcttcaaagcatccttctggtgagctgcatatcttcacagagtcagaggctttgtgaaattatgctggcaagcagaaatgagcaaacatggcttcttggcacttgctattttgtctcacacctgtatggactgcatcaccaagagtctcccttgttttctagcttctggttgggttaggtctatgcagaggaccagcaggagactggagggagggagattacgtatttattctcccagcttcctacctgcgggtttcctgtgggctggctgtctccctgaactaaaggccacaccttgtgtcaggcagccctttcctaacagcattgtcactaaatttctggtgactgctttctcccmctacctgttcagagtgataccttcttgctgttaccaacccagrgtactgcacgattccttacggcttctctccatcttgcccacatctttgaaaatagttcattgatgatacgctcttgaaattacttaatttgagtttgctgtttcctgctagaaccctgactgattcaacaacttataggattctacgattctacggctgggacaacacgcagagagaagtctagtaatttgcctaaggtcacacaagggaggaaataatacttatggaatgtttcacagtcattcttttatttgtttatttaaaatgaacttttattgttttcawacaacacaaataaaatgaagagagaaaatactcatatttctactcatcgatttccatcctttatttaatgaaacttccacattttcatctccatccaaactcttgctttgagtctcaggctttatgttccgttgcctactctataacattcatctggatgtctcaaaggtacttgaaactcatcatgtccaaaaacatgctcatggtcttccaaattctagctacaaccaagtcctgtcaaccttatatgtaaatgtctctaagatagccacatgtctccagctccactgccaccacctacctcagtctaagacactttcacctcattctttaaagaattcctaactttggtctaccggtacctatctactcttgcccgattatgcacatggcaggcagatagacctctccaagttgcaatctaggtatattgcgacttgcctaaagtcttgcagtggcttttgttgctcttaggatcgaggccaaggatgctaccttggcccagtcggcctcagcagcsttgtctcccccttgcccagagctccacagagtaacttttagttgccttaatgaactatgctttttttctaccacagggcctttgcacacattgtttcttctttctaaaacatttttacactctctgtcccaaagttaatctccagaggggtcaggactcaggacaccctaacactttcttatccatgtggatctttctaatataacatttgtcagagtttgtatttacacatcagatagacagttgtctatgtcctctattaactcatccactagactgtgtgttcgatgatgatggtctctgtcttgtgttgcctgtgtatcccagtaccatgccctgtgcctagcacatactgtgaaatcaagtatttgaacgaaaataaatgaaaacaatgagaataaggagaaaggtggacagaatcacattagaaagagctgatttcttcatatctagtttttcttctctctatgctcaaagtctaccaagataaaaatgatttcaatttagtcataagtctcaagtccttttctaggaagtaaaagttattgaaacaggatgaagaaaagactaaatccatatttctttacagtttattcaacaagatgtttgatacagaatggggcgaggggcaacaggaggaatgtttataggtgggagcagacatcattagcttcctcgagttctcatcactttctctaaatttacgtcacgatttcacctatttttttttttttttttgagacggagtttcgctcttgttgcccaggctggagtgcaatggcgcgatcttggctcatcataacctccacctcctgggttcaaacaattttcctgcctcagcctcccgagtagctgggattacaggcatgaaccaccacacccggctaattttgtatttttagtagagacgcggtttctccatgttggtcaggctggtcgtgaactcccaacctcagttggtccgcccgcctcggcctcccaaagtgccgggattacaggcgtgagccaccgcgcccggccagatttcacctatctttgagagttccagtaatgacaaattcagcttttgatgacaaattcaggataacaaaaagtggaaaattaagaaagggataaaactagcaaacagaaggctggctgcacagtaaaatatgtgcactaaatagcactcttttcagtaggatggggaaacacatgttttcttatttcatttgtttctgcaccttagccatccctttgaccttttaaaatgcagtcccacttaatacatgataggtgagttatttttcttgcctacttgcttcgatttgggttaagcgcctcagcttgaaaaaccccacagagaaccaacaattgcctggtctcccccaagtgacggttctcgccccgccccgtcccgtctcgcctcgccccgcccctccccgctcctccccgcccctccccgctcctccccgcccctccccgccctccccgccctccccgcccctccccgcccctccccgccctccccgccccgccctcaacctagtgagggctggaggctgcgcagacctcgacgggccctacatgacgtcacaaaggggccagaccaagtggggcagcaccctgcgaccctgcgatcctgcctggctcagccgccttcatatatctgcttccttaagtccactcttgcccagatagctttcagttaaaactaaagaatgaaagcactaggttgagagcccacgcggctacacccacatctactcccccactctcgccaggcaaccgcgccccccgcctgcagtggcatcgtccggccacgcccagtggcagggtttccagcgcgagcctgcaggcaggccgggaaggcggagccaggccggcctagagtcacttctccccgcccctgactgggccgggagcccggggctggtctctaagagtgggtaccgagaacagcctgaccgtggagaagggctgcgggaagcagaacaccgcccccagcgcccagcgtgctccagaaacatgagcacaaacgcctcagcctccttccccggcggcaccggcaccggcaccagtacccgcaccagtaccggcaccggcaccagtacccgcaccagtaccggcaccggcaccagtacccgcaccagtaccggcaccggcaccgagcgcaaggcggagggcccgcccgaagccgggggcacaactgcccaggtcccgaacccggactccagcttggacgacacctcctacagcctgtccgaatggagcgtccgttctgagtggcggtccgtctcggatccgctagccagttcccagtggagcacgtcctcaactgccgaggccgcctcctggagctccagcatacactccccaatcagcactaccggtcttagcgagagtactgactccgactccaagagtggcctccggggtttcagcgcttacaacccgagcagtcggatccccaagtctaccaccagctcgaactcctccgatggggccgtcacagcctccaatcaggacaccggcattccctgggtattagtaacaggacctaccccgcccgtaaactcccccgtagagtcattgcaagggtctgccttctcctcagggttcagcaccccacggggtttggtaaaaggaccgaccctgcccccggattccaacctgacctcagtgtccgactacacttggatatttgtacggggacctcctatacccaatgacctttcgcaagtgtcaatacaagcacctcctacacccagtaacacccccgagtgtcagtacaagggtctgccgcatcctcagtgtccagcttcccctggggtttggtaccaggaccacctctacccaataacatttccccagtgtcgccacaagcacctcctgcaccccataacatccccccagtgtcaaggcaggcgtctacccccacctcagtgcctgacactccgcggggttcaatacaagaacctcctgcacccagtaatcctttccagctgccgacacaaggacattctaaacctaataactctcgccgagtgtcagtacaagggtccgccccgctctcagtgcccagctccccccgggtatcagctgaaacatcagctccgcccctgggcgctcccggagtatcagcaaaagggttcgccccgcccacagtgcccggctccccccgggtatcaaaagaaggatcggctccgcccccgggctccccgggggagttgatagaagggtccttcccaccctttgccgtccccactcctgtgcctacgacccaggagcgtgtcagccaaagcatggagaatcaagagaaggcgagtatcgcgggccacatgttcgacgtagtcgtgatcggaggtggcatttcaggtcagtgtggaccgtagcggtggcctgggggaccctggccagtgaggggtaggggaacctacagtagctcttgtggtgtttgggggtctctcatgcatgcgagagtgtagtgtagccatggcttggccccatatcctgcgaggtaggagtgggggttgtgccagttttgctggtggtgtgactgggggaggcagacacaataattttactactactactattaaatactaatatttaattagctcttgctgtgcagttgtatttagcactttacgtggattttctcagtcctcaacagtcctgtgaggtgggaactaaattcatccccgttttgcaaaaccaagaaactgaggtctggggagtttcaataactctcttgaggtcgaatcacctagcttgtaagtggctgaacgattttctcccatttaagacctgcagtactaattcctgaggtggctgctttgcctcactgatttcatatcctttgccctaaacagaacatcaggatacagatttctgtagtattgagggagcagtagtgttattccagtcctgctcttctctattttccgtagaaaatttagtaggtgaagaggaaggaggtagactcctttaagaaaaggttaaaaaaaaaaagaggagaagagggggtgagctcttaaactattcctgtgtgtgtgtgtgtgtgtgtgtgtgtgtgtgtgtgtatgaactgtgtttatatatatatatgaactgtgtttatatatatatatgaactgtgtttatatatatatatgaactgtgtttatatatatatatgaactgtgtttatatatatatatgaactgtgtttatatatatatatatgaactgtgtttatatatatatatatatatatgaactgtgtgtgtgtatatatatatatgaacttgcaggaaggtgtaggacatttattgtccaaagagaatccctttatgaagcaggggctgagtgccctgttgtatcctccttcctcctttcactaagagctcccaccacctgaatcttgtcttctgatgagccagttggtgggccagggtgcccctggtcctggcttggatttgtggctaaccaagtgagtggtgcatgaggctttccaatatcttcctggaagcctcatcatgattgatatattgtcgcctatgttgccatcattggtaaaatgtttgaaaattaggaattttgttgcctttcatccctggctagaataccacactgacctatcctccccctactaggtgttaataatttctgagttatccctgcaggatctgattcagaaagagaaagctgatgggagggagtaagtagagtggccccacagtagccatttttatatataaatctttcgaggagactctgaacatgctacaaattaatgttgggtagagatagctttatctgaacccaacattgtttatcctgaacaggccaagagaagagattggcatgaactgttgctttgccagttccagccagtaccagcaaaaacatacatgtatgttggagcatcagaggaaagcagctcctggtggagagtaagaaaaaggagtatttcagcttgtttctctttatttatttatgtatttatttattcattcaaaaaacacttgttgagtacctgcaatgaagtggactgctgtttcccaaaatctggtcccactaggcaagcctcctaaaagcartatggttgtagatcactggaaaataaatatgatgacaatgtgttatatacattgactaggggttctgggtcctctcccatctccataccatctgtattctgcaattcagagttctttctgggattttattcttagtctttttcttgttcagtctccagaattccttaaggagcgcggtttttttatttttcctctgcctgattacctgctcttcctccctttctatactttatgctccatacttggtcattagcagaggtgaaattaccatgtagctgataaactttatgctttatggccttataactgtaggttgcttctggttctcattctaaataaataaccagtttcatactcagtcctgtatttgcaattttgctttcttatttcttagagaggatacccaagttatatataagttgtaggtcccacaaaacctgaatctgtccatagtcactcttaattattaatttatttccatttgggggaagtagagggcatttcttgcacagtagttcacacctctattccagaggccagcttcagtgacactggaaaaagcacttgacttcctctaatgccatctccatcagtcagatctgagtgattttaatactcaaactgaccagaaacattgctttctatctgtggtaccttcccagatggttcacagctaaaatgaaagtagttgcaagtgtggctcgtgttagatcctggacataaactgagtgtttcatgagcgggtgagaagcatcacttcccaagcattcttgtgaattcagaaacataccatttttgtgtgtgcttggcagtatcccatgaaktacttaatagtccctgtggcagttttatatgcctttggatgttctttataacttttattaggacttgtacactttgataggttacccacacattcataatacatcaccaatccatagcatcagcagtgttatttctattatatagcacccagaagagtacatattctaagtgacattactcaaaattgatccatattagcaacattttttaaataactctctacacagagaatagcagcatctggatgtatctccttttttgtcattataaaacataaaatagactatgtcttacaaccacaaactctttttatctgcctaaccaccaattaaataattatatatagtatgttaatagttgagaggggaaataaccctgctgatttgttggtctagtggtatctttaaaatgctctggtccttaaccatcattcatcatctatcacccattcctttttgaaactcctttcatgttttcagcgatgctattggatcctgaatttttatcccatactgattgctgcttttccatccctttcattgtgctcatattcttgcaaacatctggttttgaaaggtttcactgttcatcactttggggctcttggtactctctccctctctttctcattctaggacttcagctgtcccttatctatagaaaactctcaagtctctgatttgaatcctcttccttccctgaactcctgtcccatagcttatctgctcctgggtatttcacgattgaacacttcaggttcaacatgtaccatagctactgtgctagccaatccagcttcttttcctcagttccttgactctgttcttagcaccaccatcccttctataatttttgacataatcttttcttttatcttctgcacccttttagcagatccttctcactcttctttggggctatctctcttctcctttctctatgatgacctccctccccccatcaccaggacagactcttttttaaaaatattttgtataaatgtaagggatacgactgcaattttgttacatggatagattgcatagtggtgaagtctgggcttttagtgtattcataacgtgaataatgtacgttgtacccattaggtaatttctcatcatcctccttcctcctgccccacacccttccagtcaccaatgtctattattccatacctctatgtctgtgtgtgtacattatttagctcccacttataagtgagaacatatggtattggactttctatttctgagttgtttcacttaagataatggtctccagttccatcaatgttgttgcaaaagctcttgacccctgaagctacctggttatgacccccttcccagtggccaccctttacaataatggctctccctttatgtccatcctgcattcagtgttctcccaaacttgatttttcttaaacacttctttcatcaccttgcccctctgctcagggccttcaatggtctcctattagcagcctcccaaacacctccctatcccgccccccatcatgacaagtagcatttcctactattttccaacatggatctgagctttagtctcaccgcctcgtgtcctcaggctacactacgtttatttagtcccttcatgccttttctgtttttatctttcttaacatggaagtgcttttctcttacatttatattctatctatccttcaatgcttggctgaagatcctttccttgatcactctggctcccattgatttttctctcctcttgtagagcttgtaatctgtacttaacaaacaatttacacttattttctatctcttatttcatgatttgattttaaggataatggctcagtcactgaattcagttgttagttcttactcatgagctgccacagatacaataaatgacagaaaactagcggtggaagatttttaaatctgccctcaactgagaatttctgaaatggttctctttagtagagaaaaaaaggaaacaagaaaaaagcccacctccaggggacaatgtatacttccttcatgagtctgtttggaatttgagtctttgggtcaaaggggttttaaaaggcaatctagtccaatcacctaagattttaatcttcttaacagcacctcgctagtgattagagccagatggctgtagctttgaacgcatttaaggataggaaatgctcggtctctcaaagcaactcattacaagtagaggtagctctggctccttgtcttgtttaagcatttcaagaacctctacctatatactaagcagtgactggggatcatggggaaagaaagagatatataatgatgagtaagtagcatccctgtacataaggtacttctatcttctggaagaagtaatcaagtgggtgaataattgacatgaatacagtgagataataattgatatgaatatagtgagataaatatcaatgtggtgagataaatattaatgttttgaatatgaacaaagtgcagggatcttgagagataagtagaattttaacaggtagagataagaggatggaaaaaaagacataccatacaggagagactagaggaacacagatacagtcatgagggtataagccagatatgagcagtgcttaatttcccaatggtgagagttccagggaatgaaaatagttgtttcctatgcctctaggtatgtgatcctggtagctattgagatgagcccagtgtgccacatctacccatgatttttgttcctgtgtgagctgtgaatggttagcgagcgcacagtgaaaatgccttagtcataacactggattgtcctgggtgaataaagtgtttcttcatttttttttattttgcaattaaattccaagtgtcacgtagaaagacctcttcatgtccaaatagtgtttaagcaatagaactcctctctatttttgtccatcagctgagctctgctgaaagaattgagaacactagctgcccagaattcagtgctgtataaaaccagcaggaatgaatttttcttatcttctgagagacagaaaagccattttgcaagagaaataactaatgttcagcattccgatgattgagtccacaacataccacaatttccctttttgctgaaatatatcacctgtaaaaattattctgctaggaccattttaggcattttaacccagaacttggcagcatgtactgtgtggttttgcagtgattaagaaaagcttccatttaagaaatgccacttatttttggtgtcttagttatttaaatactctgaggttcaatgtgggctgagcattaattttttgctgtttaggacacttctctgcccctaatttatattttatttttctaaaaaataaactagggtgtttttacttcataaactttttaaatactaaacaaagaatacaagaattacatttatttgtgttctgattttttttttttgaaatcttcatggttgaaggagcttttggatttatctggcattaaatgggaaattttagcatttagtcaatactaattgatttgaattgttacataatcctcagctattgtgaaaaatgtatttaacaatagatctaggtatagcataattgcatacattacagagaccaataatggagaaaaagaaacatggaacaccattattggtgaatattgggtcacaatctttgtgcagttatggcatagaaatattttaacctatgaaaaatcttgcagtatttgcattcaagtgtactcagaaagactaaggttgtattctagttttatattacatatagggtgcccagccctgtgatttagaaagtgtagacacccgataaatagttgttaaggaatatacttgtatgtaggagatgtatagatttcataatgatagggttttttttttcattgtaattagaacttcaaaaattgaatcaaaacattttctaaatgttgtgagcatttgagacaaattgattgttgggactgtttctcctcctttatcatgacaaatattttatatttttaccagcaatttgtattttccttcaaacaatctatttcttgttatgttgccatctgtcattgtgtattagggaaatttaaagtctttgaactatggttttgtcatccaagaagttggattaagttatatgtgatatatcttctggtatggatttttagtaattagtcaatttcatgaagatccgtctctttagctttctttcttggaccctcctcaacgtttttttcttctatgctttattctgggaagagtttgcattatctgtcatactgacattcttcacaaacttgaatcagggcctgggtctctccacaggtgctcattcacactttccccatggcttctctgagactttgtttaaaacccttttctagttgttgctaggcaaaagtaaacaaagcacactcaataacaatatttaattgattgactaagagtgttaagaacataaaaaacagatgataagatttaagagttgaagtaattatatattaaccatgtccaagggttatagaatggtggcctgtaagagcccaaagggactgaaacagaggctcagaggggtccagggaattaccaaatgccacaaaattcttagctgtttaacttgtccttggatgcgtaaaatactgacttccaggacagtgctctttctgtacctcacctcactggacctgctttgtcagctcatccatagatctgcagtaaaccttattattgctttactttgaacgttgatgctctaaagcatagtgactactgcttaacagtaatttatatattataagatatcacaaggaatgttattgctttctgaacatttaaatttaaaaatatgggacaccctattaaataaaatgactttcatatgacaaatctatttccttgttggaaaggccattcctggtgcatttaggatatgtagagattgttgggatagtttagatcagtgattcttgaccttttggaccaaatgtctcttggaaaatctgatgaaagctattggacgtttcaccaaaaaatgcgtatttttacgcatagatgtttttctcctctgcaccaggccaatgttctggaaacctcttctgcgtcactgtcctaatagtgtaattatttttagctgatactgagacttcacgaaagtggtgaaaaatatttcagaggattcattatatcattagacagttactagtaatgaatttttaaatagaccatgatgaagagtcaaaacattcaggctggacacgaaggcacctacatttgctatattagctctatgataactagagaagtgaaattgacatgttttgaaaagaaagaatttgggagaaaacattggtgaaggaaatggaaggctgtggtggttgagatttcttttagtagttttcaaagattgtttatttaaagtatcattagcccatcgtctattcagtgacttgtgtgaggcatagaatctgtgtaacctctgtgtcacaggggttacagagatgagcctgaaatgctcttcaaagttggttcagaggtccaatgtcagcacagaggagggaggagttaattccacctggaggaagtgacaaggaaaggatttcatggaggaagtcatactcgacagaagtgtcatagattttggataaattctgaaatgtaatgaagatgacctttaaggtgaccgtttccagattaaatgagttagcttggagctgtggcctaagttgaagaccattttcttgcttgtatgtatctgttcattcattcagtaaatatttgtcaattgtgcatcactgtatgccttgagtaaaatttgtggggtttgctctcgcttctctgctttgggcatattgcctcaaaaataaaatgcctcttcgaaaatctgatgaaatctgattgcctcaaaaatgaggcaatatgagttgatatttgactatactttttattgcccttggagtgttcagtccaagagtccaaatgtgcagttatgtaagaattcttttggccagagaccacttcactgaataatagagaattaacaatgtatcatgcagtgtactctgtgcaattcctaggtgatgatgcatatcaaagttgaagaaagatgtcactttcgggaataaagagaaagaactaggcaggtatacaccatagctacactaaaaccttgctccaacatgctcagcttgtgctctgggcattgttcacctaggaccttgcctttgggagtttattatgctatttgaacaatcaatcttatgagagattaaacaagctttcctaaagtgtgttttcaggtatacatttttttaaaaagcagagggtggataaatgctgagttaaatgggtctttttgctgcaggacttctcaggaccatatgccagtgtgcaccaggcatttcccagaaggagaaacagtatatggtgtctcaacttccatgaacattgatacttctccccagagcatctttcttgaggactcatgttccgtaaaacatttagggaactacagcccatcctagtgtgcagagtccaaggacagcaatatggagtgtccctggtgcattttaagtttcaatgaaagawtggggcgaataatgaattaaggggtaattgcattccctaacttgggtgagatccttttatctaaagtgaagatgaatgcggaacaataatcaaataaattaggactgtctagacaaccagtctgttgaattcagggcaaattgaagttaattgttagctttcatctgtttattacttgagacagccctatcttttttagcctatcaaggggattagaagatttggcctttcctaaagcagagaattatgtatctgaaaggaagtacaaaatacagataggcataggtatagattagatagatagatagatagatagatagatagatagatagatagataggaatggttttatatatcaagggcaagtttgtgtgtatattgatattctctgttgtcttctgccaaaaagcacaatgctggttcaaagatcagagaatgtgctagcagtatttagaatctgctgacttacttaggcgtaaaggttaaaatgacatgccaccgtatccttgtcaatgtttcttagttgcttgagataaatatattctaggtagcattagaaacttccctgttgccctcatccacataagcatgattttgttttcttagtatgtggttcttctattcattgcaacaagcatttgggcactgcaacgtgcaggctccatcctagggatgcaaagatttgtaacacatttctgttttttcataacacacatatagctcatttatgcatctcaagattaatgcatctaaaacaagacacttgatatttccccataactcttcttcccctggctgtttccaacttaataaatggtacctctatttaaccagttgctcaggttaaaaaccttgaatccattcttggttcctctctttttgtcatacaccacatccattccagcagcaaatcctattggctgtagcctcaaaatatgttctgtatctcacggcttcccacaacaactgcaaccacagttatccccacccaagccgttgtggtcttttgcctttgtccaagccaccatgatctcttggccagagatctgcctctttactagtctctgtacttccttcctcttttgccccactacagtctgctttcctcacagaaaccaggatgatctttaaaaaagttaaaataaggtgaatcactcccctactcataagcctccagtagcccccatcatacttagaccaaaacctagagttttgatgtggtctacaagacactctgtcacttagtctcttcttacttttctagtctcatattctcctcactaatttccttttggctgtgctagccttactggtctttgagcacatcggcctttttcctatcttccccatatacttgcatggctcacttccttacttcattaagatctctgcttttgttctcactcataggtgggaattgatcaatgagaacacttggacacaggaaggggaacatcacataccagggtctgtcatggggtgggggaaggggggagggatagcattaggagatatacctaatgtaaatgacgagtcaatgggtgcagcacaccaacctggtgcatgtatacatatgtaacaaacctgcacgttgtgcacatgtaccctagaacttaaagtatatatataaaaaaagatctctgctttaatgtcacctctcagatgcattcactgatgatcctgtgtaaaagcactccccacttccatggctcactctccccttactctgctttatttatcttcatagcacttaatatttccttaatagttcctaatcacttaatcgtaatatttattcctttatttgtctctctttcccataaaagtgtaagcttcatgaggacttagttatattcacctgtatcacagcacctaggatgatgcccgggactcagtaagagtgcaatattatttgatgggtgaatagatgaaggaatgactttagctaggtttatgatacttgtgaaggggtaagtatatgtacttgcagaaagattccattgttatccatgccttagatgcttctcatgaagacagcccacatttcatatatctgtaggctgtatttgaaacattttaaggggaaaaataatttggggtagcaaaaaattcttaatgtttgtgtgtactagttttctctttgcaaacacagtgatgttctacaggaaacatatatatgcmgtacattcaagtgagtgtatattgaaagatgactcttcattccacttcagccccaagcactataacccaaaaataactgctatgatagtttattgtgtatcctttcagatatttactgtgcaastatgaagtatatacattttttgctattctacaatgggcctatactatatacagggaatctcaactttgcttattttaccttatttatttcaaagaactttcatactttttaatagttgtatagtatttcaaagaatgcctctaccacatccttgtatgtagctcttggagcacataggtaagtttatatgtaagagagcttgctaggattgtaattgctggatcaaagggaggtccatttacagttttgatagctaatgacaacaaggttgaatcactttactttgccaccaacagtgtaagacagaatctgtttttctgcatccatgtcaatactatgttttaactattttcattcttcaacccaataagccaaaatggtaccttatttttatatttctccagttatgagtgagattgaacaatttttcattgaaaggcatttacatttcttctgtaaaagtttatgttcacatttttttaacctattttaaaagcatgtctggtcatttttccttattgacttgtgagaactttttatattttgaagaaatgaactctttgttgaatgttgcaaatattttctttttatggcttctgggttttgtgtcttgcacagaaagcattctttattccaagaatattactttagaaaaatctgccttactttattctagttttttaaggtttttatgttatgcatttaaatcttctgagtttattctgagtaaagagttagagagagattctgctttactttttagatttccccaaatcagatgtctcaacacaatttattgactaaaccaggatttacctactgatttgtataatttaggctatttctagaccatatgctcttatttctctgtctctctaatcttgtaccagcacaactctttctactgtagctttgtcatacattttaatgaaaagttgagctagttataatgctttttcaggaatttcctggcaagctggccatgctatttttccatgtgaactttagaatcaggctttctaatataaagaaaaagttactaatattttaattgagatttcattacatttgtagatttatttggaggaattaaggtctttataatactatttccttttatcaaaaaataaaaactatttttctgttcaaatcttctattgtgtcttttggtgattttgaggatatttttcaggtttatttttcagagctcttgttgagttgatgttgctctaagaagtgagcttatttttttccatcatattccaattcattgtacatagggtagatatttatcttttaatattaattttggctgggcatggttctcacagctgtaatcccagcactttgggagactgaggcgggcggatcatgagatcaggagttcgagaccaacctggccaacatggtaaaaccccgtctctactaaaaatacaaaaaaaaaaaaaaatagcctggcgtggtggtgtgcacctgtaatcccagctacttgggaggctgaggcaagagaattacttaaacccagggggcagagattgcagtgagctgagaccgtaccactgcactccagcctgggcaaaagagcaagactccatctcgaaaaaaataataataatttttaaactagacaccttattccttgaattttctttttgtttttctttcattcatttattcattccttctcatcaattttccaggctaagtttccactatccatccactatgataattttctctcttctctaatttttatgcctcgtttcacccttatctaatggcattgattagtacttgcccaataatgttaaataaaattggtaatggtggaatttctaccttgtttctgattttaatgctactgttgtttcaccattaagcatagtgttcaagccaatcactccaaaagctctggaagctctcctaaatcactccaggcaagctggcttaaggacctccatagcaccttttttttacctttattgtaatctggaacacaatgaacttgagaatgtgtttatcttactgaacaatgttgacaaattctgtgtacatcctcaaagaagtacttttccacagatcgccctctgggaaacacagatttagagaaatacatgatcaacaataccaaccatagcataaaggagtttaaggattgagacaaaaccatgaggcttagaaaaaaggaggtcatcagtgaccttaaggataatggtgatgatgatagctcatactaatggtatatttaccaggcatcagtcacttggctgagtaattatacatgttaccttgtttaatcttcacattacccaccaaggcagaacaattattatctctgttttatagctgtggcaataggctgaagaaactttcttaagattatcacacagtaaataataaaatgtgatttcaaattgcactagctctatagcaggagctcttccacataatactaggagaataaatccagagcctgccccaggaatgttttgtttggccaattcattatgggatttttgttttgttttgtttgtttttaaactgtgaatgccttcagtaggcatacataccattgaatttgtgagtgtttttcaattgcagtctctgaagttttatgtatttaatttttattttattattattatactttaagttttagggtacatgtgcacaatgtgcaggttagttacatatgtatacatgtgccatgctggtgtgctgcacccattaactcgtcatttagcattaggtatatctcctaatgctatccctcccccctccccccaccccacaacagtccccagagtgtgttgttccccttcctgtgtccatgtgttctcattgttcaattcacacctatgagtgagaacatgcggtgtttggttttttgtccttgcgatagtttactgagaatgatgatttccaatttcatccatgtccctacaaagaactcatcattttttatggctgcatagtattccatggtgtatatgtgccacattttcttaatccagtctatcattgttggacatttaggttggttccaagtctttgctattgtgaatagtgccacaataaacatatgtgtgcatgtgtctttatagcagcatgatttatagtcctttgggtatatacccagtaatgggatggctgggtcaaatggtatttctagttctagatccctgaggaattgccacactgacttccacaagggttgaactagtttacagtcccaccaacagtgtaaaagtgttcctatttctccacatcctctccagcacctgttgtttcctgactttttaatgattgccattctaactggtgtgagatggtatctcattgtggttttgatttgcatttctctgatggccagtgatggtgagcattttttcatgtgttttttggctgcataaatgtcttcttttgagaagtgtctgttcatgtccttcacccactttttgatggggttgtttgtttttttcttgtaaatttgtttgagttcattgtagattctggacattagccctttgtcagatgagtaggttgcaaaaattttctcccattctgtaggttgcctgttcactctgacggtagtttcttttgctgtgcagaagctctttagtttaattagatcccatttgtcaattttggcttttgttgccactgcttttggtgttttagacatgaagtccttgtccatgcctatgtcctgaatggtaatgcctaggttttcttctagggtttttatggttttaggtctaacgtttaagtctttaatccatcttgaattaatttttgtataaggtgtaaggaagggatccagtttcagctttctacatatggctagccagttttcccagcaccatttattaaatagggaatcctttccccattgcttgtttttgtcaggtttgtcaaagatcagatagttgtagatatgcggcattatttctgagggctctgttctgttccattgatctatatctctgttttggtaccagtaccatgctgttttggttactgtagccttgtagtatagtttgaagtcaggtagtgtgatgcctccagctttgttcttttggcttaggattgacttggcgatgcaggctcttttttggttccatatgaagtttaaagtagttttttccaattatgtgaagaaagtcattggtagcttgatggggatgscattgaatctataaattaccttgggcagtatggccggtttcacaatattgattcttcctacccatgagcatgggatgttcttccatttctttgtatcctcttttatttcattgagcagtggtttgtagtactccttgaagaggtccttcacatcccttgtaagttggattcataggtattttattctctttgaagcaattgtgaatgggagttcactcgtgatttggctctctgtttgtctgttattggtatataagaatgcttgtgatttttgtacattgattttgtatcctgagactttgctgaagttgcttatcagcttaaggagattttgggctgagacaatggggttttctagatatacaatcatgtcgtctgcaaacagggacaatttgacttcctcttttcctaattgaataccctttatttccttctcctgactaattgccctggccagaaattccaacactatgttgaataggagtggtgagagagggcatccctgtcttgtgccagttttcaaagggaatgcttccagtttttgcccattcagtatgatattggctgtggatttgtcatagatagctcttattatttcgagatacgtcccatcaatacctaatttattgagagtttttagcatgaagtgttcttgaattttgtcaaaggccttttctgcatctattgagataatcatgtggtttttgtctttggttctgtttatatgctggattacatttattgatttgagtatattgaaccagccttgcatcccagggatgaagcccacttgatcatggtggataagctttttgatgtgctgctggattcggtttgccagtattgaggatttttgcatcaatgttcatcaaggatattggtctaaaattctcttttttggttgtgtctctgcccggctttgatatcaggatgatacgggcctcataaaatgagttagggaggattctctctttttctattgattggaatagtttcagaaggaatggtaccagttcctccttgtacctctggtagaatttggctgtgaatccatctggtcctggactctttttggttggtaagctattgattattgccacaatttcagatcctgttattggtctattcagagattcaacttcttcctggtttagtcttgggagggtgtatgtgtcaaggaatttatccatttcttctagattttctaatttatttgcatagaggtgtttgtagtattctctgatggtagtttgtatttctgtgggatcagtggtgatatcccctttatcatcttttattgcatctatttgattcttctctctttttttctttattagtcttgctagcggtctgtcaattttgttgatcctttcaaaaaaccagctcctggattcgttaattttttgaagggtttttttttttgttgtctctatttccttccgttctgctctgattttagttatttcttgccttctgctagcttttgaatgtgtttgctcttgcttttctagttcttttaattgtgatgttagggtgtcaattttggatctttcctgctttctcttgtgggcatttagtgctataaatttccctctacacactgctttgaatgtgtcccagagattctggtatgttgtgtctttgttcttgttggtttcaaagaacatctttatttctgccttcattttgttatgtacccagtagtcattcaggagcaggttgttcagtttccatgtacttgagtggttttgagtgaatttcttaatcctgagttctagtttgaatgcactgtggtctcagagacagtttgttataatttctattcttttacatttgctgaggagagctttacttccaactatgtggtcaattttggaataggtgtggtgtggtgctgaaaagaatgtatattctgttgatttggggtggagagttctgtagatgtctattaggtccacttggtgcagagctgagttcaattcctggatatccttgttaactttctgtcttgttgatctgtctaatgttgacagtggggtgttaaagtctcccattattattgtgtgggagtctaagtctctttgtaggtcactcaggacttgctttatgaatctgggtgctcctgtattgggtgcatatatatttaggatagatagctcttcttgttgaattgatccctttaccattatgtaatggccttctttgtctcttttgatctttgttggtttaaagtctgttttatcagagactaggattgcaacccctgcctttttttgttttctatttgcttggtagatcttcctccatccttttattttgagcctatgtgtgtctctgcacgtgagatgggtttactgaatacagcacactgatgggtcttgactctttatccaatttgccagtctgtgtctttgaattggagcatttagtccatttacatttaaagttaatattgttatgtgtgaatttgatcctgtcattatgatgttagctggttattttgctcgttagttgatgcagtttcttcctagtctcaatggtctttacattttggcatgattttgcagcagctggtaccggttgttcctttccatgtttagtgcttccttcaggagctcttttagggcaggcctggtggtgacaaaatctctcagcatttgattgtttgtaaagtattttatttctccttcacttatgaagcttagtttggctggatatgaaattctgggttgaaaattcttttctttaagaatgttgaatattggcccccactctcttctggcttgtagagtttctgccgagagatccgctgttagtctgatgggcttccctttgtgggtaacccgacctttctctctggctgcccttaacattttttccttcatttcaactttggtgaatctgacaattatgtgtcttggagttgctcttcttgaggagtatctttgtggtgttctctgtatttcctgaatctgaatgttggcctgccttgctagattggggaagttctcctggataatatcctgcagagtgttttccaacttggttccattctccccgtcactttcaggtacaccaatcagatttggtctcttcacatagtcccatatttcttggaggctttgttcgtttctttttatgcttttttctctaaacttcccttctcgcttcatttcattcatttcatcttccatcactgataccctttcttccagctgatcgcatcggctcctgaggcttctgcattcttcacgtagttctcgagccttggctttcagctccatcagctcctttaagcacttctctgtattggttattctagttatacatttgtctaaatttttttcaaagtttttaacttctttgcctttggtttgaatttcctcctgtagctcggagtagtttgatcgtccgaagccttcttcgctcaactcgtcaaagtcattctctgtccagctttgttccgttgctggtgaggaactgcgttcctttggaggaggagaggcactctgctttttagagtttccagtttttctgttctgttatttccccatctttgtggttttatctacttttggtctttgatgatggtgatgtacatatgggtttttggtgtggatgtcctttctgtttgttagtttcccttctaacagacaggaccctcagctgcaggtctgttggagtttgctagaggtccactccagaccctgtttgcctgggtatcagcagcagtggctgcagaacagcggattttcgtgaaccacgaatgctgctgtctgatcgttcctctggaagttttgtctcagaggagtacccggccttgtgaggtgtcagtctgcctctactggggggtgcctcccagttaggctgctcgggggtcaggggtcagggacccactttaggaggcagtctgcccattctcagatctccagctgtgtgctgggagaacccctactctcttcaaaactgtcagacagggacatttaagtctgcagaggttactgctgtctttttgtttgtctgtgccctgcccccagagttggagcctacagaggcaggcaggcctccttgagctgtggtgggctccacccagttcaagcttcccggctgctttgtttacctaagcaagcctgggcaatggcgggtgcccctcccccaacctcactgccaccttgcagtttgatctcagactgctgtgctagcaatcagcaagacaccatgggcgtaggaccctctgagccaggtgcgggatttaatctcctggtgtgccgttttttaagcccgtcagaaaagcgcagtattagggtgggagtgacccgattttccaggtgccgtctgtcacccctttctttgactaggaaagggaactccctgaccccttgcacttcccgagtaaggcaatgcttcaccctactttggctcgcgcacggtgcaccacacccactgtcctgcgcccactgtctggcactccctagtgagatgaacccagtacatcagatggaaatgcagaaatcacccgtcttctgcatcgctcatgctgggagctgtagaccagagctgttcctattcggccatcttggctgccctccagtctctgaagttttataaactctattcattcattaataaattatttcaacaaatatttcctgagtgtccactgcatgccaggtactatgctaggctctggagatacagcaataagcaaaaatgagcaaagaccctattttcgtgtaggcttaattaaataacatacaaaaaatgtgtgtgtgtgtgtgtgtgtgtgtgtgtagtgccaggtagtaatgtgtactaagaagaaaaataaattcagggtagcagggacagagtgtgacagatgactatattgattgtctgcattgatggtggggtcactgggcattttttatgaggagtacactacatttccaggtttattcaagttaggaaatggagacatctgatcatgtgttgtagaaagaaaatcagaaatcacataggagctgaaaagggtggcatgagtctaattgaggaatttcttacttttctgtgatagaataatgtgaatattcttgaagaaataaggtaaagcaaatggccctgggagaggtggagaaggcagggctaagtgtggaagctaggttccaaagtgacagtatgcctgagatttatgccctgggaagcaaagggattatttcctcaaaagcttcattgcacaaattaactcccaaggtatgctatgtggataaaatcatctcctataccagttctctggggacagcaaccattttgggttgttggaagcattgcagaattggtggtaacacagtttctatgggcagttgctttaagaacctgaagcttgttttgaggttgccatggtaacaccactgctggctgcatacaacatctcacccaggctctcttgatctaataaccaggacccacattgccttgaactcccttaaacaaagtgtgcttttagcagactagctttttttttttaacctctctgataaatccatcaacctattttattttggtttctgtaaattgcaaattactgaggagagagaaattaggagaggaattgtattgttttaaactcatcatcccgatttagaatacttaatgcaaactaattaaagatctgcttgtgctatgatctgctattttcctgttttcaagtttttgcattttgaaatctatcatatctccttgttcacacaataaggccttaacaaactctttgtgaatgtagtttctctgacctctctactctcatagaaaaccacaggatactcaggagtcttgggctcttttcttcctaatgagctctgtttgccatggtttaggagaggaagaactctgagtataggggatgatagattttgctagtgttcacttagacctcttctctcaaaaacatgggtgagagaatcacaaatttttgacactaggatacttgacagtttggcccagtggtcttttaccaagatggctccacatctcctacatcccaatgatgatcataaacacttgctgatttaatagacaataatgttagtagcctgaaatcacactagtagtttgaaacccatgatgagggtacagatacaccatggaaatctaaatgctgtgaaacagtccccgcttcccactgctgggctggttgttaatcatttactggcatacctgtatcaaacccttcccttatcatgcgggtggggagtggtgagaaacaggcttcttatcactagattctatgtggccattaaatgatggaaaataaaagaaagggagagctgtaatgcataatgctcttcatttttgtttagtaatttatattactttggaacaagatgaaataaaagatttaagatgagatttttctctttgcataataaaatgtgaaaaaatatttgattacaaaagctatctttatagtagccacattttatttggtgacttgccttcagacttaagaatcttttctaacaattttatcccatttacaaaaaaatgctcaataaatatttcgaaagattaggtcaaaagcccttaaactaatctgtagggttgacaattaagatatcattttttttctataactgatcattgaattttgtagtgatgagggaagggtagaatgcatagtgagtgacacacaagtacaaaaaagagttggttataatccaagacttacatcttaaagtaggaataatttttaggttttgccattcaaatcagcagatagccacrgttattacattacaaaagatttctgagctccaagtgtttgcctgtactttgacttactaagcattcaaaaatattttcctaacagcatcatacttttattttcatgttgtatatattttaacctttaagttatcgtggaaattccttaacagggtcttcttcccagtaaacatgcaaactgaaacattagcrcccatttattcagcatcttagaagaaatatgcttaatatagtagattttcctaaataacttaaaccttaacccttcaaattctaagaccttttagaaaccatttatctgaaatcctttttaaatattttaaacatatttcttatttcttaaactaagaatttaaactctccttgctgtgatagggcaatcgtttttctgcaatgtagaaacaactactttcaccagcttttaaattttatttagttatatccttaaatgccaaactgcaaaatgacctttgtcactggtgtggtcattgtattggctcagaagccctgctcccccctccccttttagtttcctgagtagtgtttatttattattggcactgaaatccattcataaaacttgtttagagttacatactagattcgattttattaagactctaagtgagggtgtgagaaggaaaatccttcgcttttcagaagactttgttgtggtcatatcaggcacttggaatatggagataatgaaatctactccaagggatggttgtgagaggcaacaaggaaaggcatatgaaatgaatctataggatgctactgagaggtccctttatgcacacaactgctacaggccccaccactgttgttcaaagttccccaccgctccatccccttaggcagtgtggggagagccagtttcccctccttacaagaggagctgccagagcaattccagtagacccttgggtatatttatctacctaactggtttttagttaggttgatgaaagggaatgagaagagataaaacttttgcatctgagtttctctgtttttaaatatggagtattactttgagcctaaaaatgctcatcactttcgacttagtaatctcccttctagaacttaaccctaaagaaataatcagacataaggagaaagatttatgcataaacatatttttcatctcactttcatcccatttttacattagtcagcacaaactttggctgtgttccagaaaacatattgcgccaagactggcagacattggtttgagtttatttaactgtcaggggatggcttttctttgtgagctgattccacaaattcattacatacttaaatcttttatgggcatcagcaatgtaagagtagtgtacttgaagggctcaaaattgcacacaaacattagcagatagcagtgctggatattatggtttagacttaatatcttttaagatattttagatcttgtagacccaaactcatccttgatttggctatgtgtattctatgacattctgtatatgagtaaaatactgggttctgtgagagcaggcatcaagatagaactagctgtttaaaagatttattgtgggaaaagcccgtgaaggataaaggggaaggagagcatgagtagggaataaaaaaacaaaaaatagggtagtcctgtataatttcttacaatttggattttgttcatttcatcccagtagtattatttaacatgttcctctgtcccctaagtatcagatacagagggctgatcacattagaatttaatttgttccttccttccttctcccctctcctcccctccatcccctcccattccctctcctttcttcattcttggaaaactacttcataggtgatggtgtgtgcttccatcaagagtcagataacatttgtctcatctgtttttctgtgtgtgttagcagcttgattatcattatgctagatccattaattcattaggggttgcaaaatgctgacatttgaattatttctgtcttcacttactaactagcatacttttatacagagaaacttcccctcattagctatttggttgttttgaggttcagcgcaaataggaaacataggatgaatactagattttttcttttgcttaccatttttcaaaatggtaagttgattccttagcattttccaaaggtggaaaatgagagtttttgtgtttgtttagtattattatgaactcatggatttaagccattgtagttgttatctttatttgacactcaaattatttcatctttggccagtaggagtttatataggtaggctcctaagtctttttgacagaatcctagtagtctctgacagccttcttgctttctggtatgatttagtgttcaggctcatcttgtacatttcctgcctcaggtctcactaggtcacaagccatagttcattgtagtgagaattgattttttagaaacaacactgtaagtgttgggagtgttcattgctactgggtaggttattttttctagaccttttcattgtacaaaactaagaaatatttttttttaaagttagagtatatccagagatcatacttataattccaatttatatctaggactacagggttactacttcatctcatcattttttacatctgaatttctttatctccatgctaaaaaacctgcttctcagcaactcaagcctgattactcacttgttttatcacatactacaaatgtaacagccttgggataacaatgctaatactaggactagctaaattgttattgaaaaaaaatgtgaagttcttttttatctttaggatatataccattagaaatgaactatcaaatccgtgtrttttaaaatcagttagaatagttctcctcctcaaccacttgtatacatatttaggtataatttgtatcactttactaatcttgtctctggtgccattcttatttccctctaccctaatataactagcattttctccctgtattatgtttatctctgtaataatgagaagtctatgagaagtataatgagaagtataaagttaactaggaactaagacagaatttgaagtacaaaaatgaatgtggatttaaaaataaatgtatgcacaatagcactatatatatatatattttttttttttttttttctttgagacggagtcttgctctgttgcccaggctggagtgcagtggcacgatctcggctcactgcaagctccgcctcctgggttcaagcaattctcctgcctcagcctcccgagtagctgggactacaggtgcccaccaccatgcccagctaattttttgtatttttagtagagatggggtttcaccattttagccaggatggtctcgatctcttgacctcgtgatccacctgccttggcctcccaaagtgctgggattacaggcgtgagccaccgtgcctggcctatatttctttgtgagctgagaggtcttagaagcaatgacaccccagtagcaatgagcacacctagaacccagatcttggtttctaatactgttctccagtaaaagggaccaaagctcaatgaagaawtgcctgattctaaggctgtggcagagaaagataagatgagtcgggagcattgtgtagtactagaaaggaaggaagtgtttaaacacacacacaaaatgataggggcatgtcaaaggggcataggagccaactaacagaactcctaataaccatagctggaagaatttgagcaacgaaataaatgacatagtgttggattataatccaaagtataaaacaaatatctgcgagtccatattgatatattaataagtaaatgattgaaaaagtcagtaagtgaggagaagagacacatctccagtgcagaattccaaataatttatatggatactctaccctcaaaaagctggaacatacttcccactccttaagtgtaggctatgcatagccttttacagtatgttaagatgggaaaaagaataactatagtggaaaaacttgacaaacaccacctcagccaggtgatcagatcaaggtcaacatcagtgataaatcatgcttgtagcatgcacccttgatataatgttaatctgcaatacttccttaatttttctggtattactatgttgggtttaaaaaatattttatctatcctgaaggcttttaattacaggtggaaacctgttctcagctttgtttgagctagtgaaaaaagtatgaagcatggtttctaccttatggtaacttagaaactagtgaaggaaacaagatctagcaagcatgtaatcaaaatataaatcataggacatgattatacaggatttttaagttgagaaaagcaaagcatagctatactgagacctggtgtagctagaggaagttttaaagaaaatagtctcttctgttaatactatcaggatttctgtatgagggaaatgatagggattgatttagaggctcaaaaattctctaaatatatgattatcaccagaaaacaagatatatatattttaagaccattacattttgtttctgttgaccaactgaaatgcaagatgactaaattagttatttttgaatcccttatgacagataataaaaattggtggctcacttaatcacagtgtggtcagaatttattagaaagacagcaaaatcattggattgtatatgataccctgcatttatttgatgtgtagacctggttaaatcttggattttaagcatttgaatgttacgttgctcttttttgtttttcctttaggactatctgctgccaaactcttgactgaatatggcgttagtgttttggttttagaagctcgggacagggttggaggaagaacatatactataagggtaagtgattttaatacttacatgtaatgtaatatctcactcaaactacaagtggcaccactggaaatcacagggctagaggaggtcttaagagttcatgcagttaagccgtttgtcctccatagccctaaagtactcccatcaaataagcgtccattctctttaacatgtacgcactgaagactgacagcttctgaatttcagtggagtgaattcaaaaaacatgagcaaataacttcaatacagtgtcataatttccatactagagacgtaaatgaagtgtgtagtgtctcagatggggtgatagtttggctgtactggaagtgactatacacccgcaatacacacagacacacacacacacacacacacttagattccctatttatccaatgacacacaacttaatagaaatgtggtggcaaaaacccaaaaaaccaaaaacagacaaaaaaagaaatgtggtggctgcagtaagcaggaacaaatgtagcatatttttgcataacttttcccttggcccttgttccctaagaagtatgcttctgccagagatactcctcaggtcgcgtctggctacatgtaagaaggaagcccagttcttgctacatcgctgctttttttatacttcggcttacatcaccattctggaaaaaatgcatgctattatttactactattaagggaatggttgcaggtggttgactctgtgggtactgatgaaagtaggcagggagataatgaagagtgggaaggaaataggggcaaagatggaagtttttgcacataaaagtgggggagaaagggagaagagtcagagagaagtagtagaggcagaagaggaggaccagactagaccagcaatgggtaagtcagtggacgaaagaggaaggggtgctcaacagtcaactgacacaatatgaaggcaaacaaaacaaaacaaaacaaaacaaaacaaaacaaaacaaaaaccctcgcatttgacagaagttcattaattaatgagcccctttgctagagtacacaaatagagtgttaaagactagggattgagagtaaagacaaaactagactgttgaagtgactggaaagaaaggaagcatctatctaactagaagatgcttcagttagactaataacagaatggcgtaagcaatgcaaacatttgattatttcacagaagtctggtggcagatagtccaggctggtgctcttgctttttgctcttctttctgctctgatattctttcttttcttttcttttcttttctttttttttttttttttttgagacggtgttttgctcttgtcgcccaggctagagtgcaatggtgcgatcttggctcactgcaacctctgtctcccaggttcaagtgattctcctgtctcagtctccagagtagctaggattacaggcaccccccccaccacgccagccaattttgtatttttagtagagacagggttccaccatgttggccaggcttgttgcgaactcctgacctcaggtgatccactggccttgaagcctcccaaagtgctgggataacaggcatgagccaccgcacccagccctgctctgatattctttgcatgtaggtttattgtcttgtggtaacaagatggatgctgagattctaagcatcaagttcycattcaaggctgaaaggagagtgaaagggtggcactagccttgtctgcaactaagcttttccttcgccaaaagaccccagcagacatttgctttagtctcattggctagagttgagtcacatggctaccctcagctgtcagggatcctgggaaagtaagtatttcacaatactaggctacataatggaagcaggcatgggagaggaaatatcaatggatactagaataacctacagacaacatttgaattaggatttcatagcagcgatttcagccacattgtaccatgctacccttctgtcatttgcttcctacctttttagatacagggatgtatctaggcctatttctgctttgctcagctctaagggtgctgtacagccttgctatgcaaagtgtcatctgtgggtcagtagccccagaatcaactgggattttgatagaaatgcagaatatcaggccctatctcagaactgctgaatctggatctgcattttgacaacatctccaggggacactatagaagtgctactctgtggcatttgtttgcttgcttgccttaaactaatgccaatccggattaaattttctgagtgctcccttagatgtagtccactgggaagctattggtctgggagtgaggagactgggattctagcctctgtactgacttgacatgatgtcttggataagtcctattagcactttacatctcagttttctcatctgagtaataagatactatctaaatgtcctcgaagaaactcccttccatcttcaaattctaattgaaggcagcgtgttatagtgcaaatgaagagctgcatcttctgcctgtatgcctttattagatatgattcttctgtcattttctgaaaaatattcctccactttggagatagttattaagttgtcccttagctctatttttcttatctctaaaaccttttggttattaaacaggagcattagtcatgttgcggattttcagttaagaacaagtttctttgtataagggaaatgagaattccaacatacttgtccccatctgtgttattggccccaattactttgccatgctgtgtcatttatatatgtcagcaccacacaggaactgttattgtctattcagcatgacattacaccccccttaggaatgtgagaaaggaatctctgaaatgcttggaaattaggacttagcatttatactccaaatgatgagaaggagagaaagagggctttaagaaacaggcatggaggccgggcatggtggctcacgcctgtaatcccagcactttgggaggccaaggcaggtggatcacttgagcttgggagtttgagaacagcctgggcaacatggtgaaaccccatctctactaaaaatacaaaaagtagccaggtgcagtggtgtacacctgtagtcacagctacttgggaggctgaggtaggagaatcacttgagcctgaaaggcaggggttgcagtgagccgagattgcaccattgcactccagtctgggtgacaggagtgaaaccctgactcaaaaaattaaaaattttaaaaaaagaaacaggcatgaaaattgtatttaataagaaactgaagcaaatattttttaaattgcttctaataacataatcaattaggataattttgggaggagatgccataaaagctactatggatctctgagtaccagaatgtcaaatttggtattacctggcaagctgttcagatgcgtcttccattagttcagaacttgcccgtttttcctaatgtgattcatccatgattcttcagagtcaaattaataaagttgaaatgcctgcagggctgccacagggttggtgtatgtttccaatattgttgcatgtttgtggcctcttcaaaggctgagtagtgagatctaaatcaagaccccaaagactgaggtgcaacacagtagaatacagtgttaccgcttctagtgtcttcatgctgaatttgaggcacttcatttagaacgttcttactttgtaaaggaacattctgcaaaatgcctcactctttttactgcttcatttaggattatttgctttaaagatagtgtcagcattctaaagacatcatgtttggaaactcccaggagtccccttgctgtctttgttaaagcccagaaatttattggagtactaattccagttttgttcattatatcttaaaatagttgttgtagattagaaaaggtttgaaggacagcactgatggttactaaaagagagaataaacattatatgagggcacattaaagaagtcacagaagcacttcatttctggtattatggcagaatggaaaccctaactcctcattgaaataagtaaaatgctgaatacaatatgctgtgctcatctgacatggaagttagaaatttgtagatctcctggatgttgcatagacatctcaaacgtaacacatccaacactagacttctgatcttccttaaggccgctgttccagctgcccatgttagaagatggcaacttcgaaaaaactcagagtcatgctcaacactaccagaccctcatttgttttgtcaggaaattccgttggccctgccttcaaaacatatccagaattcaacgcttcccaccacttccactgctatcccctggtgggagccaccattatatctctaggccagattactagagtaggctcctgattttcctgcttttactcctgccccctacattctgttctttcttagtgcatcagtgagagtgagcctttcaaatgtaactcagattttagcatttccctgctcgagaccttccaacggctccccttctcactgacagccaaggcctatgtccttacaatgtcctgtgaggctttacgtgacctgctctgccaataacctctgtaacctcatcttcaatttttttccttgctcacattgttccggccactttggcctccttgctatttcttgaatataccagcagacttctgtattacagtctttagatccatgttgctaggagtttttgctttttttttcgagacggagtctcactctgttgcccaggctggagtgcagtgggacgatctcacctcactgcagccactgtctcctgggttccagcaattctcccgcctcagcctcctgagtagctgggattacaggctcacgccaccatgcccggctcatttttgtattttcagtagagataggttttcaccacattggccaggctggtgtgttttaatttctacacctggaatgtttttcagttatttttcgtcatcactgcattgtggtcagagaatattgtttcatggtaacaatccttgaggctcgctttataacctagcaagcacatggttaatatccaaagatcttctaatttctgcttgaaaagaacatgtagtctctaaaagctatatgcagtgttttatatatgtccactagaataagcttaactgtgctccttcttttttgtttgcttaatctattaatcacttttaaaagtatgttaaaaattctctgttctactgggcacttatctttggttcctgtcaaatgttgcttacattttgaagctatattactcagtttatgcaagtttaaacttggttagccttctggatcttttagcattatgtagtgacacttatttcactgagatttattttgtttaaggttttctttgatattaatatagttataacagcttacattagtatttgtatatctctttatctttcagttagagttttctttattctgactttttttcctttttttaaattttagattcagggggtacaggatttttatttatttatttatttattttgagacagagtctcactgtgttgcccaggctggagtgcagtggcgcaatctcagctcgctgcaacctccacctcctgggttcaagctgttctcctgcctcagcctccccagtagctgggatcacaggcgctgccaccacacccaactaatttttgcatttttagtggagttaattgacaaacttggtccatctatatttgttatgatttcttttttaaatgttttaactttattatattatggctttccatttgtcccactttaacagttttcctcttggtttctttctttccttcttttgggttaatggttttcttctttttgttttctttttaagttttttcttctacttgttcagaagttatatagtcagaccaatgtttttcagacaattttcctaactatattaacactcatacttaatgtagtctaaagtttatcaacatactatctttctactaaaaaatacaaaagctttcatgcttcagttgtgagcacccttcttccaatctgtaaactataaaagtatttcaagtttgtatgtttctcagacattattaattttattttattctattgttgatgttgcttaattttctttaaagttttgccagtatctttgttcactgtccattcttgaatctcagaccttttatttgtaaccattttcattctacttgaaacacaccctttcctccaatctgggtcctaaactctgtacacttgtcagcttgacaaaaacatagttctaacaggtaacaaattctacttagaatttctcttcctctttttttttctctcagaacagcaaagatattattcccctatcttctggcttgtatttttattgttgaagagtcactcgtaagtctaattgttgatttttttcagagtatgtatgatttgcctcttttgttttctgaaaaagaattgcttttaggagctcttttctttggtatactgcagtttctctgtgtctgggtgagaatttcttttttatttatcattctttggacctgttgggtttcttatcttccaacaatgctggtaaatcctcagccactattttttaatactacttaatattttgacaccatcttccatgtcttaactacctcctcaacatattttccaattctttatctttgaactgcattctagataatttattcagatctagcagtttactcactctttaactatgtcaaatatatggtttaatccattcacggagttttaaaaattttaattagtacatttttattgctagcagttattttttaatctacttgataatattttcagtttcttttcccctgctcctagttttaatgacttattttatttaaaatatattgcatagtacttttagattctgtgtataattcaactattatgaaatctttctggattattttttctgcttattttcttttggtgccttgtttgcatgtatgttttgtaacttttggctgtgggttgctaattttccatggaactttatctgtgtgtaaattatttgaggcataggggaaaaggacttaagtctacttctaccaccgtccttgacactttaaattttctgcccaagttttttcatatcatatggatagcttaaattcagatggaaaacataaataaagataagcttttttttttccttttctttgtgacaatacttagagctgcaaaataatggaaaatataaagtcgtggatgcagctaaagcaatacttagaagatgtatagtctaaattcttccattagaaaagaaaaaggctatatatgaataagctaatcatgcaaagagttagaaaattaagagcaaaataaatccaaagaaggggtaaaaagggaataaatcaatgatgtagaaaatagacacccaacaaagaggatcaataaaataaaagttgattctttgaagagacctattaaagatacacaagaagtgtctgataagatttttccagaaaaagaaacaccccaaataaatacgagatcagagccagatgtggggctcacgcctgtaatcccaacactttgggaggctaaggcaggtgtatcgcttgagcttaggagcttgagatcagcctgagcaaccctaaccctacaaaaaatacaaaaattagctgagtgtggtggcacatgcctgtgatcccagctactcaggaagctgaggtggaagaattcatagagcccaggaaagtcgaggctgcagtgagccatgatcatgccattgtactccagcctgactgatagagtaagaccctgtctcaaaaaaaaaaaataaaaataaaaaagatgaaaatgaagatataattactgatgcaataaagaataattaaatgaaaagaagatgccatgaacattaaaccaacagttttgaaacatatatgaaatgtacatattgtgagaaaaatataattcatcaaagttaacagtgatttagtctggaaatagaaaagatgggtagtgctttaacctaaaaataaattaaatgtctagtttaagattttccctaaaaaaatcaccaagcctagctagttctacaggcatgttctatgtaatgttcaaagaatggatcactttatttacatacaaacctttctagagaatagaaaaaagtatgatcactaaggagattagcagtactgtaatgcaaaaaacagacaaggcagtagaagaaaggagaatcataggccagtctcaatattgcttataaacatagatataaaaattctaaacaaaatgttagcaaagcatatcctccaacagaaagataatatcacgttgggtagctccaggaaggaaatgttgaataatactagacaattttctggaaatagcagattaggtaaattataacaaaatacaaagagactagacaagttgcactgtatagacacacacacacacacacacacacacacacacacacacrcacgcacacatctttaaagcattaaagagccagygagctaacaagatagtgaagaatcactgggccaacatctggaaaggattaacctacttttccctgggtggcagggggarttgctgaccactgaagaagctcccgaaggctgagcagtgctttggacctagtgcaaagctagggtgacaggtcaagtccagagccccatgaagtgtgtactgatttctgggggagtgtttgtcaactccttgtgctgtgggttgggctgcatctaaggaccaagggtaaatggcaagaaaactaggccaaatgtgcatttcggcccagcttcaaatcctctcaggtactgaaaatggtataaagttatctggtactgtgagagtcccaggctgtgggcagaagcaaacataaatcctctctgagaaagatatcatcttcctaggattcaaatgatttctacatgttttcaagtgcaatgagtggcattcaacaaaaaataatcaggcaaacaaggaaaaaatgcatgacaacatgcttgagaattggtatacacaacaaaatagacacagaccctttatttattaaaaaaaaaaaaaccacggaagggttgcagctcaccaatattcaattattgattaaatcattggaactttccaattaataaaaacagctgaaaagcatggagaactgtatttatgagggaggaagtaaacaattttagtttatgatagagggtttgcatatttgtaaataatttagtgatatgtgaatctttttataccttcttgtattcttttcctatgacgcattctttcctggaagtgttttaaaatagcatctagagccatcaatgtggactgatttaagatttcacctggtggaaattagggaattaggctttgggtggctcctccagcaataacaccagacagaagctcacataataatttaaatgtttcataaaggatctaaactggcagaacatactacagtgttctttatcttttatgcattgtattgctgaattggccttaccaataactttaccaaatgatggtgcttagtgatgagtgttagacaggattgtgccccagttcttgagtggatgaggaaagattgccattttcagttgctctttataggggagatgtaaggcacaattaacttttaaaaaaataaatggggttwtttttttamaagacaccttttttccaagttttaactaaagtcctctgaccaatttttctctttttgcagaatgagcatgttgattacgtagatgttggtggagcttatgtgggaccaacccaaaacagaatcttacgcttgtctaaggagctgggcatagagacttacaaagtgaatgtcagtgagcgtctcgttcaatatgtcaaggtaaggctgacttttmacccaagtgactgatagggaagcattttatttgagaaaacatttggtttgtttttagttatttttctttcaaagcaattgtraaagtaggctcttgactttgaagtagtatttgcctttcttttcttgttttctkttttctttttcttttgaaaaaaatctctaaagtctcctggaatcactgcaggatattatgactcagcttgaccttcctccctgtcaccctcagtggccctcacaagctatcctcactcccagaatgggaggctctgggttccctcctaatgcatttgaaggccacaggggtgggggtggcaggtgcctgcaacagacatgtacacacacacacacacacacacacgcacactcccctcccccagctacaggcaatccctgagcaacctagggagcaaccctagagctccaaggaacacaagagtttgaggccacttctttagcctttgaactggttattcatcctcattcttacctggcattatttggaatgcttyatttcctctgtacctggccttcactcttgggaagtctagcttgtttgtgcagtttcctactgtttaaacaagagattgtttaaactctagccactgatttccacagctgttgccagtgtttttctttctcactgaagccaaacatggagtggctggagtctggaaacatgccttgagaaatcaaagttcccatctgacattgcagcctacttcctagagctagtgtcactgaggaaggggtcatttactcattctaatgtcaggattcccacaccaataaccacatcatttctcaacaaatacatcccttcccctactccacctcsggcaataactgtgggtccggaggctacagggctttgggtgtgtcctgggagttgaggatacttgtgacatatgtacactgataaccaatcaggagagaccagaaacctttgtaaactctgatagccacatggtttgagatgcttgggatagtctggtggtgacagatgtgaaaaagcaaatcagtagtctttttattcttttctttttacctttaagctctgttggacttgaaaatcagtagtctttagaaaaactgtgggttcagaggtcaagggaggaatgaagaaagtataaaaaatttcacaaagtatttaggaactctggctacaacaggctgtgatcaaaaaggaaaaacccctttgcttcctcattttctcttttctgcactgcacagtgtttccatggactagtaagtaataacaacagtgagaataatagctgctaacatttattaagcatttttacctgtattctcacatttaatatagggagagagaccaaaccctttgcgctcaactactaattaaacagtcatgtaaattcactctccactccaactgggaagcaaatgagtgtgatgattatcttggaatctgtgcagattcatgctgataagattcagaggctgagaggtttttagtttacctggaggctaacaataaacaacaactaaaagctttttatgcatgaactcattaaatccttacatccaccctgctaggcaggcattatcatccccattttacgtttgagaaaccagaagttcaaagaggttaaagtgacttgacaaggctataaaactcctaaaagtctacctaacccctgagtgcatgctcttcattatcccgatatatggcctagaaaatgaaactgaggactctgaatggagatgtgctggacctccaatgtttgtttgtcctcacacacatctacagtaaggtatctcactgtcaatatcactgaagtctgggtcatatgatgaggagattcagtcattgaaagaccactttttttcctactttcttactcttcttccagtttcatgttccttttatgtacattttaaaaactgggaaaaactggaaaaaactggaaatttacaagtatgtcctcaagctaggtacctgctagtctcccagccaygcccagtctaaaacttgatattgggctgggtgtggtggctcacatctgtaatcccagccctttgggaggccaaggcgggaggatcatctaagaccaggagttctagaccagcctgggcaacatagtgagacctcttctctatgaaaaattaaaaaattagctgggcatggtggtgcacatcctgtagtcccagctatttgggaggctgaggcaagaggatggcttgagcccaggaggtcgaggttacagtgagccatgatcatgccactgcacttcagcttgggcaacagagcaatatcctatctcaaaaataaaaataaaaaataataaaagtaaaacatgatgctaaggtgatagtttgaaagtggcacccataggcagcttttgtaagtaatttagctcctcattgttcttgatggaggcaaggtggagttaaaatgataaagttctgtttgagaattttgactttgcctgaaagtgatcaacagatcgtgacatgctatccaaacttcctaacaggaccttacaaattacatatcttaagtgttagactttctgatgtctctgaaattttctgggctttactgggaaccctgctttctagaaatccagatgtaattgttctgtactttaagaaggtggtcctgctgcaagctttaatagaggatgaactaatggaaagacttaaggagatgatgcacgttacattaggtgcctaagtaaggaaatgttaagagtagcatccagggtcccttttttgattttgttgctgctgctgagtcccgctgtaaggttaggtccacactaccctgaaagtcctgttcctaaagaaaaaacaacttcagctttctggaggggagaactgctcaactctaccatatttttatttcacaaaaatacaaatatggctgtgctattgcataacctactggacaaaggcatcttgccatggcattggacttggtagcccgaggctgctttcaggaatgtaaggcagaaaataaaataaaaacaaaaaaagaggctaggcgcggtggctcatgcctrtaatcccagcactttgggaggccgaggcgggcagatcatgaggtcaggagatcgagaccatcctggctaacacggtgaaacttcatctccactaaaaatacaaaaaattagccgggcgtgctggcaggtgcctgtagtcccagmtaccagttactcagaaggctgaggcaggacaatggcgtgaacctgggaggcggagtttgcagcgagccacgattgcgccactgcactccagcctgggtgacagagcgagactccgtctcaaaaaaaaaaaaaaaagaaaaagaataaaaaacaaccaaacaaacaagaatgcaaggcattgttaacctctggatctttgccattgcatggccatgcacatcaacacaatggtaatattagaccataattattgcatatgcagcacgtggcaggtgtgtgctaaaacacataccgtgcctacactttggacaacaaatggcacctttaaatcacagccgctgtggttgatccctcaaggtcagtaccgctcccatagtaataataatgactacctcccctactgagctcccaktatgttccaggccctgtgccagggccttcacctccattatcttacttaaccctcacatggatcctaagttaggggttattgcgccatttcacagaaagagtctgaagttcagaggcccagtaacctgcctaagagagtaagggaattcagattaaggtcttttgactttatgctgtctcttgctagtccagattctactgtcagggactgtggactccaggaagctgccttacagtttgtgcttgtcctggctctttctggcagctctcttctgatggtcatcctgtgtccatcattgtgtccccatatgcagtgctggtgaccattttgctcaatcttttgacccggaagcctgaaagagcagtgttaactacctgctatgatacaagcactgtgccttggttattgtttgatggatgcagtaactggaaaacagccatttaactgtcagaaaataaagattgaagctctattttgaattttagtacttattttcaaatagctacacatttaagatggtaagcatcattcttttcattgaatacttaatctcatcgaatgaaaagatgaaaaatagaaatatatatcattaaaccatcctctcacatactttaacctttcagagaatacatattttcaaccaaggtagacaacaatgttaaggcaaaaaagtagtgggttggttaaagtttagtttatttgatctgaatgagtgcctttttgctagtgttttccaatacatcatatcatttctggaatgagaagtactcattgtagtagatgtttttatgattatcaggaaactrtattagggaaaagcaggaagatatttagttcaatattccagataagatgattaataaattgtatactaaaagtaactctacttattttaaaatatcttaactctcactgtttttctccacttctaggggaaaagtgggtgtttccccaatgtgatagtgtattgggttaataatacaaattgtatttgtgacattttctgcattgctttttgacaacttcagctttcataatctaatacagtcaatattcgtttttgtaaataacactgaagtgaaaaggaagattgccattttctagataaaccaatcaataatctttgtggcccagattgcttcagctcttaaattttcccaatgcgaaaccttaaagaatgtttaaattgtttaaacactgtcaacagtctgtggcacatctagtcccagcttactctaggatggtttttactattcaccaaggaactactcgttacctttgttagattgtgtttacagtgcaagttttagcaagacagtgtatagttccaagcctgagcctctcagatggatactgaggatacaccttagtggtgtttcctctayctgatcccttccttttctgagactatgcctatctactacgttcatagaggattcacatcgatatgctaaattcactcattgcttaatatttatatttatgtatttgataaatatrtaagtatttacagagcaaaatctactctgtaccagatattgttccaagctgcagatagagtggtgaacaaatgatcaaaatttctgccctcatggtccttctaatctaaagagagaagacaagtaaacaagaacagtaaataaatattagctaacatttttgcctgtatccttcatggatcttgtgaatagaatccctcttctaattctggtttagaagatcctgattcttatataataggttcctgactggtttctacagtgagcagcttttatgaattttgtgaatttgacatgcttttattggggagattatatctgatctgtgaaattaacataaattaatcatatcattgtgaaccttaaaggtagattcttaaatggcatcagctagatatttttacacttgatcttagccaaaaagccaagaagcagtagctagatatgtttaaaacattctctttatcggttgcacatggtggctcatgcctgtaatcccagcactttgagaggctgaggcaggaggattgcttgagcccaggagtttgaaactagcccgggcaacatagtgaggcccccattgctacacaaaaatttaaaatataattttaaaaataaataaaataaaacattctctttatcagttcttctcttctgcatggcataaaggaagcagctggacctgaatgccaagtggattgattcattacttgcattagtaaataagatgctccatcattatgagtgtgtttcattgagttgtggagatcttttgttaaattttgcaatgctgtgtcttgcagaaaaaatgaaaatgttggattccatttttttttttttttgctttccatgagtttcctgcacatcataatgcaggtagggtgaggggtatggagagggagaacccagccagaaatggagcaaggcattttgcagaggctacttcaaaggagaaattgacaattacatgcattctcacgttcttcctgcttttcacgtcctctctaaataaaagtagagactataaatatataccacccatttgtttttagagagtggtgtgataaagatttatttaaaacaacataggctttgctgacagtaacagctcagcaagaatttttttttttctttttgtattggttctattcttcccacagccctttactccaggtttctatgccaacgactgaaatcaaaggcttttcacaatgtgtatgttctggaatactaagtaaattttgttgttgctaagagggaaacttggttttagccagcaggccatgtagaaagcagagtttgtcttaatgcttaccagatataacccctcacttctaatagaatttgacccatggcttataatagaatttcttttggatatgcgacatttcattttaagtttcttttagtaccttgtccatactaactcacagaagatatttcttttatcttcaaagaaagatacattttcactttcaacctctctcagaaggaaactcaagaagcggaaagtgtgaagtctttgtagggatgttgcttgttgtatatttgcctcctttcttttaaacacctaaattcatccctcctgatgccatgctattaatattgccttccacctgtaatgtacctatacatgttttacctcacttgagcttcccaatggtcctcagagtaaaaagcattatttttcccaactcagagagcgtaggagccaaagtgtggctttccagctctaagcccagtgttctgtgggttacatcaccttgttttttattccaaagttaacttgtgaacccttctartaaactgctccaagatatgacaaaatcactttatcccaacaggctctgaagttgtaagatgcccctttggaaacagggactcctgtggatatgggggtggtcgttcatgggagctgtatgtgacacagtttatatttcacagttcacagttcatagttcacagtggttgtacatgggagctgtatgtggcacggtggcttctcttctcttgcaccctgagctgtagtctgagaggtcctctggccttcagtgagcacctggcagctaaacagcccccagtgtgtcccagttaggctcagcaggctgaagaccacagatgtattctattattttgttaaaatactaaatctggaggtctaaggcatggtttgaaattgctggctatatattatttttgttraatgatccatgtaaacttattattcaaagtatggcccaagtattggccagtattttatgttataccattatatcctgcctgattttaaaaataacaaaaaaggaaaggatttaaagtggttcttgataagtattacaaatttggataagtcagggtagaagatagaaaaacaaaacaaaacaaaaacaccagttaggtaaggataggcaagtagttacaggcctgtgctcatgataagaaattctgttttgatgatagaaatgaggtaatacagaagggattgctttcttctctcartcacaattctgagtaggttttaaaagcagagaggctaaaaatgtttacatattttcagtttgatctatccagtatccagtataaggatatatgaagatagctggtaaaaaatagtttttagtaactttcattcttttttccccctcactttggaaagacttcatttgctgcttgtgagttcccagagagcttaatggcagaattcctcttaaagctttgcactgtttagagagctaggtcagcattagccatctcctctcagaggctccttcttcctataaactctcaggattacatctcagatttggtttcaaaaatataaagttcctactcagtgacaacccaatatatagcaaaataagttaattattagatttttttcttaaaaaatggtaaagtacactaacataaaatttatcatcttcaccaattttaggtgtacagttaattcagtagcattaagtacatccacattgttgtgccactgtcgccaccatccatccaacagaacccctctcatcttccttccattcatttctaatagggactaattcactacaggaattgtttctaaccattcattgagaagtaacctagcatcaccctcccactggcagcacagaaagggggttaagtcagacacaaaggatttctctcacactcaggctgagggactttgtgatcacacataatcatgtagtgcctcagtatttgggttaatggccaaaagaactttgtgaatggaattaaacattatatgagcagcttcctcaagagaaattgctctagtctccataataactgaactcctggaggttctgacctttcaggttaaaatgtagttgcctctcagaggttaaaatctcctccttcttccttgctttctacttccttcctatttcttctcagcaacccctgtcctcacctcagtggcatgcacattactccaatcaaaagactcaatcattgatctttaattttcaaacttttgcaaagtagccttctaacagttgaaatcttaaacagcctctaacgtccaatgaatcccatatctagtccattctgggcacttcctgaagaagggaaattcagttgtctcatgatcacatgttgagccagctagaaaaccttttctgtcattgcctcatcctgctgcctaataggatcgatgctgccatgtaaccctctgtatcacgtgcagactcaaacctttttcatttctatgtcaaattcaatgaacagataccttttgaaaacctgctgggccacagagttttagtaagtgacagttattcctactttagagataagagaaagttataataatgagagtggttcaaggtcctacagaagtgagagagaaagagggacaggcataaaagcctagttaattactaacctttgcaaacacagagcttcaaactgaaaagagacaaataatgataataatgtcaatacctgatatttgacagtccagtactattttcataacacttcattttagtttttgctttgtgtttgggttttatgtaaccagaagaagaaaattcttgatggaatcacagaaaacttgagagttaattatagttcagtgtagtgaatgctttgatcctgaaggctgtgaaactgaatcgttttcattcagaaaatttctcatgtcaggtttttcaaacaaaaagaatgattagtaaactattctattacctttcattcccatagctctcctgtaatttgtaagactcaaatgatacacactgaaccttgggctgagatttaattttgtatatttgccaaagtacacagtagcctagtttccatagccatatctagcagataaatgtctctgaaaaaaaaaatcaggcttcagagacaatgggaggaaatcactgtggctcacacttgcggaccagcagtgggtgacaaaagtggaccctgggacacagacatgggtgcagtcactaattgacataattatttgagcatccaccagtcgagtagtcctgagtatctgtgacttttcctaatctgtagattaaaaaaaaaatactattctgatgtttaaatgctgggaagatggtgctaagagtataatggctcttagttcatccaccctttcattccatgccatcaccctatctctgccatcatggttataaagccatcactgaagtaacttcatctagtagtagggggcagggccacatcctcccagacactgtgatacacaaggtggatgcactcacttaacagcttagctgacaagaagttctgctttgccctttgcccctctctacctgctcttatgtactttctcactgcactgtcttgttacgaggaggacgggctaagggcagaaactcagcatgaagcccatgatgcacttgcaattttagctagatatacaagcaatttccttcctttctcctcgttgttgtggaatgatgtgcccttttgtccagaagggatacaaatgacattgtattcccatgtgtaacatttggaaaataaacattctggttgtcacagcttctatttcatcgcatattttcctgtgttatgtcatacttctgccagtgcaagccagaatgtgaagaatgcctaggggaatatttctcaagtgttttctaagcaacattaatcttaaaaatactttgcaaaaacagggcatttggtggtcagataaactttggaagtgctccatatcctatccctgtctttgatagtcaagatgcccattaacaaattaggagtcctaggaagcctggcaataaaaaaagactattgaacacaaaccaggatttcccagacttatgaccatggaaactattttcatataacacctataaagatcagagtaagagatgctatcacaggaagtgtttttagagatttaggttcacaaattaccaaaactactcgggaataaatagaaaattgaatagacctataataaggaaagagattgaattagtaatttaaaatctcccacagaaacaaacccagacacaaatggctttactggtaaattttaccaaaagtttaaagaagaattaataccaattctttataaactcttccaaaaaaatacaagaggaggaaagatttctcaattcatcctatgaggccagtattatcccgaataacaaaaccaaagacatcacaagaaaactacaaaccaatatccctatatagagatgcaaaaatcttcaagaaaatactagcaaactgaatctagcaatatattaaaaggtttatacaccatgactaagtaggatttattccaggaatgaaaggttagtttaatatacaaaaatccaataatgtaatgcaccaccatattaataggatgaaggaccaatagcacgtgatcatctcaatagacggagcagaaacatttgacaaaattcaacatccttttatgataaaaccactagaaaaactaagaatagaggagaacttcctcaacctaataaaggccatctacaaaaaacccacagctaccataatactcaatggtaaaagattgaaagctttccttctaaaatcaggagcaagacaaagatatttactctggccacttgtatttaacattgtactagggattttagccagggcacttaggcaagaaataaaaaaaaaaagaaaaattgtatttgcagatgatgtgatcttgtatatagaaaatcctgatactgactaaaacaattcatagaactgttaaacaagttcatcgaggttgcaggatacaagatcaatattcaaaaataaattttatttctaatacagtagcaatgaacaatctgaaatgaaattaagaaaacaacttcacttaaaatagcatcaaaaaacaataaaatacttagcaataaatttaaccaaagaagtgcaagacttatatacctaaagctacaaaataacattgaaataaattaaagatgtaaataaatggaggcatcctgtgttcatggacttaatattgttagggtgacaatacttcccaaattgaactacgtttttaacacaatccctttcaagatcctagctgacagtttttgcagaaattgggagattgatcctaaaatgtatatgtaaatgtgagagacccataatagccaaagcagttttaaaagagaagaacaaatttgaaggacccacacttcctgatttcaaaaattactatgaagctagtgtgctaaaacaatgtgtacttgtataaaaacaatgtgtacttctataaggataaacatataggtaaatggagtagaactgtgatttcagaaataaacccttaaatttatgcccaattgatttttgtcaagggtagcaagacaactcagtgcaaaaagtaaaataagttatttcaacaaatgttgttggaacgactggatatccacatgcaaaagaatgaagctggacttcttctcacactatacacaaacattaactcattttagacctaactataagagctaaaaatataaaactcctggaagaaaaaataataaatctctgtgagttaggcagtgatttatttgatgatactgaaagcacaagcaacagaagaaaaaatagataaattggtcttcatcaaaaaaagtttttgaagtgttgtcatttgtataccatcaagaaactgaaaagacaatccatagaatgggagaaaatatttgcaaatcatatatctgataaaggacttgtattccgaacatataaagaactctaacaactcaataataaaaagacaaacaacccaattcaaaaatggacaaaggacttgaatagatactttgccaaaaaaaagatatgcacatgatcaataagcatctgaaaagatgatcaatgttattagttattagggaaatgcaagtcaaaaccacaatgagatatcccttcacacccaacaggatggctgtaataaaaaaggcagacattaataagtgttgtgcaggatggggcgacattggaaacctcacccattgctggtagaaatgtaaaatggtgcagccactttggaaaatagtttggcagttcttcaaaatgcagtgtcagagaaagaagagtgactactaataattaagggcttcttctcagggtaaagaaaatgttctaaaatgagatgtgatgatggttgcatgctctgtgaatataccaaagaccattgaattgtacactataaatggatgaattataggatatgtgaatgatatgttaataaagctgttaaatagctatttgtcctcacaatgtgatattttcatcttttttcacacttcctgtttctcctgagttaatggcatctgtgaaagaggaaaactatttttttaaaaaactctgtcaattatctttaattacacaaaagccrccagaagaactcattattgtttctatcttaactgttttgtttgtaatttctgtatataactagaatcccttggagaagatgacataaatttcttttaaaacccttcactgttggggccaggcacagtgggtcatgcctgtaatcccagcagtttgggaggccaagacaggaggatcacttgagcccaggagttcaagaccagcctgagcaataaagtgaggccccatctctacaacataaataaataaataaataaataaataaaaatacaaaaattagccatgcatagtggcacacacctatagtcccagcttacttgggaggctgaggctggagaatcacttaaacctgagagtttgagactgcagtgagctgtgatcacaacactacactccagcctgggtgacagagaaagatcctgtcaaaaaaaacaaataaaacccttcattattgatggtatggcatcatttatatctgagtttaatggttctatttttccagagataggactacacaattcaggcgcccattgcattggtagctgtacaagtcttgagacagaggctgagaatatgaagtgtcaggtcataagcaaacacataggaatgtgctgccagcccttgaaatggtgtgagaggttatagataatttggtattcataaacatggagcagaggcatgaaaaatgtaaaccataagactgtgccaatataataacaaatttgagggtggatgagttccccagggaaatgggaaaggggtgggcagaaggaaaggaaaaggctaaggatcagactctgggggattcagtggatcatagaaggaggggtcttggggaactaggctgaggcttgggacaactagcactatctgatggggtggtgtcagatgcagccaagtgctaatgggatggatacatcccttcatatctggctaaaaggagctcattggtgaccatagagaaaagggcatccacggacttttgaggatacaagtcagattttagaaaacagaaggatatgaaggcaatgggggcatcatttgagtgggactgttaaaagaatgcaaagaggatgacaaatgaaaaggacagacgtctccatgtagggtatgaaggctttttctagatagagtgaagctatgtatgtttgaagagagcttggatacctgcatttggaaagaggaagataatgcttttgtaaactattaatacaacacaaaactaccatcctatttaatgggtctcttcttagatgattttaaaatttaaagcattgttataaactatagaaaagaaatcatcaaaagattcatcttacaggctttgtcacaaaacaatgggactagaagggtctcaaggtattcatataagctgtacaggcatgtttctaaattaatctggaagataactcttttattttccagatgattaaagaaggctatttggcagcttccccagtgacttatgatactctaataacactcacttccttttgcttaactcaaatataaaagtacagagagatcaaactctccaacgtgccaatcaggaaatgctattttgcttactataaacttagcttatcttataggaccaacaataaagaattatgtgggagccataaactgccatctcctggcaatagtctcctgttattgtgaacattagtagattgaagatgtagtttctcaaagtcacttaagtgttttggggcacggttccagggacattgcgttctgcttgacataaacaatttctgctgtatcaaagacactgccctttagagattaaaggccactttggaaaactagtaagctttcagagtgtaggtacaaaatgaacttgaccattacactagatttttctcctttaattttaaagagcagtaatcatttggaagtattcccagagcccctgcttcaccctcttaggtcatgaaggcattccttactgagaagtggcttagtattgagaaactgctgacaccttggtgagaatactatagaaccacattttggagactgagagggtccacactgtcaggcagttctcactcagccaaaagacatcttccaggcccccctactgcactactttagggattcacacatgcaaaagtgttccccacatatgtgcatttctttttagcaggtttgggttttctgtgaaacgagaacagagaagccagaaactgataggggtgaaactaattgatgaaatcctttatcaacagcaaagaagtttatgttatgggcctttatggtcttcttgttgtttttttttttttttcttttgagacagtctcgcactgtcgcccaggctggagtgtagtggcacgatatcggctcactgcagcctccgcctccagggttcaagcaattctcctgcctcagcctctcgagtagctgagattacaggtgcctgccaccatgcccggctgattttttgtatttttagtagagacgggtttttttgtttgtttgtgtgtttgagacagagtcgtgctctgtcgctcaggctggagtgcagtgacgtgatctcggctcactgcaacctctgcctcctgggttcaagtgattctcctgccccagcctcccaagtagttgggattacaggcacccatcaccacgccctgctaattttcgtatttttttaagtagagacagggttttgccatgttggtcaggctcgtctcaaactcctgacctcaggtgatctgcctgtctcagcctctcaaagtgctgggattacaggtgtgagccaccgcctcttcttttaaaatattccgtggctcccatttctaaaatgattgccaggccagattttcctctttccttgaactctttacttctcctgccaccactgtttatcaaggctcagatcaaggggtctttggaccttgtgtgaaatcatactcaagttggcatctttctgtgaagaacttcgttaggaatgtgggacacattttgttgagttatatttataattcttttctttatgttcccagactattgagaatatttatttatttatttatttaagacagagtctcgctctgttgcccaggctggagtgcagtggtgcaatctcggctcactgcaacctccgcctcctgggttcaagcaattctcctgcctcagcctcccgggcaatatttatgttttttaataaaatttttttccaaagcaaagatcagttttgcattagactattccttgactatacgtacattttatggaggaaaatgtagatttttccagatttcagttaaaggaggaattataacaaggaccagctgctctgaggctgcccctgagctattacttaacctcagcccctctcttctccatagctatttttgttttctatgtaaaatgtctttgcccatttctctcagagtatgtattagcattttccaaagctgtttatgttccctcagtggtcgtcttccacccctgaagcttcttaagtctctatttttactccttagaaacagaaaaggtacatgtggaagatttctaagtttcacatttcaaagttctctttcttttgggaaagaaaaagttggaagtttaaaaatgcctctagaacaaacctatctccacattccatcaactgtataggaggcaggaaagcatgttttatgagcaaaggctttgggagcaggaaatttccattctatgatgtactagctactgccgctgggctttagtttccttatttataaaatggaaatatcaatagcgcttgccttcacagggttggagtgagcattgcacgagataatgcatatgaagggctttagccagtgtcaggcatagagaaggatctcaataaatgttagtgatgatggtggtgatgatgataaaggatttggagtctcaaaaagttgtattgcagcgttacaacataacattttcagataagaaacgagatcacatattctgccaaggttatttgaatttgctatgtggaagggaaaattacttctctgtcacttaatggctgccatatattcttactcagttaggaggtgtgcttacacgtgtttgtgatgtcttgtgtccttgccctgatggtcagaagttttgttttagccctttaaaaaatccaatacagctttcagtattctgcagtgcatgcagtagactttctacaagtaaatgttttaattaaaaaaatcaaattatcatgcaaattatactggtagaaaagattttggccttatgaacatttacaaggcattgatttttaaagtaaaataaattagcaaataaggccttataaactacctatttctggtctatttcctagggactcacctctactcaccattgcttctcttagcactttggctgttacacaatgaaatgaagttaatggtttctaataatgaatgagccatcttcatattagaggtcttggtaccaagcaatagaaaccaactcaggctaacaagagggaatgtactgaaaggaaatgagaggacctacagaactgatgtgaggctggaggaccacacttgaggatgagcaaagagcatgagagctctggcaagttaggggcaggaaccatagccatagtctttgtagcaggaagcatctgctcagcacttggccatggggaaagaaaacccacagtctactttcttctctatgtgggtgacccactccatggtcagagtcctctgagagtgtatgactggccaagctcagataacaggctcacagccaggctataccaggagctgggggtaggggtgtagagataaaaaaaaaaaatctatcattttctgtaatgggagctggtagctgggaccatcctgcctacacagctatacagaaaagaagagagacaatttcccagaaagaaaccaggatactaccaggaaaggggaatggatgctcggcaggcccacagtggcaagtgcctgatattccacacttgctaataatctgannnnnnnnnnnnnnnnnnnnnnnnnnnnnnnnnnnnnnnnnnnnnnnnnnnnnnnnnnnnnnnnnnnnnnnnnnnnnnnnnnnnnnnnnnnnnnnnnnnnnnnnnnnnnnnnctctcgtctagtgggaacagctttctcaagagattagatgggaattcaggagttgagaatattgtagcaccagtattagatactaggatgtgctacctttatttatgcataatttccaaataaatagaaataaatttaaagctattatttactgtaaattaaaaccagccaacacagcaccagggagattctgcacattttattaaattggggcctgtataggtataatgtattcagttgccatcaaaggtaatgtttctgacacagtagagggtctggttactttgcaagtcttaggttggttgcttttttgttgttttagaacaccattcaaatttaagatattactctttttgattgattctgtttgcttttatgttctaggggaaaacatatccatttcggggcgcctttccaccagtatggaatcccattgcatatttggattacaataatctgtggmggacaatagataacatggggaaggaggtaaaatgtgtgttcagtttgcacatgacccattactgaaataacaatggcaactgtttaatatccttccatagtgcagggaacattgctctggacaccaatgcatatcatttcccatgtacccaaactgcaaagttggtcgtatttccacttcacaaatggaaaaatgagtgcccagagattatgtaatttactcaagacctcatagcaagggaaccagcataccaacccactctcttatacaaatgcctgtgtgccttcaactctatgctactgagcatttatatgacatatttttgccaagtatctctacttacagttgtctgtctgtctgtaatgccattttagatagtaaaggagagaaggacttgctgccccaaagcttctttacttagtcttaggctctgtaatatcaatttgggacataaaatggttattagctttcaataacaatgatgatgataattgtcatcattataataattacatataaatttgtacatagacatatataatattatcactactattattgttttggcaatggcattaggacacagaatccaaagaactctaccccactccctgtctctatatagaattctatgccaatcacacatttcaacacagagaccaagagacccattttcagaggttttcatgagggccttcccgagaagaggtggcagttaccatcaaacctgagaggggacttcctttctctacagattccaactgatgcaccctgggaggctcaacatgctgacaaatgggacaaaatgaccatgaaagagctcattgacaaaatctgctggacaaagtaagtagacttgaccattcaaaatttactttttatcttcccttctcgtcttttatatcttgccttgaactgcagtgcttttcttaacaacttacagaaaaaaagaggaaacctagtaatctttcagtcaatagcaatgttgagggcacctcaaagtaggttagaacagaaaatgaatctaaaaattaagaaaagtgggtgaatgaagtagaacttcttttaatgaaagcattgtgtgatctgcaataaaatcaataattgtgttttcatattattgaaaggttgcctacaaaagcagtttgaaaagatattttttaaaaatgtggtacatttacaccatggaatactatgcagccataaaaaagaatgaaatcatgtccttttcagggacatggatgaagctggaagccatcattctcagcaaactaacacaggaacagaaaaccaaacatcgcatgttctcactcataagtgggaattgaacattaagaagacatggatgcagggaggggaacaacacacactggagcctgtcaggtggtgggaggagggagagcatcacgatagataactaatgcatgtgggtcttaatacctaggtgatgggttgatgggtgcagcaaaccactatggcacatgtttacctatctaataaacctgcacatgtactccggaatttaaaataaaataaaatggtaatcccatatagatgtggaatactaggaaatgagaggaaagctagtctgtagtaataaaaatgttcaattagaccatgtcttattagtttatgtggggcttactatgtgaaggcaccataccaggcactgaggaatgggggtgaacttcttaggaatagcccctaccctcatggagtttatgtttttctagcaggcaagactgaccttgagcacaattacataatgctaggagagttcctgtaacagggagaaccttacatggtctgagggtacaggaagcattctttgatgaagcaatctttaacctgaaactaaggagttagtgcatcaactaagaatgagccatcggggcaggggggagtcagaaaaggtgaacagtgtagggcgatggtatcttccaggaatgatacacagggacaggagagagaaaggaagaatggatgaagttggggggatagtatctgccaggaataagtcatggggcaggagaaagacaggaagggtggatggtgtggtagaaatcgtaccttccaggagtaacccatagggttgatagtagtggggcagatggtatgatctaagaatgacacacagtgtcaaagggagagagggaaggttggacagtggtggtgggaggagggaatgatatcttccaaaaattacccacaagggcaagaagggagaaagggataatggagaaagatgggtggtgttttaggaaagacccacagaaacaaggcgagatggggactggaagggtggatggcattgggggattttgtcttctaggaatgagccacagggattagggggagataggaaggactgatggggcaggaagatagtatgttccaggtatgatccacaggttcagaggggagaaaagtatagtggatggtgtttgccatggatgaaccaccaggatggtgggggagacagaaaaggttgatggtgtggtgggatggtatcttttatgaatgacccaaaggggcaaagggaaggcaggaaagatggatgttgcggggatatcatccaccaacaacccagaggtgtagtggggagacaggaggtgtagatggtattaccaggatatgtcttccagaaatgagccacaaaggcagggataagataggaagagtgaatggtgtggcctggttgcatcttccaggaatgcccccacagtgttagggagtggggaacaagaatggatccctgtgggggtatggtatcttctaggaatagcccacagagtcaaggggaaacaggcaacattaggtagtgtgtgtgtgtggtggggaaatggggcgggggtggggtggggagaatgaaattttccagctatttctctctctctggggagagaaagggaaggttggtttgtgtggatggagatggtatcttctaggaattacccaaaccagaagggtgratgtcttaggggaaggggaattttccagcaatgacccagagggatggtggggagacaggaaacannnnnnnnnnnnnnnnnnnnnnnnnnnnnnnnnnnnnnnnnnnnnnnnnnnnnnnnnnnnnnnnnnnnnnnnnnnnnnnnnnnnnnnnnnnnnnnnnnnnnnnnnnnnnnnnnnnnnnnnnnnnnnnnnnnnnnnnnnnnnnnnnnnnnnnnnnnnnnnnnnnnnnnnnnnnnnnnnnnnnnnnnnnnnnnnnnnnnnnnnnnnnnnnnnnnnnnnnnnnnnnnnnnnnnnnnnnnnnnnnnnnnnnnnnnnnnnnnnnnnnnnnnnnnnnnnnnnnnnnnnnnnnnnnnnnnnnnnnnnnnnnnnnnnnnnnnnnnnnnnnnnnnnnnnnnnnnnnnnnnnnnnnnnnnnnnnnnnnnnnnnnnnnnnnnnnnnnnnnnnnnnnnnnnnnnnnnnnnnnnnnnnnnnnnnnnnnnnnnnnnnnnnnnnnnnnnnnnnnnnnnnnnnnnnnnnnnnnnnnnnnnnnnnnnnnnnnnnnnnnnnnnnnnnnnnnnnnnnnnnnnnnnnnnnnnnnnnnnnnnnnnnnnnnnnnnnnnnnnnnnnnnnnnnnnnnnnnnnnnnnnnnnnnnnnnnnnnnnnnnnnnnnnnnnnnnnnnnnnnnnnnnnnnnnnnnnnnnnnnnnnnnnnnnnnnnnnnnnnnnnnnnnnnnnnnnnnnnnnnnnnnnnnnnnnnnnnnnnnnnnnnnnnnnnnnnnnnnnnnnnnnnnnnnnnnnnnnnnnnnnnnnnnnnnnnnnnnnnnnnnnnnnnnnnnnnnnnnnnnnnnnnnnnnnnnnnnnnnnnnnnnnnnnnnnnnnnnnnnnnnnnnnnnnnnnnnnnnnnnnnnnnnnnnnnnnnnnnnnnnnnnnnnnnnnnnnnnnnnnnnnnnnnnnnnnnnnnnnnnnnnnnnnnnnnnnnnnnnnnnnnnnnnnnnnnnnnnnnnnnnnnnnnnnnnnnnnnnnnnnnnnnnnnnnnnnnnnnnnnnnnnnnnnnnnnnnnnnnnnnnnnnnnnnnnnnnnnnnnnnnnnnnnnnnnnnnnnnnnnnnnnnnnnnnnnnnnnnnnnnnnnnnnnnnnnnnnnnnnnnnnnnnnnnnnnnnnnnnnnnnnnnnnnnnnnnnnnnnnnnnnnnnnnnnnnnnnnnnnnnnnnnnnnnnnnnnnnnnnnnnnnnnnnnnnnnnnnnnnnnnnnnnnnnnnnnnnnnnnnnnnnnnnnnnnnnnnnnnnnnnnnnnnnnnnnnnnnnnnnnnnnnnnnnnnnnnnnnnnnnnnnnnnnnnnnnnnnnnnnnnnnnnnnnnnnnnnnnnnnnnnnnnnnnnnnnnnnnnnnnnnnnnnnnnnnnnnnnnnnnnnnnnnnnnnnnnnnnnnnnnnnnnnnnnnnnnnnnnnnnnnnnnnnnnnnnnnnnnnnnnnnnnnnnnnnnnnnnnnnnnnnnnnnnnnnnnnnnnnnnnnnnnnnnnnnnnnnnnnnnnnnnnnnnnnnnnnnnnnnnnnnnnnnnnnnnnnnnnnnnnnnnnnnnnnnnnnnnnnnnnnnnnnnnnnnnnnnnnnnnnnnnnnnnnnnnnnnnnnnnnnnnnnnnnnnnnnnnnnnnnnnnnnnnnnnnnnnnnnnnnnnnnnnnnnnnnnnnnnnnnnnnnnnnnnnnnnnnnnnnnnnnnnnnnnnnnnnnnnnnnnnnnnnnnnnnnnnnnnnnnnnnnnnnnnnnnnnnnnnnnnnnnnnnnnnnnnnnnnnnnnnnnnnnnnnnnnnnnnnnnnnnnnnnnnnnnnnnnnnnnnnnnnnnnnnnnnnnnnnnnnnnnnnnnnnnnnnnnnnnnnnnnnnnnnnnnnnnnnnnnnnnnnnnnnnnnnnnnnnnnnnnnnnnnnnnnnnnnnnnnnnnnnnnnnnnnnnnnnnnnnnnnnnnnnnnnnnnnnnnnnnnnnnnnnnnnnnnnnnnnnnnnnnnnnnnnnnnnnnnnnnnnnnnnnnnnnnnnnnnnnnnnnnnnnnnnnnnnnnnnnnnnnnnnnnnnnnnnnnnnnnnnnnnnnnnnnnnnnnnnnnnnnnnnnnnnnnnnnnnnnnnnnnnnnnnnnnnnnnnnnnnnnnnnnnnnnnnnnnnnnnnnnnnnnnnnnnnnnnnnnnnnnnnnnnnnnnnnnnnnnnnnnnnnnnnnnnnnnnnnnnnnnnnnnnnnnnnnnnnnnnnnnnnnnnnnnnnnnnnnnnnnnnnnnnnnnnnnnnnnnnnnnnnnnnnnnnnnnnnnnnnnnnnnnnnnnnnnnnnnnnnnnnnnnnnnnnnnnnnnnnnnnnnnnnnnnnnnnnnnnnnnnnnnnnnnnnnnnnnnnnnnnnnnnnnnnnnnnnnnnnnnnnnnnnnnnnnnnnnnnnnnnnnnnnnnnnnnnnnnnnnnnnnnnnnnnnnnnnnnnnnnnnnnnnnnnnnnnnnnnnnnnnnnnnnnnnnnnnnnnnnnnnnnnnnnnnnnnnnnnnnnnnnnnnnnnnnnnnnnnnnnnnnnnnnnnnnnnnnnnnnnnnnnnnnnnnnnnnnnnnnnnnnnnnnnnnnnnnnnnnnnnnnnnnnnnnnnnnnnnnnnnnnnnnnnnnnnnnnnnnnnnnnnnnnnnnnnnnnnnnnnnnnnnnnnnnnnnnnnnnnnnnnnnnnnnnnnnnnnnnnnnnnnnnnnnnnnnnnnnnnnnnnnnnnnnnnnnnnnnnnnnnnnnnnnnnnnnnnnnnnnnnnnnnnnnnnnnnnnnnnnnnnnnnnnnnnnnnnnnnnnnnnnnnnnnnnnnnnnnnnnnnnnnnnnnnnnnnnnnnnnnnnnnnnnnnnnnnnnnnnnnnnnnnnnnnnnnnnnnnnnnnnnnnnnnnnnnnnnnnnnnnnnnnnnnnnnnnnnnnnnnnnnnnnnnnnnnnnnnnnnnnnnnnnnnnnnnnnnnnnnnnnnnnnnnnnnnnnnnnnnnnnnnnnnnnnnnnnnnnnnnnnnnnnnnnnnnnnnnnnnnnnnnnnnnnnnnnnnnntgtggaggatacaagaggagatgcaagatgaccaagtaggagccaccactgctatagcctggacatattggtagcctggaccagggctgtggcaatgaagatggagaggagaggatgggtattgaaagaagcttattgatgcttagagagaacctggattagcatacttggagctaactcataatttctttttttttttttaattatactttaagtgctggggtacatgtgtacaacgtgcaggtttgttacataggtatccatgtgccatgttggtttgctacacccatcaactcgtcatttacattaggcatttctcctaatgctatccctccctgagccccccatcccctgacaggccctggtgtgtgatgttcccctccctgtgtccatgtgttctcgttgttcaactctcacttatgagtgagaacatgcggtgtttggttttctcttattgtgttactttgctgagaatgatggtttccagtttcatccacgtccctgcaaaggacatgaactcatcctttttttatggctgcatagtattccatggtgtatatgtgccacattttcttcatccagtctatyattgatgggcatttgggttggttccaagactttgctattgttaacagtgctgcaataaacatatgtgtgcatgtgtctttatagtagaatgatttataattctttgggtatatacccagtaatgggattactgtgtcaaatggtatttctagttccagatccttgaggaatcaccatactgtcttccataatggttgaactaattgacactcccaccaacattgtaaaagcgttcctatttctccacatcctctccagcatctgttgtttcctgactttttaatggttgccattctaactgtcatgagatggtatctattgtggttttgatttgcatttctctaatgaccagtgatgatgaacattttttcataagttttttggctgcataaatgtcttcttttgagaagtgtctgttcatatacctttgcccattttttgatagggttgtttctttcttgtaaatttgtttaggttcgttgtagattctggatattagccctttgtcagatgggtagattacaaaaattttctcccattctgtaggctgcctgttaattctgataataatttattttgctgtgccaaagctctttagtttaattagatcccatttgtctgttttggcttttgttgctattgcttttggtgttttagttatgaagtctttgtccatccctatgtcctgaatggtattgcctaggttttcttctagggtttttatggttttaagttatacgtttaaatctttaatccatctcgagttaattttcgtataaagtgtaaggaagggatccaatttcagctttctgcatatggctagccagttttcccagcactatttattaaatagggaatcctttccctgttgcttgtttttgtcagtttgtcaaagatcaaatggttgtagatgtgtggtgttatttctgaggcctctgttctgttccattggtctatatatatctgttttggtaccagtaccatgctgttttggttactgtaaccttgtagtatagtttgaagtcaggtaacgtgatgcctccagctttgtcctttttgcttaggattgtcttggctatgcgggctctttttttggttccatatgaagtttaaagtagttttttccaattctgtgaagaaagtcagtggtagcttgatggggatagcactgaatctataaattactttgggcagtatggccattttcgtgatattgattcttcctatccatgagcatggaatgttcttccatttgtttgtgccctcttttattgcgttgagaagtggtttgtagttctccttaaagaggtccttcacatcccttataaattggattcgtaggtatgttattctctttgtagcaattgtgaataggagttcactcatgatttggctctctgtctgttattggtgtataggaatgcttgtgatttttgcacattgattttgtatcctgagactttgctgaagttgcttatcaacttaaggagattttgggctgagacgatggggctttctaaatatataatcatgtcatctgcaaacagagacagtttgacttcctctcttcctaattgaatacctttatttctttctcttgtgtgattggcctggtcagaacttccaatactatgttgaataggagtggtgagagagggcatccttgtgccagttttcaaagggaatgcttccagtttttgctcattcagtatgatattggctgtgggtttgtcataaatagctcttattattttgagatacgttccatcaatacctagtttatggagagtttttagcatgaagggctgttgaattttgtccaaggccttttctgcatctattgagataatcttgtggtttttgtcattggttctgtttatgtgacggattacgtttattgatttgtatatgttgaaccagccttgcatcccaggaaggaagctgacttgatcttggtggatacgctttttgatgtgctgctggatttggtttgctagtattttattgaggattttcgcatcaatgttcatcagggatattggcctgaaattctctttttttgttgtgtctctgccaggttttggtatcaggatgatgctggcctcataaaatgagttagggaggatcccctctttttctattgattggaatagtttcagaaggaatggtaccagctcctccttgtacctctggtagaattcagctgtgaatccatctggtcctagattttttttgttggtaggctattaattactgcctcaatttcagaacctgttattggtctattcagagattcaacttcttcctggtttagtcttgggagggtgtatgtgtccaggaatttatccatttcttctagattttctagtttatttgcatagaggtgtttatagtattctctgttggtagtttgtatttctatgggattggtggtgatatcccctttttctttttttattgtgtatatttgattcttctctcttttctttattagtcttgctagtggtctattttgttgatcttttcaaaaaaccagctcctggattcactgatatttttgaagggttttttgtgtctctgtctccttcagttctgctctgatcttagttatttcttgtcttctgctagcttttgaatttgtttgctcttgcttctctagttcttttaattgtgatattagggtgtcagttttagatcttccctgctttctcttttgggcatttagtgctataaattttcttctacacactgctttaaatgtgtcccagagattctggtacgttgtgtctttgttctcattcgtttcaaagaacatctttatttctgtcttcattttgttaattactcagtagtcattcaagagcaggttgttcagtttccaagtagttgtgcrgttttgagtgagtttcttcatcctgagttctaatttgattgcactgtggtctgacagacagttcgttgtgatttctgtacttttacatttgctgaggagtgttttacttccaattatgtggtcattttagagtaagtgtgatgtggtactgagaagaatgtatactctcttgatttggggtggagagttctgtagatgtctgttaggtccacttggtccagagctgaattcaagtcctgaatatccttgttaatttttgtcttgttgatctaatgctgacagtggggtattaaagtctcccaccgttattgtgtgggagtctaagtctctttgtaggtctctaagaacttgctttacgaacctggatgttcctgtattgggtgcatatgtatttaggatagttagctcttctcgttgcattgatccctttacagttatgtaatgcccttctttgtctcttttgacctttgttcgtttaaagtctgttttatcagagactaagattacaacccctgctttttttttttgctttccatctggttggtaaatattcctccatccctttattttgagcctatgtgtgtctttgcatgtgagatgggtcttccaaatacagcacaccgatgggtcttgactctttagccagtttgccagtctgtgtcttttaattggggcatttagcccatttacatttaaggttgatattgttatgtgtgaatttgatcctatcattttgatgctagctggttatttttcccgctagttgatgcagtttcttcatagcatcaatggtctttacaatttggcatgtttttgcagtggctggtactggttgtcctttccatgtttagtgcttccttcaggagctcttgcaaggcaggcctggtggtaacaaaatctctcagcatttgcttgtctgtaaaggattttatttctccttcatttatgaaacttagtttggctggatatgaaattctgggttgaaaattcttttctttaagaatgttgaatattggcccccactctcttctggcttgtagggtttctgctgagagatctgctgttagtctgatgggttttcctttgtgggtaactcgacctttctgtctggctgcccttaacatttttttcctkcatttcaaccttggtgaatctgacaattatgtgtcttggggttgctcttttcgaggaatatctttgtgatgttttctgtatttcctgaatttgaatgttggcctgccttgctaggttagggaagttctcctggataatattctgaagagtgttttccaagttggttccattctccctgtcaatttcaggtataccaatcaaacatagatttggtcttttcacatagtcccgtatttcttggaggctttgtttgtttcttttcactcttttttctctaatcttgtcttctcgctttatttcattaagttgatcttcaattactgatatcctttcctccacttgatcgattcggctgttgaaacttgtgtctgcttcacgaagttcttgtggtgcatttttcagctccatcaggtcatttatgttcttctctacactggttattctagttagcaattcgtctaaccttttttcaaggttcttagcttccttgcattgggttagaacctgctcctttagctcggagtagtttgttattacccaccttctgaagcctacttctgtcaattcatcaaactcattctctgttcagttttgttcccgtgctggcgaggagttgtgatcctttggaagagaagaggcgttctggtttttggaatttttcagcctttctgcactggtttctccccacctttgtggttttatctacctttggtctttgatgttggtgacctatggatggggtttctgtgtggatgtcctttttgttgatgttgatgctattcctttctgcttgttagttttccttctaacaggcccctcagctgcaagtctgttggagtttgctggaggtccactccagatgctgtttgctggggtatcaccagcagaggctacagaacagcaactattgctgcctgatccttcctctggaagctttgtcccaggggggcacccaccagatgccagccagagctctcctgtatgaggtgtctgttggcccctactgggaggtgtctctcagtcaggctacacgggggtcggggcccacttgaggcagtctgtccgttatcagagctcaaacactgtgctgggagaaccactgctctcttcagagctgtcaggcagggacatttaagtctgctgaagctgcacccccagctgccccttcccccaggtgctctggcccaaggagatgggggttttatctataagtccctgactggggctgctgccttttgttcagagatgccctgcccacagaggtggaatctagagaggcagtaggccttgctgagctgtggtggggtccgcccagttcgaacttcctggtggctttgtttacactgtgagcataaaactgcctactcaagcctcagcaatggcagatgcacctctccacaccaagctcgagcattccaggtcgatatcaggctgctgtgctagcagcgaggatttcaagccaatggatattagcttgctgggctccatgggtgtgggacccactgagccaggcaccggagggaatctcctgatctgccagttgtgaagactgtgggaaaagcgcagtatctgcgcaagagtgtaccgttcttcctgggacagtctctcacagcttcccttggctaggaaaaggaaatcccccaaccgcttgcacttcccaggtgaggcgatgccctgccctgcttcggcttgccctccatgagctgcacccactgtccaaccagtcccaatgagatgaaccaggtacctcagttggaaacacagaaatcacccaccttctgcgcggatctcactgggagctgcagaccggagctgtttctgtttggctgtcttgctggacccttggctccttttcaactcataatttcttaagcaggagaaaatgttagtttctccaagagttaaagaatgcattccttcagaaattgaatccttgagagtttttttcaattgcaacagaaaaactttctgaacacactaaatcgtgttgtaaaaacatgacattctctgactcctgtacatattgacacctgacttccacttttgttctatgaacaggactgctaggcrgtttgcttatctttttgtgaatatcaatgtgacctctgagcctcacgaagtgtctgccctgtggttcttgtggtatgtgaagcagtgcgggggcaccactcggatattctctgtcaccaatggtggccaggtatggtgtgtatgtgtctgttctgaaacaagagcttcatctgtgattttgctttctcccagggcagtgtctttaatagttgcttcaggattttgaaacatgaataattagcagcatgaaatgatctcaaaagattttctgaaaaaaaaatttctcatttccttttgtcactcctgaaaaggagttcacagataaagaatgtttcattttgaattaattaggttttgagaattaagttccttccttttggtagcaggtaaaattaggctgtttatgtaggagaagctaaattcctaaaataatttcyaaaaaattctagaaattgtacaattattgtacttaaaatcatctctgttctagacacaaggtttctgtcccatctgtttatcagagtgattcttttatgttaactgctacagaagggaagtgactgttcttccttctaatttacgcaagtgattatggccactcttgcaatagtaaattctgccttttggattcttagtttttgctacccacttgaatttgcccagtttccatatcatttcctttattaataagtgaattcatttcgttcattggctggacacatggcgaagccagaatcctaattccccagactctgagattctctgcttcaaccctttctgttatccaaagagaatgggtatctctgttctataaatgttgtgcttggatggtatgaggtttaattagtagcagtttacttctaacttaggttctctgagttcctgaattctgagtgcacagtacaaggtatagagtctttctctgccaagtgaattattcttctcctgaggagatcaccggaaatccccaagttcttgtgacaccaagactcattgcccatttgacccttagccttgacaaatgcaggacagttgcattttttaaatgtctttacctacaggcagagatgacagattactccttttagccagtattttactttctgaggtattttgatttacatttgatatttgtttccttcattcagaggagccaggatacttctagccaaattctacatgaccttttggaaaatatggttcagatgattaatctcaaaccatggtcacaatatttttataaagaacttaggcttatcctgtaatttaattcaacaaatactagacctggaggggtggacagtgaacaagacagaaacagttcgtggtctttccaccacactaaaactcaaagtacctcttagaaaacagaccagattataagttaaatggtctgggtttcttgaggaaagacaaatcatgaatttaggtctgaaccactctgggaattttttttcctttttttaatttaatttttgagacagagtcttgctttgttgcctagcctggtctccaactcctgggctcaagcagtccttccgcctcagcctctcaaagtgctaagatcacaggcatgagccaccatgcctagccaggaatattttttataaagaactttggtgttgttattaaaacagtagccagttacaaaagtgcaaaaatcactgcgtggctgcttatgcagttttctggaggagtatgattgaggaatctgttaggaatcttctggctgggcgcggtggctcacacctgtaatcccagcacttttggaggccaaggagggtggatcacctgaggacaggagtttgagaccagcctggctaacatgatgaaaccccatttctgctaaaaatacaaaaattagccaggtgtcatggcacgcacctgtaatcccagctactcgggaggccaaggcaagagaatcacttgaacccaggaggcggaagttacagtgagccaagattgcgccattgcatgccagcttgggcaataagagtgaaactccgtctcaaaaaaaaaaaaaaaaaaagaatcttctataataggctaaaaatatccttctggttcttaccaaaagcattgtgttaaggacttaccttcttagattaagctggaaacatttccatggtgatcgtagcagaaggcagagggtagagcacttctggtcttataagggccgctcaagagaactatttaacaatatctaaaggagcaagcagatgcttagccttcaccctctgcctctgccttgaagcttccagatagttttgcaaaaagttactcaagatctgatattccgaatcttttttttttttttttttttttgagacggagtctagctctgttgcccacgctggagtgcagtggtgcaatctcggctcactgcaacctccgcctcctgggttcaagtggttctcctgcctcagcctcccgaatagctgggattacaggcacgtgccaccacgcctggctaatttttgtaattttagtacagccacagcacccggcccttcttcccattcttagaacatcatttggtggtgactagtaggactagtaggacgtgactatccctaaaagcaccctgtaactttgtctataatatggctctatctgcatccttacctgcctggacaacctcagcccagaacacaggaatcaaaggaaattagaaacttcatcctctggaataagccctgtgcctgccccttctcagggctccctccacaccctgcactctttgacatttgaagcccacagacttgctgatattccccttggtcagggcagcattggcatagtggaacatttcttcgggttctgtgatttttataaacttgtaatggcttttctttgccagaagctgtgcagggaatgatcattgaattgtcttggtcaactctgcctctgtcctaatgaagtcttctgacagttaagtgtgcagacgttagaggtgtggcctgtgactttctggaggttttctaatcagtagccagtaggattttccttccttgggctttcataatgtttcctttcttacctacctcctcctgtaggaacggaagtttgtaggtggatctggtcaagtgagcgaacggataatggacctcctcggagaccaagtgaagctgaaccatcctgtcactcacgttgaccagtcaagtgacaacatcatcatagagacgctgaaccatgaacattatgaggtaactcagtttagtcaaaaggagcatatagtaaataggccttgtgtcttttgcagtttctaaccagatataattcaagcagtagcataattaatgctgacatgtttccgcctcagtcttccaaattaccagccttggttgacctaccttgatctgttttgttgcctcacagttgcctcattttctcattttgtatgtttttactgctcaatgttgtttagaagtgataaagatgatttttcacgcctgccacaaagactgcagctcacatttgaggtaatattttgcttgtgtgtgttttagtgcaaatacgtaattaatgcgatccctccgaccttgactgccaagattcacttcagaccagagcttccagcagagagaaaccagttaattyagcgncytccaatgggagctgtcattaagtgcatgatgtattacaaggaggccktctggaagaagaagggtaggctgctattattcatgtttaaactgtattatatgaagaaatcacagtcttttaggattattgaacagaaggtattgaacagaaacaaagtattttcaaactggtagaaaaaggattagaaatcttggtctgtcaatttcctcatatccttggccacacataatgaccccaagagcacttgttggcaatgggagggaagaaggagatcacatcagtcataaggccaccattgccctgactcctggcatctgtcctgcttcttactttttatgagcagagtgaggtcaacaggcaccatggaaagagcactgcgttgaagttacacattccgggacttcgcttgcttgctagcatcagtctgtagctgtaaagtggtgacagtaatacctaccactamggtgttgtgagaattaaatgaggcaggatcttggacttagaaagctgcccagatatggtggctactgttgataagcattctggttatactcatcggattccctcctcccacctcttccctggattgggtcattccctccaatgcagcccttctctttcctcatgtatgctaggagccagggttatcttaccatttttgtcatgcattggctggtcataagccctttatgtaaaggtgatggagatgggtcattttctgtctgtgggtgaatagacatccttatatattcagtgtgtgtatttaacaagacatgtagggttggggccaagaccaagagtttaagtttttacttcctcttaaaaaatagtttatatatatttatgtgtgtatgggtgtctctgatgagcttgatctcgatctcccattgatttttctcctggttaagattactgtggctgcatgatcattgaagatgaagatgctccaatttcaataaccttggatgacaccaagccwgatgggtcactgcctgccatcatggggtaggttagagcagggtgttctgcattttccaaattgtgttgatgtattggtgtggatgctgtcaaagtatattactttggaattaagttcaagcaatgatgaataatgctatcaaaatatataatgtttccatgtgttaaaatattgcagtaatgtttcgtatgtagcacaagaatactgggaaactttactaaaattgacaccattttgaacttgtacccatgtatgtctttctctcatacaaagcttacgtgttgaggatggagtgaaaaaaagcagctagacaggcagtatggtagccacccctgcctacaggcagaatgtccacagccattctgaaatgagaactaaccgctttattctataaaaacattctaaatgtggggtttctcggttttatccttttctccattccagatatctgctacatagcaaatgttagttgttaccctgagatataagacagctgaccaattaggaggcccagttcagaattgagccaggccttgattggatggcatggcagtttttctggtgggtcactctagttatccttcaccagtggtgcttcacttaacctctaaagtgtgcggatgacccagggcctggttctgtgtagggaaaatgagagcttttcccctctcttctcattccggcacatagctgtcctactcgttgsgggctggggagtccagagaaggaagtggtgtccccacaaakgaattgctaaggagttccacagcctccctcttgcctgccttttggcctcctcaaaaactatacaaataaaaggcgatttattctaccacactgtaacaaaagaacatagcttcagtagcaatcaagtgacttttagagaccagtggtctcccctttacccctaggaaatgcatagctcttgctcagagggaaaggtgaactcatgcacatcatgtcattgaaggaaaattacaaaggcaaaaggagcagacccacatcccagggaagttagaaagcaggttgtgctgctggttactaaygagacattttataaccacttctctcattgtaacatataagaacaccagcctccctgagaaaggcaggtgcttacaacataatgactgttggaataacacatcctcttcatctctaaccctattgggcagaagaggatataggttgtttgggtagtttgacatcatcttctatatgccagagaaaagcaggaggttcaggtacaggtttcaggagaatgtcggttaagacaaatccaactatgaatggaagagcaattgatatttttcttgccctgggagttagatatagtgatgtcttctgctgtttttgggctttctttttttttttttttttttggaagtggaactcaatattttaatgattttacttaagataaatagtataaaaggaaaatgttaaacggttgtgttctgtgracagtggggctaaaacaaatataaaataataataattggttatagaggaccaagtacagaagatgagagtttccttggaaactggggaataccaaaataatctgtttcttaacttggcgatgtagtcttaaaaattaaagctaccatttattgagcattggttgtgggtgcaagtttttatgtgtacaatgcttttgggctttcttcagctttattattaactaggttagggctcaaataaccttccaggtgttaatggagttatttaggcaattcttagaaagtgatattctaatctctttcatcttgacacttgcctccaccctgctctttgctgatggccacagccacgaaaaccttgaagataggggtggtaattgcccagcactgtgtttgtaataaacttttggaaactagaaaggaccttgtactttagaactgtgaaatgtttccaacacaaagccagcatgtttaatttcctcaataaaacaccaaagtaagttaaagcttatttatccatagttgggattagatcaaagagattatttcattcatgacttgagatttgacagaaataaccaacactaactgccctttgggaagggaactgtaaaaagtatacaagacaagttgactaaaaatgttttcagataaatcatttaatcttttatcagatattgatgattaaaaaaactatatacatctaaacttactgattcttgcataaacccagaatctaactaaaataattaataacaagctataacttgaggtgttaaatcatgcaaaattatgactatatcccataaagttcaatagttcagatttcctaaatagtccacagctttctctgaaatactattctctacattaacatacatctttgcttctcaaagtgatctcaaataacagccctaaaggaactgccaatccaatttgaggaacactttaatttgtgggtagggagaggaggaaatatctgttttttgcactgatctacctgtccttktggtcttgaataaaagaaatacaaatttaaaaattttttaatggaaaaataatttcattgtcctttagctcatttggatttttgaaagctttctaataatagtataactaaggacttcatgtcacaattcaattcttttaaatatacatgcagttagtaatatcagtataataaatagaatatatttgattaaaggggagcaggcaggttataactgagttttattgagttactttatttggggactatattaggtcagtttccagggaagctgactcagagctggagatctgggtgctggaactttattgggaagtgctctggggatgactacctatggcagaaggattatgcggaacttgagctccaatgttgtcccaacaaaggcctctgccattcccttggaagttctggagctgggtggcccttcagagttgtcttcaaccgcatctaggtcagaacaactctagggaggggtgggaccttgagcgaggcattctctgctgccccgtccaattactggggaaggtttcagctgtgaggtaagagtaacgagtgcctggtcccaaagggagcctggggggcccaccgtggcctccactacagacacatgtttatatttgtttttccagctttgataaagtatttggcagaaggcaacagtcattaccagaataatcatttagcacaacattcattcattcaacatttgatttcctactatatgccaaaaaccatgttaaactttagaagtaaaatattgaataggaggtcacctgtcgtgtaggggatcacagcctagcaggggttttggacacacaggcagaccaaagacaatatggcatttgccctactagaggaggagggtctgagagagttcatttcatgctgaatagctacaggttaagaatacttcagaaagaaagggcagctcttaarataaacagctgtaacctgatcattcaatgtaacctctctctccagcttcattcttgcccggaaagctgatcgacttgctaagctacataaggaaataaggtaagaatttataactgaaaaatagatgaaaaagttagctttgtattttgtttttgcactgacagtagtagaataacatgaggaaaaacacagtacttcacaaatattctcaaaattccaacaaaccaaccttttgtattttgctacagcyctcttgacctagcccttgcccgtgtgcatatattaattttacatgttcgtgtttattttacagtrgttaagaggtaggatttccctgagagatggatggataaaaatcatagaaaatattagctgtgaaaaatgctgtagaaaccgaatcccaatcctctttcaaggccataatctttttctaagattctctgacatggactttctaaaaagtatattttaacctgtagcaacttttgtacatgaaaatattcactactgcttatctgggacacagttctgatgttcccttatctgaaagcttcctagtataaaatttattttaggacagtggtttttttttttttctttctttctccctttctcttcctgtcatggtatatttgttttgttttgttttggaatcctttgttcaattaaagtcttacctgaagaggtaagccttttaacatcagagttatttggctgttggagggttgcctctgggtagccctaaatcctctgctagcttttaaagaggtccaatacatacacaaaaatatakacttttctctgaatgtaatttaaaaaattaaacagctaacccattagcagccgttgctttgggagttactctgatgactttagaagtgggggaaaggctgcagaatgwgttcctacatgtgcacacggatttgtttatttgaatctcatggtttgcaggtaagctttacatggaagaaactcccagtttcaattagcaggttcttctctgttcactgtaagtggtaaatggttgaatctcaacaatcatgggattcaaacaaccatgagattgtggaatctcatggttgttaaaaataaactctactcactcaatggaggagggatttggggtccagtgatggggaatgatttgttcaagcctccatagctagtgtcttagtgcatttgtgatactgtaacaaagtgcctgaaactgggtaatttatgaagaatagaaatttatttctcacagttctagaggctgggaagtccaagattatgatgccaacagattcaattcagtgtttggtgagaacctgttccgtaggtagcactttctcatggtgccctcacatggcagaaaaggcagaaggaggaaggacaaaaagtgatgaaggtggtatcctcacttggaggaaggcagaagggcagaaagggcctagctagttccctccagcccatttataagggcactaatctattcatgagagcagaatcttcctgatttcatcatttccgcagagaccccacctcaaaataccatcaccttggaggttaagttccaacatttaaattttggagggacacatacattcaaatcatcgcagctagcttgtgacaaaaagtctggagtagcatatagcgcatactttttcattacaccacactaagctgacattttcttttggatttcctgctttccctccttattaatagtaaaataaataccagcctgtaggtagacatttggttatgattccacacagtggctgaacttctcaaaagttcttgtaaggcaaaacccttactaaatatgtcattgacaaaaacagtggttcccagatctgactgcatcaaaatatcccaaaagatgtttggaaaatatgtttttataagacctatagattgtgattgagtaggtttgaggtggggcctgtgtatttgtatttttcaacaagcttttcaggtgattatgataagcaaccagatttagaaaccagtgaataagttcaacgagatgatttgcacagtggcctcttttaktcatcacttaggttctgttatttttagagccaaattaatcaatcagtgcattgttttaacatccttgccttacatatcttttccaaaaatttttaattttaaagggaagaagggaaagggaaagataatttcctatgtttgtgtgaacacatccttggctcttctaataatatgaaatacagtaaataatgacttgtaactattataattgtttttaacattcatgaatgaaaactaactacaatgtgggttgattggatttcaggtttcactctgctttaataaaaattttattacacatccagaaagtaagttaagcaggcctggcgcattggctcacacctgtaatcccaacactttgggaggctgaggcaggcagactgcttgagtgcagaggttgaagaccagcttgggcaacatagagaaaccgtctccacaaaaaaataaaaaaattagccaggcctggtgacatgtatctgtagtcccagcaacttgggaggctgaggcgagaggatcacctgagtccagggaggttaaggctgcagtgagccataatcgtgccactgcattccagcttgggtgacagagtgagaccctatctcagaaataataataacagtaataagttaagtactgttgagcttttttagaataatcattgccgatactttcattttctaattaacttgaaatgtctgaattattgcttgtaacacccttgtgaagtaggtgttagaatcagtcatctcttcatagactaggcaaagagtaggctgaggatgggttttgactgaacaaatatttattgagtacctactatgggcagattactcagaagggtaatagccttaccctgctattaattagctgagcaaaatcaaacagatctctgcagctccctgagcctcggtttcctcatctctgaaatgaggggcttgaatcaggctgagagagacagacagacagacagtagtcttgagacttcttcccattcttcttttcctttatgactttttatgtataatgtgagcagctctttgaaggaagccaaacttcctctgactatcctgaaatttaactatccacctaaatatccatctaatgttgcatgacatcatctcaggagtggcatttgtctctcccttaaaccttccatggaaaatggtaacaataagcaaagtttataatctgcctcctcctcctgattttatacatatgaggtgaatgttctggaagttataaaaatggtttaagtgtgaggatttagataaatttataaggttacactttgtcccatgttattcagagaaattgggggcatgtctttaaaatattttctaatgtaattggcaacataaaattgtatatttctaaatctctatttctttattaccagtaagcttgagctccccccgccctgcataattttgtctcttcagcttttaatacttgtcttacagatttgactcaaaccttttgccacatttttaagcaaatatttttccagttgcttgttatcccttaacaaatattttagagcattttcaaatgtttaaactatattaaaactataaaaggtaaataggaaaagtatataactggatcagtgtgaacctatgcaaacaaatccagaaataaaaccattaatttctaaaacaggtgattttagtaaattagacttttaaaaaaattcaccatgagtagttgtgagtttaaaatgtatttcgtttcaaaaagagtttatataagtacaaccactaactttttcagacatgaaaataccatgttctgggctagtcatttagataatgaattatgagaataaccaaaggctgtgtttgaggtaacattagcatattttgcccatccctcagatacactttgaaatactgtggtccacagaccattctatcaagtgacaaattcctagactgaaatgactgtagatactttctgtatagcatatcttaygttatgcttaaaagatgaaatgagctttatatgtttgtaggtaattaaaacacaagtataggatagttaaaagacaccatcactyatactatagacttataaaagggatcattttagaactctacgtattccagaaaagttatatagaatcagttcctaagactggctaaacttaattgaattcatttttcccatttttatctcgagaagatatcatattaggtagtgaaagaggcaaaaatgtaaaaaaagaaaagaataattccattgaatcctcaaattaaatgactactgaggcattgaaagttaatttgagtgcggggattcatggaaatgttcatttgtgcagttacagaaggccatggattttaatttatctgtaataaatctggttgataccaagagctctagaactcactgtatttattctatacccatcagttactccttccctaactttatttttttttttttttggctctgttttataggaagaagaaaatctgtgagctctatgccaaagtgctkggatcccaagaagctttacatgtaagaaactcccagctttaatccctagcaggttcttctctgttcactataagtagtaaagcaaagcatattctgattttttgacagtcttatgaagagagtataaagcgatatgcttaacttggaggataaacttcagcagtcacaaaaggtcattaaaagctggtattaggcgcatggaatttctgacacagcaacttctttgggctgtttaaatgttcactagataactggcagccaattgtaatgagagcctagagctgcagggattatgtcaagaatgggtgagttgggttcctagaacagaagtcctgcccccagtcagtgtcacttacctgctgcacaattaaattccagatatgttatcatttgttggtgaaggcaaagtagtatgtacttgacaagatagactgaatctagagtctcttcccaggtcaaagtcatactaatttgtttttccatgtgtgaactcaattcacaactcatttaggaatatcagtgctttcaatccaccactgaaagcaattaggagaatgaaattacgtctttttgaaaaaaaaaatagaatggctgagcgctctttcaggggcttgtctctaaactgttcaaataataaactttctgaatgtgccagggaaattagagaaggttctctcatgtcccctaggaaatagttttcatcttaattgccgctttttcgtggaattcccatcatacatgtttccagcttagaaaagtggctgggaaaaaagcctttcttagacatttgtttgtcttctgcctcctccctcccaccctttccttagcaataatgcctgatagatggggaagtaaagtctgttattagggactccagagatttgagcagacctttccacaagctgaattgttgatggggtttcctatagacttagctctaaagacttcagaatctgcatggatggatggatacccctctctcccagatactggaatacttcatgtcttccctaatcaagaaaatgggaagagcaaagtatacatgttttgccacatggtacttcacaaaaggccattgcttggtactatcatgtttccccttaagtgagttagaaaaacaggattttctttattttcttaatgtaaactttttgttaaagcaacgatattattgactygcagcatttcagctttgttttctcttttgtattttcttccccactgaactgcagccagtgcattatgaagagaagaactggtgtgaggagcagtactctgggggctgctacacggcctacttccctcctgggatcatgactcaatatggaaggtattacgcaagcactacgccaattaatccaagacctgtgccaaatttaaaaggaaaagcagagttcartgcaaattctagaaatagttgtcaaaatccccatttcttatgtcctagataatacttgtatatttctggatgtccatagaaaaataaggatgtcattacatagaacaatagctgtcagcatacagaacaatagcagaacrgtggggaggatttcagatgtgaacagtgcttgtgagaatgaagcaagctacagtgtcctccaaggggacttcgtgagctcaacttgacatttagtctcacatgactgccttaggctccttggcaccagtcaacacagaaggacattggatgtgtttatccaacacttctgtcttgccaacagagcagcatcagcagacagtcctcttcaggggaagagtcctcactgtatacagttgagatgtgaggaaatgacatccacgtggggtgggtccaccttgacctagaagccccttgctccatgggagccattatctctatgcttcataggcatagtgtccggtaccttgctcagttataagacttgctcagttacaagagacaccacactcagggaagcccaaagtgatagcctcctaccaggtatttacaattcatttagagtcctcccagcctggatgcagttcactaatgtggggatgggaggggaggcacttttagcataaatggtgttgcctccatagatggcattacaccttcatctggtttccagagaaacagagctagaaagttaatacaaggtcacatttgtccactgaaaaggaggaagtatttattaaccttttcgttacaggagtttttagtctgttttttttttcttcttaattgagtcagatcgcctttgttaacaatagcaggattgatgaactggattagttctggtatcaaagtagaagtctagaagacaagactaagatgaggaatagatgaaacccagggttctggaattggaaaaaggagtgccaacgggttgagatgaaggccatcagggtggggggcaggacatgcagcttgggagagttcatgaaactagctgtggacatggcaggagtcaaagccraaaagttggaggggacagctgtccattcagtccagcccttctttgtaagaggagacccatttccttgctctcagccagtccccagagaagttcagagaagctaactgtacagaggttgttttcttaaagagacacacccatataatgtctcaggtctctcctttgccagaaatgatagttgacgtccctgtcttcccacctgccactgcagttcctcctgacacactgggagtgcctgcaaagctggatctgtggctgttttcaagaagagtgcaccytcccccgagaaagacaggacagggagaagaatggactgccaacaggaaacagcaaagaaatctgatttggggattgaatacatgttcttatattccagctctggctggcttggaaaagatcaacatcccctttaatgattgatgatctgatggcctgattctccctgacttgaaagttcagatcctctatgcagatccagaaagcaaaaagtggcctttcaccttgggctaagtcatacgggtgttttttaaacagtcygaatttctgtgccttctgcagactaartgagggcagtgattggctcatttaccctgcccaccttcccaagtaactctgtgtaacctcttggttcccttgaagggtgattcgtcaacccgtgggcaggattttctttgcgggcacagagactgccacaaagtggagcggctacatkgaaggggcagttgaggctggagaacgagcagctagggaggtaagcaggaaagcccagrctctctccctcccgagtcacggcaacgtttttggcatctggtcttgctagttcttgacactgatagaatctgtatgtccatttctctgcccctcactcatggggctcatctgtggctagcagggccttgaatctgtaraaactatacagcctcttttcataataccatggtgactttctttcaggtcttaaatggtctcgggaaggtgaccgagaaagayatctgggtacaagaacctgaatcaaaggtaagtttggtgactctgggcactatctctccttagaccaatcatggaacataaaactcacatctcccttcttctagcctccgatttaattatagatgcaactatcccaggggtctccatgcatggatcttgcagtgttttgttcctccttgtcagcatgagttttttgctcatgatctgtgttccttcatctaggacgttccagcggtagaaatcacccacaccttctgggaaaggaacctgccctctgtttctggcctgctgaagatcattggattttccacatcagtaactgccctggggtttgtgctgtacaratacaagctcctgccacggtcttgaagttctgttcttatgctctctgctcactggttttcaataccaccaagaggaaaatattgacaagtttaaaggctgtgtcattgggccatgtttaagtgtactggatttaactacctttggcttaattccaatcattgttaaagtaaaaacaattcaaagaatcacctaattaatttcagtaagatcaagctccatcttatttgtcagtgtagatcaactcatgttaattgatagaataaagccttgtgatcactttctgaaattcacaaagttaaacgtgatgtgctcatcagaaacaatttctgtgtcctgtttttattcccttcaatgcaaaatacatgatgatttcagaaacaaagcatttgactttctgtctgtggaggtggagtaggtgaaggcccagcctgtaactgtcctttttcttcccttaggcaatggtgaactgtcattacagagcctagaggctcacagcctcctggaggaagcagcctccactttggatcaggaaatagtaaaggaaagcagtgttgggggtagcggcatgcagaccctcagaccagaatggggacatcttgtggtctgctgcctcaggaatctcctgaccacttgtagtccctccgacttctctagacatctagtctcagtgctagcttatttgtatttttcctctttcacttcttatggaggagagtgtttaactgagttagaatgttgaaactgacttgctgtgacttatgtgcagctttccagttgagcagaggaaaatagtggcaggactgtcccccaggaggactccctgcttagctctgtgggagaccaactacgactggcatcttctcttccccctggaaggcagctagacaccaatggatccttgtcagttgtaacattctatttcaacttcaggaaagcagcagttttcttttaatttttcctatgaccataaaattagacatacctctcaacttacatatgtcttcaacatggttacctctgcataaatattagcaaagcatgccaatttctcttaagtactgaaatacatatgataaatttgactgttatttgttgagactatcaracagaaaagaaattagggctctaatttccttaaagcaagctcacttgctttagttgttaagttttataaaagacatgaaattgagtcattttatatatgaaaactaagttctctatcttaggagtaatgtcggcccacaagggtgcccacctcttgttttccccttttaaaaactcagatttttaaaagccctttccaaaggtttcaactgtaaaatacttctttttacaatgtatcaacatatttttatttaaggggaattaacaattgccagggaaaccagccaacccaagtttattatatcattaaccttatcataaattcaaacctaagttgctggaccctggtgtgaggacataaatcttccaaagttttgcctrtcctaagagctgcatttttctactgctctttaccttgcattttagctaatttaggagttttgagaatgtattggatacgctccagtacataaggagttgccgcatattatatcagactgctttgagaaatctcatccctagtctattgcagttgtttctattagcttactgattaactcagtcctgacacaccttttgggaaatgctgatttaaacttcttaactggcaacagttggaacagtaatcagtttgctaacatatttaaagtcttgaatgttgaagaactcatgtgatttacccttttcaactttttggaaaacgatttaatttattctaattagattaaccctattaatctatggattgggtatcaaaatgaatgccagtccagatgtgcctagacacgaaattggagctgaggactctcacgatatgcaagttcatccaacgtgaagataccataagctttttctctgaaccagagaaatgaaagtcagtttaagaggctgatagatcttggccctgttaaggcatccacttcacagttctgaaggctgagtcagccccactccacagttaggccaagaattagattttaaaacttcatctgtctgtcccagttaactgttaaataaggcctcatcctccactgaagagtatggattgaaggattgtgaactatgtttagtgtgattgtgaacttggtgcctaatgttccatgtctgaagtttgccccagtgctacacgttggagtatacctatgtgtgtgctttgccactgaagtaagattttgcctgtatggtactgttttgtttgttaataaagtgcactgccacccccaatgcagactcgactcctgtatttagttgatggctctatgcagaaagttcaatggcttcttatagcaggaggtcacaatgaggcattgtccatggaggataggcttaggaaattgtttaataccgactgcaaattctcaaagttgagtttgactctcatgtgttattgaggttttctgggaactgattaaacactgaaatactgtagcctgcctaactgggccacagatgtggattctggtccaagttttctcacctagtagcttatgataacttgagcaagtcactttggttctctcggtctccacatctggaaaaggttgggttgcattagatgacttctgagcattcttttcacggcagcataatgtgatctatgcattttgttgccagcactgtaactgtttttgcctattggtatgccaggggcaaaaaaatcagtctttctgtaccctggtttactccttgtcctagattgggttccctggaaacagactctaagatacagagtcagggcaaaaagtttattgaagacaatcctcaggaaatacacctaagagggtgaggaaggtaggattgggcaggagagtcgacctacaatgcagttgcaactacaggttctaatgaggagctaggaagacccttcagaagtatccctcattgagacaaggaggtctggactctgtgacccttcatcagcctccccctgagagagggtgttaccttgagtaaggcaggttcaaggacaatttctagtgaggaactgtagctgggatcttcgaccagcctgtattccctgcagatccagggtggagcactgcattatctactttattctcatagaaagttgccttgtcatgtaaaagacattgtggacttgagctttggctttatagatagaatggagctctcgctgtgaacctatccctgttaggtaagggaacttcctttagagggttgtatttctgcactattctttacatggaagaaaaaaaaatcagaattggaaggaaccctggaaataattcaatctctgtctcaatgaatgagccccatctacagaaaactaacagaaagatcaaagggaaaaataagcatttctaaagaggagtcctaaattcaatgtcttcaggagttgggcagctaaaaacgaacagcagcagacataagacatttgggaatactgaggactggctgacctaggaagtatgtgcccttctaaagagcatttatattcaaattccttgaaaagattgctgatcaattaaaacacatttggggtgggtgcagtggctcacacctctaatcccagcactttgggaggccgaggcaggtggattatttgaggtaaggagttcaagaccagcctgaccaacatggtgaaatcctgtctctactaaaaatacaaaaattagcccagcgtggtggtgcatgcctgtaatcccaactacttgggaggctgagacaggagaatcacttgaacctgggaggcagaggttgcagtgagccgagatcgcgccattgcactccagcctggatgacaagagcaaaactctgtctcaaaaaataaaaggccgggcacggtggctcacgcctgtaatcccagcactttgggaggccaaggcgggcggatcacgaggtcaagagatcgagaccatcctggccaacatggtgaaaccccgtctctactaaaaatacaaaaattagctgggcgtggtggcaagtgcctgtagtcccagctattcaggaagctgaggcaggagaatcgcttgaactagggaggcggaggttgcagtgagccaagatcgtgccactgcactccagccctggtgacggagtgagactctgtctcaaaaaaaataaaaaaataaaaataaataaaataaataaaaataaaataaaataaaaaataaaacacatttgaaggcttggttcacatgtccaagttgtcttcaagtccttgataaagaagtgcaaggtttggttttgcatcacttaaatgatgtattttccatcacttacaagttctttttggatgtctgattttctgagaaataagcacaaagatcagcaaccactttgtaaaactacctggagtgagtaggagaggcctgggttggaatggcaaaaaagaaaaacaaagacagaaaaaagtcttcttagaccagaaatctcccttaagaaattacccttccccagcccagcataccgtggcagtgtttatctcctgctatgtgaatgtcacgattgacgagagcagtgtcagactttattggaaaaaccacatatttgcagtgagatagaaatcaccgctcttctattaacatttattctgtgctatgatataatttcagcaaacaggacatcaacattgagtgtattaattttttcaaactatactccttgctttacactgaggtggtggtaaatgtgcaaggcatgccccttagcctaaggaagctgactgagacattagaggaagaggatgaaaacaaaggaaggtactaggtaatagtaacagttctctttcctctatcagagcccagggcttggctctcttccttgatcaaggccattcttttcagagtttgaaggcaaaagcaggtctcaaagtgacagtagatgtgaactggttgtctcagcctggagccaagtttctgaaaagcagctttggaagcctcatgtgaaaaagctggcttgaggaaacttgccattcattcaaggtgggctgtgggcccttcaagtaagacctccccttaatgcacgtgtgatccatcaaaggctactatttatttacactccaaacagtaacacctcaatgggaaccaggttttcctattaatgggcctcatatattttccacaaaccaccgaggtctatgggtgaaatagagtggaggaaagaggtgtgggtgtgtgctgggggatggggaggtagggacagggaaagagacgaagattggcgggggtggggtgcttaaaggtccacagagtagtgcagtaatgagaatcttgatggattgatatagggcacccctgcaccttgtgtcatttactttttacatgcccctagataagtactgtggcttgaagtacctgtcttacagaattgatgggaaaacagagataatgcaggtaacggcttaatgcagcaagcactcagtaggcatcagctcttctccatcaaccttttagaatagcagaaaggaagcactgcttaagttttgcgagcagttattaccttgaatttcttacaatcattcaacacctacttattgagcacctactatgtggtaggtaggcaccatgctgtgattcagcagtgtacaagacacagcccacctcatggagcacacagttgattgtagatactgtggaacacattaattgtggctctggtcagtgctattacagaaaagcatgaggtgctaggaatgcaggggaagcacgatttaagaggaagttaccagaatcctcaggcctccataagcatcactgtgtggcaagagactaaggacaccacatagtgagacaggaagtaaaaaatagaaatggcatgactaaatggtaaagaaaaccacatctgcaactaataagtgctgactgttaagtcctatttgtcccattgaccgtagttcaccccatcagtcttttactgttcccctgtctgcccagcccttctctgcacttggagctctttaacgactgtgattgactatcttccagcacctgtgctagggggcggccccaatttgttttaaaagagtgccatcttctggccaattagtgttgtttccttctagtggaaatcctaaagtattcaagacagcctcgctcttggggaaactaagaagcgtcacctccacccagaatttcctccaacacatttgcctgcactctcttactttgttttcagttgtgacatggatcaatattgatatctaatatttgcagcctttcctctgccctaatctctcaggaaggttttttgttagaacttcttggtttttcagcctctgttgtgtgcatctgggtaatgggtgaaaagaacatcgatgggagatgagacaggtggaattgctttcaccttagaaagggcagggaagtaatctggggaaagcaggagaagggagctggggagaggagaaagtttcagaaaggcaacttggggctgtggaggagtgcagctggacagaagaaggggttttctctttcgattttattttaagttctgggatacatgtgcagaacatgaaggtttgttgcatagatatacatgtgccatggtggtttgctgcacttatcaacccgtcatctaggtcttaagccctgcatgcattaggtatttgtcctaatgctctccgtcctcttgccccctcaggccctggtgtgtgatgttcctctccctgtgtccatgtgttctcattgttcaactcccacttatgagtgagaacatgcagtgtttggttttctgttcctgcgttagtttgctgagaatgatgggagaagaaggggctttcaaaagctgttttgacaacctaaggagatggaaggaaagaaggaaagaaggaaggaaggaagcttcctaagtttggctaggagttttgtggtatagtaaatatttacattacttttaagatttgggcgtcaaaattgtgtttcttttaggcactgtatagtgcttggaccaccttagaggtcctcagagcaccctagattatttggggctgtacaaattcagaaaacatacacctaatagtggctggcatctggaatggtacataagtgtcccgtgggttcactatatgggatttcagtggaactaaaccttggcaactctgtcttcagcaagatcaacatctaagctggtaaactgtgtaccccatgccagacatacactaaatatgtaatacatctggcagtgaattaggtttacattaagaaaatgagcaaaggaggtctgtttgcctggtgtcgtgtattcatctggctactatagactattctatcacatcaactagcaaacatggaagatgcaggtatgaggtccctagatgagtccaatgaggcagctggtattagatgggccttatatttagactgtgtagagctggctggaggatacatctgaaaggtaagtccactgagagatggggccagttcagacaggccaaagggagtgagggtaagtcagcttctccctcaagcagcctgaccacctttgctatatcagccattttaattttgttggctgtattaatgtcctattgcccctgtagcaaaatggcacaagcttagtagcttaaaacaacacaagcttattattttacagttctggaagtcaaaagttcaaaatgagtcttacagggctaaaatcaaggtgttagcaggaatggttccttctggaagctccaagggagaactcattccttgcctctttctgtttccaaaggctgctagcattccttggcttgtggctgcatcactccaatctcttgtttccatggatgcaccatctcctcctcactttgagcctcctgcctccctcttaagagaacctttgtgagtacattgggcccatgaggattatctccctattttataatccttaatcacatctgcaaagtccctttgccatgtaaggtaacatattcatttgccccagagttaggacgtgaacatcttcagccaggctattgtctagcctaccatatgggcctcaatatttttgaaaaccaagagttaaatgccacaattggtctgtccttaaatccctgctgttccaggcacctgaatttggagcagcaagtagaacttttaatgatttaaaaccacatggctctgccctgcttccaccaatgcctaccctcttccctatcacacacacaccccaatatagcttctatccagctttgtcttctacaaagcctgaaaaggcttgcatctgggatcctgagaagcaaatgtatttgtcttacataagcacgaaactagattccaagtttgt

SEQ ID NO: 93612 - DNA, 13417 bp, Homo sapiens
ggctgaggcaggagaatcgcttgaacacaagaggtggaggttgcagtaagccgagatcgtgccactgcactccagcctgggtgacagagcaagattccatttcaaaaaaacaaacaaaaaaaaactgctccccgaatgctcagggagattgatttgagtaataatgaaactcctgtctcccgcacagctggctctgcatgaattactttctctattgcaattcccctgtcttgataaattgactctgtctaggcagcgggcaaggtgaaacccttgggcggttacactagtggcaaatcatggaatctctctgttcctaagattcctggttacacgatagacagggctaatgccgtctactctaagtccctgggacacagaatcgtcaactattaaacttgtgtgacggtcctacacacgtatcaggtattaattctttggtttccggactgagttttcccctgttccttgacttcctggaagctgcctgtgtctgctgcctctcctaacttcatagttcttaggtttgtcccttcctattctgcaaagagactttaggcaacccacagaggtcttggaaaacaagtgtcctctaattaggctcttttattttttctgccaaaaaagacagactcaaagtgcagatatcccagagaaaaggggaagtggtgcctgaacttcccacccagacctagatgacttgatgcccttgtcccgaaacttggaatgaggggtgctggagggggaagacagaaggagtgatgtgggggtgggagccatcccactcagattaaaggccagattccttactatggcctccaaggacctgcacaatgatatccctgtcacctctctgtccttatttgctgtttttctcccgttcattctgttctgctacactggctgctctgccaacagacctggcttacttctcacgcagggcttttccactggtgtttctactgctaggagtgctcttctccccatagccgcatggtttgattcttcatgtctttcaggtctttggcaaaatgtcacctcctcagggaagacttctctgaccatcctatttaaaattgcaggctaggtgtggtggctcccagcactttgtgaggccgaggtgggcggatcagctgagatcaggagttcgagaccagcctgaccaacatggagaaaccccatctctactaaaaatacaaaattacccaaatgtccatcaatgatagactggattaagaaaatgtggcacatatatacctggaatactatgcagccatggaaaggatgagttcatgtcctttgcagggacatggatgatgctggaaaccatcattctcagcaaactatcacaaggacagaaaaccaaacactgcatgttctcactcataggtgggaattgaacaatgagatcacttggacacagggcggggaacatcacacactggggcctatcggggggtcgggggctgggggagggatagcattaggagaaatacctaatgtaaatgatgagttgatggatgtaccaaaccaacatggcacatgtatacctatgtatcaaacgtgcacgttgtgcacatgtacctagaacttaaagtataataaaaaaaaataaaaataaaaataaaaatacaaaattagtcaggcgtggtggcacatgcctgtaatcccagctacttgggaggctgaggcagaagaattgcttgaacccgggaggcagaggttgcggtgagctgagatcatgccattgcactccagcctgggcaacaagagcgaaactccatctcaaaaaataaataaataaaataaaattgcaacctccttcctctttcccctgacactccctatcctccttcccttgcttattttttctccctagcatttgccaacatctttcatgttaaatatgtgatgtatttgttcatcatcccactagaatggaagttccacaagggcattgggtttctgtctattttgattactgctatgtctccagagtttaaaacagcttctgaaaccaaacagatgctcaaaaaatatctgttgaatgaatgaattagtagaagagtaaatagtgcctttccttccatttcctcaacaataagatctgtgtgaatgaccgcatgccggtgtgtgaatgtgatagagagccctaggagaaaggtcatgtttaatcccaaattagtggagaaagggaaagcaaagcctccagaaatctgtgaattacccaaagcagttcagatgaatggaaggaattataggacagtgggttagagaccaggattaaagtcaatctttaccattaaatgtttgggcatgttatttaacctctttgggcttcagttgtatcatctgtaaaatgtgggcagtggaataaataatcaccaagaaaaagtatatagtgctttataactaaaaaatgtctttcacatgtattattttaaccagtataaccagtttgttagcttactctaaaagtaacccctttctccatttgtttcttgctatacaaatacccaattacctgtttgcttgagaattccaaaggctaatcttgaaacaatccaggcatgaagtggaactggcagttgcaattttcccccttccaagaaggaattggtgcacagttaatccataacctgacctccaatgagatgatgctaaccaggcctctggatggtcaattactcaagctagccgtcagaaaacgacaagcagacctgcagcctatgcataccttttgcttaaaaccccttgagccagcctgagaatttgagctggctttttgacacttgaatgtggccatctcccaatctgctagttcttgaataaacctgctttccttccatgaaaccttgcttcttgtgtgtctggcttttcaagcagcaagcagctgaacctgagtccggttacattatctctgattcctgtgaggtagccagagcaggtaggtagatgtgagacaacaaaaaacattttcttagttgttgctgcttgtaactcctcataagaccctctaaggatggatcccacacaaggagaatactttgttttctatgcaagtaatgggggacaaatttggacttgtaggagggttaagtggctttatgtaagaatcagcagagatactaaggcctgggcaagatctggcagcagaaagcaggagaagcaaaagatgggaggtggcagagccctgctaggagaggtcaggaagaggcattcttgtggcaaaatgagcaagcggggcctgaaagagagaaatagtaagagaaatggagcttgctctgtggggcatgatgtaagcactttctacacctatctcagaaaatccaggtggtttctgatgctttggcccaaatgaatgatctcaggagcacagaaatagatgtggactcctgtgtggaggctgccagaggggaggggacagccaacgtcttggacacatgatggagaaagaagagcgaatgctgcgttggagtagggctctggccctgaaagagaggctactgtgggtggccccacctgttccttgactaacttcttaaggatatggttggtattgcctatttccccctaggtatcacataaaggatcttatttgttattttaatttttcatcactttgttataattagacactctatttccttgagcttagtgattaagcaggaaagccttccttggcttgataaaatggtcgtcatgttaaaactccttagggttggaatggaagcaatctagagcctttgctcagtactttgacttagcaattcagtttttgattttgtacctaggtaaatgaaaagcacctttaattcacttttggataattagcacaaagagaaaatgactttgcatgtcacaatgtggcatggttcaaactgagcaaatgagaacaaaagtcaacacttccatagttgtacaaacttgcaacaaataattttcatttaatttaaagtgataaatctgggtaattatgtgatgattattcataaaacgattaatcaaactcatatacattttgtagcatctcatgcattactgcaatttgagtattttaggaaaatatattgtttgaattttaaaatatcactccattgtatctcagcaaaaatggaaaaatgtatcttggctagttctatttagtcaattattataatggaaggcattagatagtatccaagaaaaacaattataaatcatataacgtatacctgcttccaatgtgtactcccttataaacatccaatgtaattaaaatacaaattggatctagaatgggcatgaaaatccctttaaaagtacaagtttgtcaggaagagataaagaacaacaaaagaatcctttctccagtttctttattttgttaaattcatacataagcagcttcttgaggttatctcatgcttttactagccattattcagacaaatttactcagacattttccatctgagacagtaaggtgtaaataaaaccaaaatgaagatggcaaagtttggaggtgatttaaaaagctggatgtgttctttgtttctttgtttctggtttttttttttttttcttgagatgtagtttagtttcactcttgtctcccaggctggagtgcaatggcgcaatctcggctcactgcaacctctgcctcccgggttcaagcgattctcctccctcagcctcctgagtagctgggattacaggcacccaccaccacacccggctaatttttgtattttttttagtagagacagggttttgcaatgttggccgcgctggtctttaactcctgacctcaagtgctgggattacaggcgtgagccactgcgcccggccaaagttgaatgtgttccagagtatgatgtctcattctagcatgtttggaggaatccacagattggcttttagacactaagcttcactatgctcagtttcattaaatgaaatgaattatcatgtggactgggggggcacctttgaaaagaagattcctttctcagtagcttagaagcattcatttgcatgccttggattacctatattctctttcagcacagcaatttccagctcactttagcaagtcatttcatcctcaggaaaaagtggatttccagatatattgggcacttttgatccctgttggctcagaggccttctttgaagatcacagtcagtgaaaacatttttctgaggatgacaacaatccagagaatagcaggtaactcttagagctggtgtaataagcagttcatacttccagatcatttctagatgggtcggcagtcaagattaaatgagcattttgagaactgataaaaatgaaaagttaattaatgtcatcatcttgtcaatgaacatttaggttgcttgcagttttttgaattacaaataatgttgcaatgatacttgtatatatgtttccctgagcctacgtataagattttctctagaatatattcccataagtagaattgctgggtcaaagggtatacacatcttcaattttactagatattatcacgttgctctctaagtgcctatataatttaacacttctatcagcaggacatgacagtttctgttaycctacatccttgccaaaacgtggtattatctgaatttttagcttttgtccacccaatgggggaaaatgatattttattactgttttaatttgcatttctctgatgaatagtcatattggacatctttttgttgttggcttttcaagcttcctttttatgagttaccaattcatattctgctggcttctttttccctcattgatttgtaggagcttcttaaaaatactctttttaagttttatgtgttgtaaatagcatctcctagtccacagatttatttttcactttattttttggtgcattttatagtccagaagtatgtaactttagtacagttgaatttattgaccttttcctttagagtttgtgccttttatattttaagaaatcctgaccgagcaggaacccacatccaggaacagagccctttgctcctccctcagaatgaatggagaccagaaatcagatgtttrtgcccaagaaaagcaggatttcgttcagcacttcccccagatcattagggtgctgagtgaggatgagatggggcactcagagacaggagatgctgttgaccggctcaaggaggtcctggagtacaatgccattggaggcaagtatcaccaggatttgatggtgctagtagcattctgggagctggtggagccgaggaaacaggatgctgatagtctccagcaggccctgaccgtgggctggtgtgtggaactgctgcaagctttcttcctggtggcagatgacatcatggattcatccgtctccygccggggacagatctggtggtatcagaagccgggcatgggtttggatgccatcaatgatgctatgcttctggaagtatgtatctaccacctgctgaagctctattgcccagagcagccctattttttcttttttttctttctttcttttttttttttttttttttgagacagagtttcactcttgttgcccaggctgtagtgcaatggtggaatcttggctcaccacaacctctgcctcccaggttcaagtgattctcctgcctcagcctccygagtagctgggattacaggcatatgccaccacactcggctaattttgtatttttagtagaggcggggtttctccatgttggtcaggctggtcttgaactcccaacctcaggtgatccacccacctcagccttccaaagtgctaggattacaggtgtgagccaccgcacccagcctggagcagccctattacctggacctaatcgagctcttcctgcagagttcctatcagactgagattgggtagaccctggacctcatcacagccccccagggcaatgtggatcttggcagattcactgaaaagaggtasaawtctatcgtcaagtacaaggcagctttctactcctaccttcctgtagctgcagccatgtacagcaggaattgatggcgacaaggagcatgctaatggcaagaagatcctgctggagatgggagagttctttcagattcaggatgattaccttgacctctttggggaccccagtgtgaccagcaaagttggcactgacatccaggacaacaaatgcggttggctggtggttcagtgtctgcaacaggccactccagaatagtaccagatcctgaaggagaactaccggcagaagaaggccaagaaggtggcccaggttaaggcactatctgaggagctgaatctgctggccgtgttcttgcaatatgaggaagacagttacagccacattatgggtctcattgaacagtacgcagcacccctgaccccagccatctttctggggctggtgcgcaaaatctataagcagaaaaagtaaactagagactgcaagggcagggagaggaggctctcaataaattattgtgtaaccttaaaaaaaaaaaaaaaagaaaagaaatctttccctgcaccacagtcataaatacatttttctaaatttggttcaaaaatttgtaaaagtttgttttttaaattggaatttatttttattgattgtgtcagttctctattgctgcataagaaattaacacaaactttacgtcttatgacagcatacatttttcagatcactttttccataggtcaggagtctggcacaacaacatagctgagttctctgttgaggagctcataagattgaaatcaagttgttgtctgtctgcatgcccacctgggactggaagtcctcttccaaactaacatgattgtggtaggatttggttcttttagctgtatgactaaagtccccgtttcctcgccagctgttagccagaggctcctcttggcttctagaggctatccacattcccttccatgtggcctccgccatcttcaaagccagcaatgaagaacctgccttgtgttgaatccctctcatgcttcaaatctctctgtgagtcttttctctaggaaaagtcccagctttctaaagggctcacctaatttggtcaagttgacccaggataatcaccctatcttaaggccaggtgattagggatcttaatcacatcggcaaaactccttcacagcaccacctacattagtgtttgactgaataattggctgaaaatgtgtgtataccatgggcctagaatcctggaagccatcttagaattctgcctaccacacggtggagggtagtgatccatatttttaatgcatggatcactatgttattctcattttggaaaatttaaatcacatacaaaagtagagacaatagtttcatcgtttcacaaactctcatgttcccagcatccatcttctgtgattctacatggccagtctatgttccaactcccttctcacaccctaggtaattttgcagcagatctaagacatactagttcatctgcaaatgcttccatatgtatattcaaagacaggacctcttttctttctacctggaagtagccagactcaaggttaagggcatagtcctccactgccaagtctgcccaagatttctgataccaactataagttggggtggggcctgggggggtgtcccaaaaccaccctcagttttaataatttgctagaaagactcatagaattcaccaaaacccaatatactaacagctatgtttattacaggcaaagaatgcaaattataagagatacatggggaagaatcctggattgggagggttccaaatatgaagcttctgtgtcatcagggatgtgttagccttctggcatagatatttggcaatacatgcacggagaattgccaacccaggaagcttgcgtaagttttggtgtccagagtttttaccaggttcattatgtagggatagttggtggaattatcacccatgtggttgaactcaagctccagccacactctactcccacagggcaggctgatatcatgtggctcaaagccccaaccttctaattatgtggttggtctttctggcatggccagcctccaacctgagccatctattagcttaaactatcaggtggggtctgaggggtccacatgcctaaccaagacgctcctatcacttgggaaatttcaagggtttagaggttgcctcccgggaactgaggacaaagtccaaattcctttgcttttcttctctctctattccttcattccttcagaaccacaatatcattatcacacttaaaaaattaatttgaattttcaatatccaataaatgttccatttttttcccattggctcattaataaaaccagtttatatcttcaaattaatatcctaacaagcttcgcacattgtacttcgttaatatgaatcttaagtttcttttagtttataggtttcctttcccttttttccccttgcaatttatttgtggaagaaagtgagtcatttgttctatagagtctatcacattctgaatttgcataaattacataactatacaattcacccacatactgtttacacttaacatatttgaattaacttagctagagcagacagttcaaacacaccttgtggtacagatatcataggcacaattctagaaacccttgtgaagcatttagcgaaaaacttggtgacttggaagctctggaatatctgttctagtccatctcgatccatcctccaagctttgctgcatattactttgaattaatgtatactccagtgcatggagcgtccaaggacttcaaggcctgtttcttttttcattttttttaagacgggagtcttgctgtgttgcccaggctggagtacagtggcaccatcttggctcactgtaacctctgcctcccgggttcatgccattctcctgcctcagcctcccaggtagctggaactacaggcacatgccaccatacccggctaattttttttgtatttagtagacacggagcttcaccgtattagccaggctggtctcgaactcctgaccttgtgatctgcccgcctcggcctcccaaagtactgtgattacaggcatgagccaccgcgcctggccatcaaggcctatttctacatgacagacacttcatagaggtctgttgctgcggtgctgccgaggggattttttaagaatgaagcaaactggcatgtctgtctgtgacttggaaccgcttgtaacgtctgcccataaagaaatgaagatttgaccaatgagagctttggagctctggggttcatctgtatgaactctggaaaaacaaaactggaactgtggttggattggaaagctggctttctgggccctgatgaccttcaagtcaggatgtcacagatttacagaatgcaactgtaaaaagcccaactaaataaaactgtctctgtctctaaaacaggcatatctttttaaaaaggtcttcgagaagtgtttcaggtgctgaaatggatgttagctatccaattctcttccaccataaaggcattggaattatgtcttcctataatatgacataccatgaacagtatcattctatccagtgcagttaatggtaatgttgaaaactgagccccaaataagtgcctttaaaaatcctatcgcaattgtcttgcaattgatgaatctataaaagtcctttctctaagagagtttcattgtcatgttcagaggagaaattggccccccacgatgagtatgcattgggtgttcctaatgtattttcaaagagacaaggctaggtctctcagttgtgtctttagtccaggtttctgtcctgttaaacacagtgtgaggatgggacagataacatgaccattccatgaatccttttgtaaccagaaggagcccttggcctatgggactccatgaggtattctgaccaaatgccaaggtatctggtggatttcaaatataggtttacaaactgatttaccacagtgttggaactcagaaacacacatggtcctatcccctgaacctagaactctgtccatcctaagatctgtccctccaccagatgtccagtgatttagctatgaagcccaaaggaagtaagcaagttccttttttaaatttaatttaatttttaattaattaattaattaattaattaatttttgaaactgagtctcgctctgtctcccaggctggagtgcagtggcatgatcttggctcgctgcaacctctgcctcctgggttcaagttattctcctgcctcagcctcctgagtagctgggattacaggtgtgcaccacaacacccggccaatttttgtatttttagtagagatggggtttcaccatgttggctaggctggtcttgaattcctgaactcagataatccacccaccttggcctcccaaaatgctggaattacaggcatgaaccatcatgcccagcctttttttttttttaaagatagcaagttttcattctttctttctttctttctttcttttcttttcttttctttctttttttttttttgagacaggttctagctctgtcacccaggctggagtgcagaggcatgatcatggctcactgcagcctcaacctcccaggctcaagtgattctccacgtcctgagtagctaggaccacaggcgtgcaccactctacctggctaatttttgtatttttagtagagatggggttttgccatgttgcctaggctggtctcgaactcctgggctcaagcgatctgcccactcccaaaagtgctgccactcccaaagtgctgggactacatgtgtgagccactgcgcccggccagacagcaagatttcatcatgacaggcaaattctttttgggaagcattgggctgctaaccatggtgggtttcaaggatgaggtcagtaactttgttcctctccggctgccatcactgaactcttcatttgaaccgccacggtcagtttctgggaaacagttgagagactgtccggtggagggaagctgtatccctggaagcaagtttccaggaggaagtggtgctctggaggagtagctgctagaagaaatcctatgttgggagccagcaaagggaaacgtgtaagatggctctgaagagtttggctgaacgttgttaggccatatggctcagggaagtggaggatgaggctgggttcttaagagagctgctgctgggggctgaaaatgcctcctgaagccctggagaaatagatattgagactcagaggaggaagatttggagtctgagaggttgttgccaaatggagctgagtggaaagtgggagtgaagcttttgtgctgtccataccgttcataaaagactgacttgggtccaggttctgggtcctcattagatgtctgtggcaaactgtgttgctgcaatttagactgttgctcctctggaaagcttttgctgaggggagcccagcaggagagctctttgtagccaggaagaactcctggggtttttcttctcagagggctgtgccagtgccactgtccactcagccaggaaattgaagggagtggttacggagagctagagggtgatacctcaaaggaattgggccttagaaagtttcatttttactttcatacatgaaagacctgtgactttttctttaagtgccatcgaatggcttggatatttgtttcacccaaatctcatgttgaaatttaatccccaatgttggaggtggggccgggtgggaggtgtttgggtcaggagggaggatccctcatgacgcaatgttgtcctcacaatatgatttctcacgagatctggctgtttaaaagtgtgtggcaccccatccccaacccccgtccacccctgcagttcctaccctggccatgtgatacgcctgctccccctttgtcttctgccatgactggaagattctggaggcctccccagaagcagatgctggcagtatgcttcctgtaaaagcctgcagaagcacgagccaatgaaacctcttttctcaatgaattacccagcctcaggtatttctttatagcaatgcgagaatggccgaacacaaccatcttagtccatttgggctgctacaacaaaatcccataagttgggtggcttataaacaacaggaatttatttctcaaagttctggaggctggaagtccaggatcagggtgctggcatggtcacgttctggggagggtcctcttcagggttccagatggccaacttcttgctgtgtcctcacatgagggaaggagcaagagagttctctcttgggatccttcctttctccctccctccctccctccctccctcccttcctcccttcctccctcccttcctcccttcctccctcccttccttccttccttccttttcttttctttcttctttattttctctttttttagaaggagtttccctctgtcacccaggctggagtgcaggggcatcatctcgg

SEQ ID NO: 93613 - DNA, 94646 bp, Homo sapiens
caggcatggaaacagctagccctgcgaaattacacggagttgagttgtgaatttatagcaggggtctggagcaagtcctgagccagggcttgcacacaagtttgaagtcagaacatgtcagtatgtccaagatgagaatttggcttaaaatctagaaatctacagaaatgagtgagggtatggcaggccatggattcataataaaaaatgatgatatagtatccttagttcaaatattgtgtaaaatataattgatatgtaacatcaaaaacattaaaataacatcagaaccacatttttaaaaatcacccaatttcaccaaaattatacacatttatcttttggctcagcaattccacttctaggaaattatcctaaagaaatattcatgcaactgtacataatgtttacatttaacattgttgataaaagcaaaagataaaatggaaacaacccaaatatccatctaagtgtttgtttgcttacatattcccctattatccacacatacagtagaataatagccagatattaaaacagagatagatttatgaacactggcatgaaaagaggtcctaaatatattttaggctgggtgcagtggctcccacctttaatcccaacactttaggaggctgaagcaggaggtcacttgagaccaggagtttgaaactagcctgggcaatatggcgaaactacatctctacaaaaaaatacaaaaattagccaggtgtggtggcacatacctatagtcctagctacttgggaggctgagaggagggaggatcgcttgagccccagaggcggaggctgcagtgacacatgattgagccactgcactccagtccaggtgacagagtgagatcctgtctcaaaaaaatatgtgtgtgtgtgtgtgtgtgtatatatatatatatatatatactttttttaaaaagaaagtttcagaacagtatatacagcatgatttctttaaaatatcagtcacacaggtaaaatcatatatataataaaatttatttcattttattttattttatttttagagatagggtcttgctctgtcaggcgggagtgcagtggtgcaatcatagctgactgtagccatgaattcctgggttcgagccatcttcctgcctcagcctccagagcagctggaactagaggcacgcaccacctcgcccagctaattttttttttttttgcaggaacaaggtttttactatgttgcccaggcttaaaattttttgtaaaatatattttaaaaaagaattatcacctgacctggagtgaaaatcacctggagtgaatgttaaaaaagtgcatattcctacacttcaaactagatctactgaatcacaatctctgatgataggacccaagagtctgcataacaatcatctcatatgacttttatgcccaataaagattgagaattattggattaatatgatacttaacagtggccacttccagaaaatgggacttggagggcaacgagggctttccctttcattttactttatacactttttgttttaaaattttattttttattttttgagacagggtttcactctatcacccaggctgtagtgtaatggtgggatcacagctcactgcagcctcaaactcctgggttcaaaaaactctcccgcctcagcctccaaaggactaggattacaggcatgagccaccgtgccagcctaaaatttttataaacatttattacatatacactaatctatatctactagagatttttgaggttcaaatgattgaaacattaaatattgattgtctgggtcatattaatgagaaaatctattaccaattgagcttattcagaaagagaaaagatgagccaggcacagtggctcatgcctctaatcccagaactttgggaggctgaggtgggcggatcacttgaggtcgggagttcaagaccagcttggccaacatggtaaaaccccgtcgtctactaaaaatacaaaacttagctgggtgtggtggcacatgcctgcaatcccagctactcagatggctgaggcgtgagaatctcgattcttgtgaattgcttaaacctagaaggcagaggttgcagtgagccgagatcatgccaccgcactccagcctgggcgacagtgaggctccatctcaaaaaaagaaaaaaaacaaacaaacagagagaaaagactacctaaggctataaatttggcaacatataacaaattattaaacttttccttcattcattcaacaaatatttgctgagcagctgtgttccaggtacccttctatgtgccaaagatagagtgaagaattttaggcaagatttctacccttgaggaggttactttagagttggggaggaaagacagattgagaaaagtgggggtaaggtgagggacaaggaaaggctttttccaggagtgatttttgactgagacctggaagatgaatcagtcacatgaaaagatgagcaagagcagccatcctgatcagagatcttgactgatttaagggacagaaaggagttctgcgaaaatggagcagagtgagaggagagcagcaccagacgaggctgccgaggaagccagagctagatcgcgtacagttttgtaaagaattcagattttattctgggaagccagcgataggtattaagaaaaaaatgatattatctcttttgcatgatctaagtgatcagcagcctttcacctggtattttcacttagctgaatgtgaatacaaatgtctggtttgaaactcctgagctcaacggatcttcctatctaggcctcccaaaatgctgggattacaggcatgagccacagcacctggcctgggttatattttataggatggtttacttttataaaacaaattacaggccaggcgcgttggctcacgcctgtaatcccagtgctctggggggctgaggcgggtggatcatctggggtcggaagtttgagaccagcctgaccaacatggtgaaaccccatctctactaaaaatacagaaattagccgggtgtagtggcaggtgcctgtaatcccagctactcgggaggctgaggcaggagaattgcttgaacccgggaggcagaggttgcagtgagccgagattgcaccattgcactccagcctgggcgacagagtgagattccatctcaaaaaaaaaaaattataaatatcaaggcactatcacattttatttcatttgtcctcacaaaaactttctgtgattgagagaatgtaagttattattccaggttgatcaaagaggtaactgagatactgagcagtttaagaagttaactcattgaacaaatgtctgagtgcagactatataatcctaataaaaacagtagttcttagtagggtatatatcttagtgattaattagtagttactaattcaggatcttattagtagtagttctagttaggattatatatcttgttaatgtctcagccagagttagaatatttgatccaggatgttgatggaaacatagccacattgcatgtatttatggctgctctttaggaagccactagcatacaaagcccataatgaaagtcttggtaaatacatatgctgatgtgtaccaaaaaaagtaagccttttgggtatgtcttataaaggaaaggttttgtgtttgttaagtgttatgtcatacatttttatggagcaaaacaatgtacatattttaaaaataccttttatatggattaaaggttaagattaaccatataaaccacagagtgtaaggtatgtgtcagcaaccacgatacaaaataatattttattggctggacgtgttggctcacgtaatctcaacactttgggaggctgaggcgggaggatcatgaggtcaggagatcgagaccatcctggctaacacggtgaaacctcgtctctattttaaaaatacaaaaaattagctgggcgtagtggcacacgcctgtagtcccaactacttgggaggctgaggcaggagaataacttgaacctgggaggtggaggtggcagtgagctgagatcatgccactgcactctagcctaggcacgacagagttagacttcgtctctaataataataataataatattttatgaaacaatgttaactttgagctgtatagcttgatttctttgcattctttataaagtataaataaaatataaatagatgttttatacctcagttgcagagacatcagaaaatgaattctagacaggagcttgaagagttcagataaaactcccaaaattatagaaaaaataaaaactaaaccctgatttggtcaaatttcacttgaaacaggggtactcaagtgtgtcatttctggaatgtaaaagaagttattttccacattgtctatccagtgtggttttttttccatagaaattatatgcactttagaatggattcaatagaattgttcttttgacaggtataccttcaatatgttcaagctacagatgaagccagtcttttaacagttttttaaggacctacatgattacttacattagatagaaaactctaggcacacatatatccacataagcattgatgtatatatccagtttccaattttaaaattttaaattgtatatttgtagttattgttacagggasattatcaatgactagggaaggccgggcgcagtggctcatgcctgtaatctcagcactctgggtggtggaggcgggtggattacctgaggtcaggagtttgagaccagcctggccaacatggtgaaaccccatctctactaaaaatacaaaaattagccaggcgtggtggcgcgggcctgtaatcccacctactcggaaggctgaggcgtgagaatcgcttgaacacaggaggcagagattgcagtgagcggagatcgcgccactgcactccagcctgagcgacagagcaagactccccctcaaaaacaaacaaaacaaaacaacaacaacaaaaaacaatgactagggaaagtaggccatgaaaagtgttgtttccaacctatcaattgccagtactacaagcaggagttagacgtttggaggttttcacacggtgctataaatacagtttccagggccccggtacacgtggccttcctgctctgccaggatggagagtcttgctttccacattgctgatgtggtcagactaattaaattattgcaaaaagacacattccctagtcaaccttatgtgtctgccttcttcccttgagtcacagttgttggctttacaggccaaggcaagtaagtcttgaaccctcagcagaaacagggcaccagcatcggatgcctcataacctgaacagttaaggacgccccaccacagagcttctttctgagtgtgataaactataaggcaagactgtaaaggggtggatcttcatttcgatttagggtaggtgacacctcaagggtgtttcttcccttccagcgtaactggatgggaaacctacaccaagtgtgcttgggagggctgcttgggtcagctacctgtaagtggaaatagggggtgccaccttccgatgaaaacccggatcccgtactgtcaacggagggcccttgaattcacatccctcagcccgctagaaagcccctgaaaccacgtggcctttaacccattccggcaacagcgccaattcccggaagcgagagggcaagaaagctcggcgcgacgcttcccgcgtcttctaggccgcgcgctgaaatcaaacgcgacgccggctagctgtgggccgggccgagcgctcaacgctccagcggctgggtaagccgcggccgccgcccaccccgctgcagagctgggcggggccgcctggaggcagcggggagaggccagccgaaaaggaagaagagacgccggaggcgcgctctgcgcaggcgcgcggcgccccgcctccccagcgtcggctccccggcgggcggtgcgggccctcccactctaccccgcgccgtctcacggccccggccctagcttcaccccgactacccggcgtgcgcgtcctcctgccggcctgcaggcccggggcctccgcctgcttccccacagctgctccttgcggccccgcttgcgttcacgctgtcgcccgggccggcgcggccgcgggcaaccgctccccctcccacacctaccccgccccctccccgccttttccgccctccggtccccctccctcggcccgctgctgctgctccagatgaggtgatggcaacggccaacttcggcaagatccagatcgggatttacgtggagatcaagcgcagcgatggtgagccgcgctgccagccccgctggcccgctcggccccgtgttcgggtgtgcacggaggggacgcgggcgccggccgcctcattgattgcttcgccgggctgtgggggtgggaaggcggcggccgcggcgcttttgtgtgtggcgtgtgtgccagtgaggccggcttggggtccgcccgggcgctgctgcagttctccggatcgggccgcgggggagggaagccgggtggggaaagggcccgggtgtcgagggtcgcgtctccgggggtctctgggcgagggccgctcgctcctccccccgcaatctccagcccccccccggggacaccagcccgggagggagcgggcttcgttagggatgaccctgcctcgcgcttccccttggtctttgcattttaccggcttggcctctgacggggatggggatgggggtgggggagcgggaagaccagcgatttcacatttagagaaccgactgctggtcggaggccgagatggggggaaagagccagttccgtcgccttaaactgccgtctggttgtcaggcctccccggtttcgtcgtcgaccatgctgctttcttttttgccacttccttgggagaaaaatgtggagaatatcgcgctgagccatgaataagggtgggggagcaatgggaagaaatattcgatgggcttctccaaggtgatgagactgtaaagggaatgataggggatgggcagagtcaatgcgaggcactgctgagagagtgggggtgggcgaccggatgttgatattttcacaccctcgggagaggtaactgagaaaagtgtaaggcgaggtgaagacacatgcttcatttttttttttaagagccttaggcttatgtatctttctctaggtttctcttggggaaaatggtttatgacactagcttggggtgtggagtgagatacgccagccagactggaaataattcatattgtaaaggaataaatgcacggagggagataagtaaaattattttctttcggtaccaatattgaaagaacgagagatgtgtgataatctcgagttgagcrgtgttcctgactccatctctcataccgattcctttttttttttttttgagacggattttcacccaggctggagtgcagtggtgcgatctcggcccactgcaacctccgcctcccgtgttgaagctattcttgtgcctcagcctcctgagtagctgggattacaggcgttgtcaccacacccagctaattttttgtatttttagtagagacggggtttcaccatgttgacaaggctggtctcgaactcctgacctcaagtgatccacctgcctcggcctcccaatgtgctgggattacaggcgtgagccatcgcgcctggcctcgattccttttatgagtgccttatttattaacctttagcctagcctagtcagtagtaacttggctgtcacgtccacgtgccccttggattctgccaggtttgaccaagttacgtgaagctagattgattttcatgttgtgtgtatgatatattggaagaccctatatagctaatgattttttcctccgttatatttgaagtaatttgtggtaacaactgaaaccatcgttatcctgtatatgaaaagataaattataccgcttagagctttagaaattaccaataacactaatgggaaagagataccttctttacttgggttgaggtttcttttatattttctcttcagattactttcttgaaagagtgctgttaatgtcatttttttaggtaaatacgagttcacagtataccagcaaaagtaggatttacatattattttgaagattctgggtgcamagcaacacctgtccctggtatacacccaagggagaggaaatcaccaccttgtgaagatatctgcactctcgcgttcattgcagcattattcacagtagccaagatagggaagcaacctaaatgtccatcgatgggtgaggaatggctaaagaaattatgtgtgtgtgtatacgtttatgtgtgtgtatagacaatgtacaatggaacattattcagccttaaaaaaggagatcctactgtttaccacaacayagatggacctgaaggacgttatgttaaatgagataagccagacaccaaggaaaatattgcataatctcactcatatgtagaatatttttttaaggagctaaaatacacagaacgaaacagtggttactactggtggtggggaaggagaggaaatggggagatataggtcaaggatacaaaatagcagatatgtaggatgaacaagtttagagatacagggggaccaatgttagtaaaattgtattagagatttttgttaaataagtggattttagcagctcttgttaaagtaattatgtgaaatgatagctatattaatctgcttcaccattttgctgtctatattccatagcatcatgttgtaaacctcagttgcacaatgaaatttattttttaaaaaattagggtgcaataaaatgtgtaaattctttacactcataagtatgagtataggtgttaactttgaaatcgtatcagaaaaagtatatgatatttgatttatacattttaatttctacggagcatattttatttaaatttattgaacttgaagcaattttcgttcttttcagccttcaccttcagcctataccagaagttcccagacatamaagagctttgtgttcttacataagtgctactaacctaaagccacatttcaaaagcggtttgcctataagaaattagggaagtcatcacagtgtgttattatcctaacctatggtcatgtatctttttatgtgcctcagatgcatgatggagttggtggaaggcaggagattagtagagaacttcgaaagaacagaaggatcatttgcattggacagtagtgtttcacaatagaaattgatgtctgggagaatgcccctcaagctttccctttttcactttaaagaagcttgtttgcttcctctcacttccataacgtctatattggataaaacactagtggttattataacaaaaataaactttgcagttggaggaacactaatatctgagacagtagaaatgacatgagtaaagaagggctgcttcagaccattattaactggtgacttgatgtttttcttttggcttgctgatggcgatccatgtccctatttcagaccacrcttttcccatcagtgatactcttacactaataaacatatcccaagggcaaacaggtacactaaaatgagcttattcctatctttcaagaccatgatgaaaactatcctaatgagtcttcactgattactaaaaccagatggccagtcagcatctgaattcctaaatcattctgtattattcatgagacagcatatttccttaagtattaatgtttgggtctgtaacttttttttttccactcctctcagctcatacctatgggtacatattcttaatactatgtttttaaactgcatggggtaatgggacttactaataactaataattctttttttttttttttttgagacagagtctcgctctgtcagtggtgcgatctccgctcactacaacctctgcctcccaggttcaagcgattcttatgcctcagcctcccaagtagctgggactacaggtgtgtgccaccatgcccggctaatttttgtatttttagtagtgacaggtttttgccacgttggccaggctggtctcgaactcctggcctcaagtgatccacccacctcagcctcccaaagtactgggattacaggtgtgaaccactgtgcccagcctctaatgactcttaaattccctgaatgcatctgtgtcattacccccattcccacccccactactgggatgtctagcaaaattccttgcacatcgtttttgaataaatcatacattattggattttttgttttcaaacattttaattaatcattagaatgacatcttagctggaagtgaaaccttccatctatgctcctctgtactgctacctccctactctggccctctacttcccgctggcctgttagtcaggaactacagcgttaattgaaattgagtgatctgctaaggttaatctgacttttctggttttctaaggttatcagtgacagggsttaggcttggactgctaagattattctctgccacaggagataacctggtatgaaattggactggtgtgttttcttacatgtgtcttcctatttytctgattcaattcctttccctttttaaaacccactgactcttaaaaaaacctacaatctttctgtcgtgtagctagtttggttttttttttcttttagctgtgctgttaacagttctgtagtagctgtgactaccctttggggactggggaagaaatgggaaatgttgaacatttggaagctgcagctaatatgggattgttctttgggggcgggtctcttagtcacagtactgtgactgtattgatacatgtaatctgaagagaatcttagaatatttccaccagaaaggtttttggagataaactagttttcatttttataaatgtggaaacttgagtcccagatcaccataagtgacttatctagattcatacaacttgtcaatggcagccaggaacctgacatgcttagcatagaaatcagactatcaagaactatgacagtaaaggaggaattctctgttattttggaaccgtataccgstttttacagcccagtcaagatgtaggaaattgcttcttacttcggagaaaggcaccagcgagcagtgttacagagcttgattagaatgatccctggtaagaagtgctatgttactacaagttcaccaaacctaaaattgtgggaggaaagtattcttgtttcttagttaagtrttggtgtaaagagttccttttaacatctgaaatcaagaggcaattgaagatttcaaaggacccatcaggaattttggagttcagggcaggcaaagaaaatctttagaaaagattttaaatggcctaattctttatatgctttgccacatttttcttctgctagttcatctttacacgtcactatataggcttctggagaatagcatgtgtaaatttaagtaataaagatgaaccatgtggcaatacagttgttctttaggtacaattatgtgattgattatgggggtgggatggaataggggcatttgtgacctaatagttcccttttccctgaggactaggacgataatgtttctgtatatggatttgttagggcttaatagttttccaagtgcttcaagacatgttagctaattggatcttcacaggaactctatgaggtaagcagggtagaaaggtggcagattattggtttataggtgaagaatctgaggttggattatttgccaagatcacatggttaataaggagcatagcctgggccaaagcccgaatcccttcactcccagctctctaagtgctgctgacagatgtttgctgattatggtgtgaagttgtatactttagtatttctttctgagacatacaaacccctgtagtaaaattctttccactactaccaaagaagctcaaaaaaacttaaaataggcacttattgcttccaaaagtaccacagaaagccaggaatctgtattcattgcctagccacttgattcttatgacaaagattttgaaactctggggaarggctatgtgtcaacttgttttatgtgtcatgattgttaaaatgctagagaaaacagcaaagagccagttaaatctgtgtctgctcaaataagacaaggggcaagagtgtggaaaatccagaacaagattccctgagagatcatctagaccccgttctttctagtcagaagtatagttgtgattaatatgacattaatcttttgcaaagtttaattcttggattcagccatctgctttaattttaacacatctgttttgtaacctaaaataattttaaggtgtttgtttatttgtttgtttgtttkgagattacgattcttaagaatagatacaagttttaaaccttggataaaactaatttttattcttctggttcagttgtagaacaaatacaggttaagttgtcttccagctcttttagataaagcaatattagtggttttatagtgctaagtgaaaagagacattagaatttcaccatattaaactatctcccaagagtaatatgagtgagggaagtgttccttttaaaagtcatgcttctaggctgagcatggtagttcatgcctgtaattccagcactttggaggccaaagcaggagaattgcttgagcctatgagtttgaggttatagtgcactatgatatcattacccactacaataaaacacgaagttcagatggtcattcactagggtgtgtgatattttggagtatagaccttaagtgattatgacatatcaaaataatgtggtcttatgtttcttttttttttattgcagatttcattgaatatacttctattaacagcctgctatatatcaggcattctgataggtgttggagatacaaaaaatgaataaagcaaaaatagttcctgccctcacaaacaagtaaataagtgattcatctatagtgtgattagtactgatagaaatatgccattttgtgtgtacattattactaccttccttttgaagattaggcttttttgttagactcttgaagttatggaccttttggatggaaaatacatgtcatatatgccatctctcctcctctatgaccaatatccgtgatccctcatagcattcctgatgaatttagcctcagagttttttttgagagggagtctcgctcttgttgctcaggctggagtgcagtggcgtgatctyggctcactgcaacctctgcctcttgggttcaagcgattctcctgcctcagcctcctaagtagctgggattataggcatgcgccaacatgcccggctaatttttttgtatttttagtagagatggggtttcaccatgttggccaggctggtcttgaactcctgagctcgtggtccacccacctcagcctcccaaartgctgggattacaggcttgagccactgcgcccggccagcctcagagttcttaatacagcattatcagccctaatagccctagtctgccaattgaaattggcattgtcattattagcctatttcctatactctagtacctatttgagttataagtttataacttttaaattgttttggtatcaaaaggaatttttttttagggttttgctctgtcacccaggctggagtgcagtggcatgatcatagctcactgcagcctccaagtcctggactcaagcaatcctctcaccttaacttcccaagtagctaggactacaggtatgcacaaccatgcctagctaatttttgtattgtttgtagagatggggtcttgctatgttgactaggctggtcttgaactcctggcctyaagcaattctccctctttggcctcccaaagtactgggattacaggtgtgagccaccatacctggtcaaatttattcaatttaaagtttttggcagaccagcacctgacagcaggtttctctctagatatcctgggtttgggtacttgtaaatagagactggctcggtgtggtgtctcatgcctgtaatcccagcactttgggaggcctaggcaggaggattgcttgaagccaggagttggataccagcctgggcaacatgatgaggctctatttctacaaaaaataaaattagccaggcctggtagcatgtgactgtagccccagctactcaggaggatgaagtgggaggactggttgagcccaggagttggaggctgcagtgagctatgatcatgccactgtactccagcctgggtgacagaacaagtcactgtctcaaaacaaacaaacagagaccaaggaagcagagcatgggaaacagcagtggatgcagctactggtggttatgtgtaatttggatataaactccttacacattatggcccgggaactgtaagaatcaggttcctccctgggctatgttttatttacttttgaagactttttctccaggtttttgtaggttttggcattaattttgaccacattttacctaaaggaaggacaagatcagcagggaacaaacttgtggtaaaatttgctgagtgtctatactgtgctgagaatgaactgttttttttttttttttttttttaagatggagtctcactctgtcacccaggctgtagtgcagtggcacgatcttggctcgctgcaacctccgcctcctgggttcaagtgattctcctgcctcagcctccccagtagctgagattataggcacgtgccaccatccccagctaatttttgtatttttagtagagacagggtttcaccatgttggccaggctggtcttaaactcctgacctcaagtgatccacctgcctcagcctcccaaagtgttgggattataggtgtgagccactacacccggccttatgcccgcattttgaccgcaacccatcacagggtcgtgtgtggaattttccactatggtgtcatgttggtgctcaaaaagtttcagattttggagcattttggattaaagaatgctcagcctgtggtggtttataactctggctgctcaatagatcacctgtggggctgtggaaaaaaacagaccaaaaaaaaaaaaaaaaaaaaaagcaacccaccacagccaatatctggttcctttgcctagagattctgtctggtatgtagtctaggtatcagtattttactttaaggcacctaacatactgatgaagcttaacttgtcacacattagtgattccagggtatagccagggttgtgatccattattttagtaaaagtagtatctcctaacagagtatctgacaagacttcttggagagtgaagtttaaatggtgagaggaagatgaccagtcggttgccctgagggcaaggaggcattctagccatgtaggcagcatggaagaagtccctgactggaaacaaagctgtcaggtgaagggcatttaaaacaggcagagggaggatgatgaagaagataagggaggaggggtaatctggggcaccttattaaagacctggaaacagaggtaaggtaaggatcttggaattaatttctaggacacttggaaactactayaggacttaatctcctaagagcagtaataggagttagtgattagtgatagattagagggagcatagtactgaaaatgagaggtagcatggataagattgcatcagtctaggagggtgagcaatgattaaggaacagatgatatgcagaacacacagcaagaagaattgatgttatattgcaatatatcccttgtgctgaataaagggcagatgagttgaaaggaaaggacttaacatttgcaaagtctgagtatagcttttaaatctcttcagttttatttaatcaggctaacgctgttcaagaatacagtgtagaggactgtagagcctatcaaggtaatatcaaagagagcatccaactcaggctgcatatagtttttgccactaatatcctaaaagtaattgagtttaaggtataaatcacttccattacatgtttacctgcaatgggaatttgcttaagctataactaagtactttgccttcttagtactgagctgtagtgtgttagccaggaccctctcagaattcttggaayggaatgagaaggaaaagcagtacacaaagaatatgacgtcatctctttaagggatgaggtgttttatttcttgaaatgcagctgctcttttttactttttctttgctcttacttttggcctattttttctgtcctggcatttgccttctctttttcacccttaggattctaagwgccatttcagtattcagaatctcttaactacagtttgcaatttaggacttaaaaagaggtaagcaagggataaataggcacagcacagaggcagtgaaattattctgtatgatactataaaggtggatacatgtcatgatacatatgccaaattcatagaaggtacaataccaagagtcaaccctaatgtaaactagggactttgggtgataatggtgtgtcaagataggttcatcaattgtaacaagtgtacctggtgcagggcattgatagcgcggagggtgtgtggggttaagaattgtacgggaaatctctgtaccttccactcaatwttgctgtgaacctaaaaaaggttggggaggagaggatgcaaactttaggtgttaaaagttaaaaccactcttgaaataatggaccaattaatgacaaaaaaattataatttatgaatgaggattagtcatataggtgtacaattaaggtaaaattttgccattcatttttgtcatgcatagtctattggccaatgttagaagaaaaattttymaatgagctatagtatagtaaaaaggattcacatatgtatggcaactttagcccttttttttttttttgaatcaaagtttcactcttgttgcccagctggagtgcagtggtgcaatatcggctcactgcaacctctgcctcccgagttcaagcaattctcttgcctcagcctcccaagtagctgggattacaggcatgcgccaccgtgcccagctaattttgtatttttagtagagatggggtttctccgtgttggtcaggctggtttcgaactcctggcctcaggtcatccgcctgtcttggcctcccaaagtgctgggattacaggcgtgagccacagtgcccagccacctataagatttttaagaaatgagaacaaattaggggccctaattagtgaggtacatcttagaatttaaccacagaaagctctttgatgaaatactgctgttggtcaaaacttgcctatattgttataatgaggaagttgacttgtccaaggtcatacataaaataagtagcaaatctgagattagaacatagtttgtctgcccccaaaatcctctacatactaattcattgtagactgtaattcatttttgtgccctattaatgttccgggcattggaagtcacataattaatttcataatgcttttcttttcctttctagggtatactttttattaatcaggtgtttttattaatccaactaatatttgctgtatggccatcatgtgtcccttcatctgatttctttgaagaattagttgaaggacttttctctagaagaagttagtttgccagctacaacaaaataataagtagctattgcactcagtacaaatgctctgtggctctgtaatttgacaaagacattctagttttctccagtctcttttgctattgcctatgtttaaactctcttgctcacaagactttagacaatttaaacaggaacaaatgctatcgtaaggatgtctcatattagatgagcaacaatattgtcaggaaaatagtaacaattatagcaacttgctaaagtgctgacataatagattgatttgggggcctgtccaaatttagtggacttttttttttttggagacagagtcttggtctgtcaccaggctggagtgcagtggcgcaatctcagctcactgcaacctccaactccctggttcaagcgattcccctgcctcagcctcctcagtagctgggattacaggcatgtgccaccacgcccagctaatttttgtatttttagtagagatggggtttcactatgttgagcaggatggtctcgatctgctgacctcgtgatccgcctgccttagcctcccaaagtgctgggattacaggcgtgagccactgcgcccggccataaatttatttttataagcccattgtttgaaattattttgggattatatatgggttgtgtgtttattttttaaattatagctgatactgagagttgcctataacttcgctctaagtatatggtaagtgctttctttatatgctctttggttgcagttttattaagagtaataacattgcttttaagtgtacatgctgttttgggtttccattaagaacaatttcttaattaaaaataagtagagcttcttttccttctattactcagattttttcctttttaatctttacaggtgcttctttccccattctctttaagtattgatgttcttcagggcttgatcctacccctgcagtacttctcacatagtattctctttctgggtaaactaaatgcttctctttagcccacattggctacagacatgtactgttcgtatatgtcatggattactgcatatctccatttggatatctcataaacactcaaattcagcatgtccaaaattgaacccatcaccccttcctcaagtttacttcagtatttctcattcactctattgctccagtcagaaacttggttgtcttccttgactccttattctttcttgaccttatagccttattaccatggtctcttaatttaatgactcaagtaactcttcctgcactttttctgtacctaccgctataacttttggtcatgctagcattatgtcttgcctgtgctgttgcaacaaattcctaataggcctctctacctaggagagtaatttggttmacaacaacaacaacaacaacaacaacaaaaaacccaaaacaataatttggttaattactgtttcagagtaacctttcaggcatgtaggtttgaccctctgatcacaggcttaaaactttgaaagtgttctctacttctgttgccctttttatgaagcccaagtctaacatggcttatggtggaccctgaacaaactaacctgcctcttcagtcttattcttgctgcttatttgaggcacactatactccagacaagctgaactttcttggaacactccacttctaactaacctagctaactgctgtatctccttttgattcctagcctaagatgggtcccctgctttatgagtggcgagtcccctttgtttgctctgtcaaaaaactcattgtattgtattatatgtttgtgtctggtcagactcaagttcctttatattccccactgcctagcacaggcactctgcacactttataaattatctgtttgctgaatcagtgactaaatgaacttccagcttctctttcactgctctgtctattcaagttttgacattctaaaaaattgacttgtgttgttcatcctccaggcatcaagaatatgacatgacaaggtgtgtgtcactgtttttaatgtatacttgtaattttctctttaagtttaattgcctgttttgaatagcaatatagtcccatgactaatgaagttccaaaatgatatatatgtatgtatgtatgtatgtatrtatctattagtctccatcctacccctaccccacagctagctacccagttcttctccaagagacaaaaatattactagcttcttatatttgtagagcattacctctttttcatttttcaggaaaatctctgcttatatatctctatctacatgtagtataaatatgtgtaaatatatacctttttcctacagatgttatattgtatatactggagtgtaatttacttaataataatgatatcttggagaacttttgagtagataaataatagtctcattctttcttgtactgcatttcattagtgagtaaatataccacaatttatttaaccagtcttttactgatgacatttacatttgtgcctaatctgtagctgctgcatagccaatactgtagtatttaatagccttcaactcttgacattttatacatacatgaatatatctgtaggggaaaaaatcctagaagtagaagcactgggtcagataattgtgtatgtgtaattttgatagatcttgctgatttgtcttccatagatatgaatttaccttactatctgcaaaaatgcctgtttcctcatactcttatccacacagtgtacattacacttttgaaatttgctagcttggattgtgaagttcaggctgtgactatagcatttttttttttttaagtggccctgtaagggatgacatgcttaatttatgaagtgtttatgaggtccaaacatataatagaaaacacctaagttctggtgtttatctgtcatagccaatatagaaaaataaagagtatatcctatattatgtctgattatgagaagaaagtaattttttagtgaaaattttttgagaaataaatattatagttttaacctaataaacctaaagagccctttaaagtgcacaattcagtgattttttttttggtatattcatgaagttgtacaattattaccactgtccaatttcagaacatttttatgacaaactgtaaaagaaacccatacccattagcagtcactctgcattcccctctcattccggcctttagtatctgccattaatcaactttttatctttgtagatttgtctgttttggacattgagtataaacgaaactgtacaatacatagcctttagtgtatagcatctgtcacttagcataatccatactcaagtttatcagtatagtaacatatttcagtactttttttatggttgaataatattccatttcatttcatttatccatccattaatcgatagacatttgggtttcccattttttggccattatgaataccattcatatacaagtttttgtgtggacataaaagaactgaaaattgttttcagtttttgtgggttatacctagaagtggaattgctggattatatggtaactatacttactttttgaggaactgctgtattattttcaaaagtggctatattattttgcattcccactagtaatatttgagggttccaattttctacatcctggcccaaacttgttattttccatcttttttattatagccgtcctggtgggtatgaagtggcattttattgtgattttgatttgcatttccctaatgactaatgatgttgaacgtctttccatgtgttcatttaccatttgttttgtttgtttgtttgtttgtttttaaaggatagagtcttattctgtctcccagactggagtgcaatggtgtgatgtcagttcactgcaacctctgcctcctgggctcaactgatcctccccgctcagcctcccaagtagctgggactacagatgcacaccacatccggtcgatttttatattttttgtagagacatgtttcgccacgtttccyaggctggtctcatacttgtgggctcaagtgatccgcccaccttggcctcccaaaattctgggattacagacttgagccaccatgcccagccatttgtatgtcttttttggagaaagatctgttcaaatcctttgttcactttataatttggtatgttttctctttttttttgagacagcgtctcactctgtcacccaggctggaatgcagtggcatgatcataactcattgcagccttacctcccaggcccaagtgcttctcccatttcagcttcctgagtagctaggaccacaggcacaagccaccttgcctggctaattttttttagaggggattggggtaggggagagacaaggtctcactatgttacccaggctggtcagactcctgggctcaagtgatcctcccgtctcagcctctcagaagtgctgggatgacaggtatgatccaccgtgcccagtcaayatttatttttttattgttgaggtataaaacttctggatactactgccatatctgatacatgctttatagatattttttctcattctgagggttgtcttttccctttattgatagtatcctttgaagcacaaaaatttttaattttgattaagtccagttatctattttttcttttgttgcttttgcttttgttatatctaagaaaccattgtctaatccaagatgagacctacctttatgtcctactacttatgtaggcctttccatggactatattacctaaaatgtttatgttcttccttgatcttaacactagttcttgaccttttaacatagaaaacaaattaagcatttgacagcaaatatgctgcaagtctttggtaaaggatgaataaggccttgaaataccttgcaactctagtctcaaagtcatctctttgttaccagagttgaagggtgggaaacggttgccttttatctgtgtacctacacacatatatacatatatggtataatgtatcaatatttacagagaccatagtaaacacagcacaaaaccaggcattaagagatgcatgggaaatagcatttaaatggtaaatatggtaaagattgttttatggtttttgggtttttttttttmatgatcatatttttaatgttactttaaaatagattagtggaatgtgattcaatttagtaaaaaaaaaaaaaaaaaatcagctttattaaaacatctgagaaagccgggcgcagtgactcatgcctgtaatcccagcactttgggaggccgaggtggacagatcacatgaggtcgggagttcaagaccagcctgaccaacatggagaaacctcatctctgctaaaaattcaaaattagccaggcatggtggcgcatgcctgtaatcccagctactcagcaggctgaggcaggataatcgcttgaacccgtgaggtggaggttgccgtgagccaagatcacgccattgcactccagcctgggcaacgagcgaaactccatctcaaaaaaaaaaaaaatctgagaaagatggaaaaataaatgtattagaaaaggtttttaaaaaggagaatgttaatcgagaccacgttgaaaccctgtctctactaaaaaaatacaaaaaattagccgggcgcggcggcgggcgcctgtagtcctagctacttgggaggctgaggcaggagaatggcgtgaacccaggaggtggagcttgcaatgagctgagatcacaccactgcactccagcctgggcgacagagcgagactctgtctcaaagaaaaaaaaaaaaaagaagaatgttaaaaacacataaaattatagctttatacattctgaagtaaatattgatgagttgataggatagctagaatttgtttcaaaataatccagttgtgatagaagtggcagtgggattggccatatattgaaaattagtgaagctgaatgtagggggttatcatctattgtgtaagtttgcaatttttcataacactttaaattttttttgctgggtacagtggctcatgcctgtaatcccatcactttgggagatcgaggtgggtggatcgcctgagcccagaagtttgagatcagcctgggcaacatggcaaaacctcgtctctactctgcaaaaattagccgagcatggtggtatgtacctgtggtcccagccactctggtggctgaggtgggaggatcccttgagccccagaggttgaggctgcagtgagctgtgttcatgcaactgcgctccagcctgggtaacagagggaaaccctgtctcaaaaaaaataaaataaataaataaataatttttaatgaaaattctttttcaaaatgcctctgcacagaatctcatttacagtagccacctaaagaataaaatacctaggaatacagctaaccaaggaagcgaaagagctctacagtgagaattacaaaacattgctgaaataaatctgagatgatacaaacagaaaaacattccatgatcatggataagaagaatcagtgttgttaaaatggccgtactgcccaaagcaatttacagattcaatgctatttctatcaaactaccaatgatattcttcacagaattaggaaaatctattctaaaattcatatgaaccaaaaaagaacctaatagccgaaacaatcctaagcaaaaataacaaaaccagaggtattatactacccccatttcaagctgtactgcaaagctgcagtaaccaaaacagcgcggtaccgatataaaaacagacacatagaccagtggaacaagattgagaacccagaaataaagccacacacctacaaccatctgatcttcagcaaagtcgataatagcaagcaacggggaaaggactccttattcagtaaatggtgctggggaaactgggtagccacatgtagaagattgaaactggaccccttcctttcaccataaacaaaaattaactcaaaatggattaaagacttaaatgtaagacctcaaactataaaaccactggaagaaaacctagcaagtaccattctgggcattggccttatcaaagaatgtatgaccaagtccccaaaacaattacaacaaaaagaaaaaaaatgacaaataggagctaattaaagagcttctgcacagcaaaagaaacagagtaaacagacaacctacagaatgggagaaaatattcacaaactatgcatatgacaaaggtctcatttccagaatctataagaaacaattcaagcaaaaagcaaacagtcccattaaaaaatgggcaaagggacacacttgctttcttaagtcgcctgcttgttcctcttccaagttgtactttcttttctttcctttccttactgttgtaaagcttttcttttcttttcttttctttttttgagacagagtctcgctctgtcacccaggctcgagtgcagtggcgtgatctcggctcactgaaacctccacctcctgggtcaagtggttctcctgcctcagcctcctgagtagctgggatcataggtgcccgccactatgcccggctaatttttgtatttatagtagagatggggtttcgccatgttggccaggctggtctcgaactcctgacctcaggtgatccacctgcctcggcctccaaaagtgctgggattacaggcatgagccaccatgcccaactgtaaagcttttcaataaactttcattcctgctctgaaagaaaaaaaaaatgggtaaaggacatgaacagatacttctcaaaagaagacatacatgtggccaacaggtatatgaaaaaatgctcaacatcactaatcatttgagaaatgtaagtcaaaactgcaacaagacaccatctcacaccagtcacgatggctattattaaaaagtcaaaaaaataacagatgttggccaggttgcagagaaaagggaacactcacacactgttggtggaaatgtaaattagttcagccactgtggaaagcagtgtggagatttctcaaataacttaaagctattcaacccaacaatcccactaccgggtatgtacacaatggaaaataaattattctacagaaaatagacctgtactcatatgttcattgcagtacagtttataatagcaaagacatgtaatcaacctggatgtccatcagtggtgaactggttaagctggagctaaacattgggtaaataccggacacaaagatggcaacaatagaccctgggattactagaggaaggagggtgggaaggttgaaaaactagctgttgggtactctgctcactacctgggtgatgggatcatttgtataccaaacctcggtgacatgcaatttactcatgtaacaaacctgcatatgaaccccaaaccttaaataaaagttaaaaaaaaatgcctctgcagaccaaatatttctcttggtttctgatctactttttaggtactatcccatgtatttcctgccagtatcttaaacttaccaaaaacagaatccattgcctttatccccatatttctgtatttgtattctgtctgttggttagtggagacaccatatatctggtttctcaaatagaaatcttattgataatgccagcttccctcattccttgaggaygtttgctcctggcccacccacactctcagcaaaatgaccttgcttgtcatttcaccaccaagaaatataaacaaccagtaaagaactacaagtcagccacatctacccaactaccagcatctgtgcctatatgactgccttccttcctttgctgtggacacattttttctgttcctgttttgtgcctctttcctccacttgtactctggatcttgtctcctttcacctgcccagtcacaacttcagtggtctctctgtgctgcatcaacagttattttctttactgagtcatttccatcaatatggaaatgctgttatttctcccatccgaaaaaaaaaaaatcctcttaggctaggtgtggtggctcacacctataatcccagcactttgggaggctgaggcaggcagatcgcttgagcccaggagtttgagaccagcctgggcaacatggtgaaactccctctttacaaaaaataccaaaggttagcagggcatggtagcacatgcctgtggtcctacctactgaggaggctgaggtaggaagattgcttgagccggggaggcggagattgcagtgagccgagatccagccactgcctcaaagaaaaaacaaaaacctcttgactactctctttgaggcattgctcctgttttacttgatctgttagcagcatttgacacaattaattcactcccttttgtttgaaataccttcacttagcttctgtgactactcttctgatttttcttctttttctctggtaaattcttgatctcctttgctggtatctcatttccctgacctctatacagaattttaaagatcgggacttctaccctcattctcttagtggtcaaatccactttgattgtcttaaaaaatactgtctgtattggtgttttgcaaactttttttcattattgctctgcctgaaaagccttttgactactttattgcctaatcaccccatcgcagtgaaatttctctgcatctgtttatgggttgtagcccttcggagggccacaaaccattgtaatatctaagatctgcccttccaaagagccagtttttatcaccttggggatatcacctctgctgagaatgcatgatttaaattgacaatccccaagcttttttcttcagctttgaccaacttcagtctattagagagcctacttcatatctccactggacagatatcttaaacttcatacgtacaaaaccaaactcataatctgactttagcctttcttgccacatggagcttcagtgatctcattcttctttatgtaccttttgttctggcagcactgaatttgaaatatacattttaccctagtggtaaaagggcttagaagagtgatcatttattttcctaaccgaaattggccaggctttgaaagtagaaatttccacgactcagggccactatcatcataatcttcctgtacgtagagtggagcaggagttgggatgacagagtcctggggggaataataacattgcactaactgttgaaaaacattccacaagatccctgtctcgttaggatgtatgcataagagaagatgctatgtacatgtagctgtgaaaagttcacagaatagcactgctgtattggtatggaattcccttttgggtaaataagccagggaacaattagatagcatcgttcagtgtattcaggagaatacctgggaaagacagttcttcagaattttgaactattggcaacatgttgctttaacaacaccactgtaaaagtctttggtattctaaataggaaatcttgtattctttaacacgtaagtaaagatacatttggtatatattctgttatccaaaggaatgtagatacgaagaatagccttttaattaaggctaataggttttgagatttatttagttaacttatttagtaaacttcatgaagtgttatttctagtactgtgtggtttttttttttttttacattgttactatttcagctagaattgtaatcatattacatcgtgattttagaattttggtttttatgttctctttacaagtggttttggacggtgttttaaccttccttttccccagccccaaatatgctgaacaacatcaggaaactacagtgatttaatactyttttttttgaaatggagttttgctctcgttgcccaggctggagtgcagtggtgcgatctcggctcagtgcaaccactgcctccggggttcaagtgattctcctgcctcagcctcccaggtagctgggattacaggcatgtgccaccatgcctgtctaattttgtgtttttagtagagacggggtttctccattttgggtcagggtggtctcaaactcccaacctcaggtgatccgcccgcctcagcctcccaaggtgctgtgattacaggcgtgagccacygtgcccggcctgatttaatactttttaatggtatcatagctactttatgacatttttcttattactgttacgcaaattctgaatgaaacttttctaaaaagctgcacaacgggcccttctaaataataatgctaccttaattgttagtgtgcagctcaacagatccgaagtttccccatcaccctatagaaactgagcactattttttacatcccttttcaaaacaatagatgaggtaagaatttgaaaattcatagtttgttttcaatatgaataaaatttgtcccgtttttaagttgtattttcgtaatgaaaatcttagctatatcattttcttttttctctccttgttccaaactttcaggtttgtgtttaatgtctaagaaaggaaatactagaactttcaatttagttaaaaaacagtaacatcttaagtgtgataaaccaaacagaaatgtctctatgtttggcaaagtcacattccccagagatttactaaacagcaacagcactgttaccagtgtcagctgagacattatttatgtccttctctaatggcttcttgttccactaaagctattgaagaaggtgtaatgctacatagtcctcatgaaggactcttttcctcactgcttagattagctaacacaacctgaatatcagaatttgagactttgaattctgctgctgatctgctgtgtgacttccaacaaatcaaattgctttctgtcctcagttactggtcagtggcacctaggaataaattgacatttactgttagattataaataataactgctttgaggtagttggcaaaaccaagatataatgtgtgactgttagtgtagttaacattactgtgaatattactgtgtagttaacttccattttctaaataatgcttttttgtagcatccttgtccttttagtctattttaaagcagcatttgacaatctttgttttcccaacttttctccattttgtggttatgataaaattataatatagacattaaagaggggaattattttcatgcgcttgaaggagcatccttttagaattcttttaataagctgaagaaaggaattgtatctgttttaaaagaccaatcttaaaactctttagacaatgaaagcttattaacatgtttttctatgacttaacttggaaagatggcagtaaaatttttgaatttgcattctacagtggcaattggtttactaagtaaatatacaattgattggaaccactattttatgtacctaattattatttaagaaaaatggggccgggcacagtggcttatgcctgtagacccagcactttgggaggccgaggtgagcagatcacttgagcccaggagtttgagaccagcctgggcaacatggcaaaaacctgtctgtacaaaaaatacaaaaaatagccaggtgtggtggcaggcacctctggttccagctacttggaaggctgagatgggaggatcacttgagcccagaaggcagaggtttcagtgaactaagattgcaccattcaactccagcctgggcgagagtgagaaaaagaaagagaaaaaaaagaaagaataatggaaaacctgttatttaatataggttttgatcaatcacctgatatgaagtggcaaaggttttaccrtcaatgtgttctgaggtaatttatctggtgtggaatgacttggaagaaagtatttccttcaagcatctgtttaccaaccactttgagtaaacttatgtattttactcatcttctggaaacaacattgttctgccagacacttggtctgaatgtgtgattttgcaattcagagtaatatttctttgttcttctgagaatggatatttatgcatgttttcctcttagtctctgcttgagaggtacaggagataactagattttattagcatatktttaaaagtctattaaaaatgcttttaaattatttggtggtattctgattgaaaatggaaggggttgctagaggttttatcaagaatagacacactatatattttaatttattggcaggtaagctagattttcctattagttttcattacatggctgtatacatatgaatcaccggtgactactttttaaaaatatgtgtacaaatttttaaattatattttttgtagtaatatgttataaagcattgatttgttatatttttaaatttatcatactttaaacaaaacagatttaaacaacttcaatggatttggaaatagccattataaacaatcttataactgaagttttatttttactaataatttaagttgtgttattcttatacatatttaggttttgaaatttttataaaggtctaggctgggcgcagtggctcatgcctgtaatcccagcactttgggaggccaaggcaggtggatcacctgaggttgggagttcgagacaagcctgaccaacatggagaaaccacatctctactaaaaatacagaattagccaggcgtggtggtgcatgcctgtaatcccagctcctcgggagactgaggcaggagaatcgcttgaactggagaggcagaggctgtggtgagctgagatcgtgccattgcactccagcttgggcaacaagagcaagactatgtctaaaaaaaaaaaaaaattatgttttctgggattgcaggcacggtggcatatgcctgtaatcccagctccttgggaggctgaggcaggataattgtttgttgaacttgggaggcagaggttgtggtgagttgagatcgtccactgtactccagcctgggtgacagagcgagactccgtctcaagaaaaaaaacaaaattataaaggtcttaatgtcttaaaagtatgaagagaaatttttatagaaacgtctaaaggggaactgataaaaataatgttcactttgggggaagacttgccatatgtatggtcatataccacaatcctatgattagggtagttagaaatagaaacgaaaaaaaaaaaaaacaacatagagtttgtaatcctaggtatgtcagaaacagctgcaaccttttaaaaaactgcttggatctgaaaagaattgattgttgcttttttgtatttttcctaacgttctactactatattttcttaataaaatacatatttttgttagatttttaatattctgacttttaaatacttgtaatgaaattttattagtattcttggctgacttattttggctcttgtctcctccatttgcaaccaaattatactttatatgctagacaaggtttatgccagcctaattggttgctggcatttcttagcctcacagctgctgtgaactcagctgtgaactagaaaacatataataggatcctgttttcagagaccaaaaggcaattgtcaacatgtaaaacttgtttttgacagctcaatgaatatatgagcttttatgacaaatagcactaataccagatcttaagtaactatcttaaagattagaaagtcttgaaatatgaattccatgtatttatttttcttcactgaagcaaagatggcttaaatttgcatgtatgtgctgttcagtcatttgtggcttttttctttttaaaaatcatgtatcktgatatttaccaacagatattaaaagttgagatgtgaactgttttccctttaatttcgtcctaacaaaaagttgagccttaagtggggtaaaaatgtttctgaaaatgagctaaacatgaaatggctttgattaaagattatatttcaaaatatttattatatttatatttgatttagcagattttatttatataaatttttgacatctaagtttggggtgaacattatttttatgttaagttggaccatatgaaattgtcatttttttaggtcaaatggttgaatktagactaaatgggaaaaaatggcagtgtatcaacacgaactccctaaccaaattcagaaatgtaactaaccactgtgaattacctttgtataagtaaaatatcatcatgtgtgatcaatacaatgagattaacaaatcagatttatatatagtaaaatcttttcttccagtataattgctttttgcccattcccactgttctcttcaacattttcttaaatgtttagggactctcagcagtaagcaaaacaggctaaacaagtatatgagaggctgtagaaatacattgaggacaagcaaactgtgttagtaaatggctcatactgaatatgataaaagcatcatcctatacctacattttgtatcactttgatacttcgcatgattttttatgtctactgtgattctaacagtctatcgattatatttggaatgtagctccaaacttttcttgcacaatcttttatttaaaatgcgaattgagttttgtcacatacaaatataaatctttccttacataaatatttgccagaacaatcttgcattgtgagaaaagcacattttaggaggttttggtattaaaaaccaagaggtgttctattgggaaaataatgattggggagctattctgcagggtttgcctgtactttccaaaactgtttgtgaggctgaggcggcagtcgctgtggctggaataggatgctggraggtgttgagggaggaacagtggcttgtactgggagggtgtcaggaaggaacgggaggaagatggcgacatcaggggcagggcaaatgagccttgttcggccacagccttggctttcaatctgtgcaagtttagtgagatcacgctgcagaagcagtgtcaggctgaggacacagtggccctcgaggaaatgataatggacatcagctccacccagttacacacccaaaaactgcaactgccatacacaaggagctcccgttatggtggttctctgccaacaccctaccacactgacagctctccctatagtcctgcctacttatctcctccccaagtgtccagctggtgaaggactatctcctgggacaatttccctgcagagaaggggtacctgttttgcccagcatctgcatttaacaggacaagctctgactctgcccttcacacaagtatgatgaaccccagtccccaggatacttattcaggccccacacctcccagcatcctgcccagccaacatttcaggttggtaaaatggactccaaagtacctgctattgaggagaagttctcctaggtgacaagcatttgctgaagccatgggatacttagaagctgtcgtcaccctcctcctgaccccggtcctaatgaagtccctggaattaatatctttccatttcctggccagcttgccaatgttcctgtcctcccacctgccatgaagactggatgtggcaggaggtccctacctgacctcatcaatttgtactttctgccagcactgcccaccccccggaccctgaggagacagcctactctagcctgaataggggcaacagtacctccaatttgactcacatcatgactcacctgggcattagtgagggcctgagcctggacttgggyccaggtcatgatgccccaggactttgttcacctctcagccacccatccctgcagtcctccctaagcaatcccgatctccagacttccctgagcagtcctcagctccatcttcagggcatccacagtctcccctcactatctccctcttccttggcccaccatgccctgcctactaccttcctgggccagccctcactaagtaccctgccccccacttctcctcctcctccccctcttcctccccctcttcctcttccttctcctactcctcctctcgtcctccactttattcttcatctgcccctaccttactcaacctctactcctggggcctccccaccaccactgccttgtacccctcagccccctaagtttgctcacaggtccagccgatgccagaaggtcgcaacagcagctacccaaacagtttttgccagtgtcacccaccctgtcttccatcgttcagggtgtccccctggagaccagtaatctgcacacccagccacacaccccaaagtctctacagcagccagagctgccctctcaggcctgctcagcgcagccctcaggtgggtagcccctgagcaggcaattggattatggaatactmcccgcctcggcccactgggcttgggcaagtcttcactggccgatgagtgacttcagcctggggaactggagcagttcagcatggagagcccataaatcagcctggtgatgggtccccctggcttttctgaagggcctggatttttagaaggtgagggrccagtggctggccctcaggattcccacaccctcaaccaccagaacttgacccaccactgctcctgctgtggctcaaggctgaacatcatcctcataggagactccytcccaggtttctctaaggagattgcagcaaccctggctggagtgcctggctttgaggtgtcagtagcagggttggagttggggctagggctagaagatgagctgcgcatggagctattgggcctggaagggctatacatgctgagagacccagtgccytgctacccgatcctgctctggagtattcatcaccatccctcttcttggccctgtcccccattactgtccatttcctcccttaccccagctagtagagacgccactctgtccctcagatcctctttgtagcatgaacgaaggagcccaaaaatgagaaaaagcaaggagtttgttcaggtggcccttgaattctgtacaggggtgggcctggaggagctcaagggagggtcacaagcacttgtaactttgaaccaactgcctggaggtcagaacctgttggaaagttggggatataaacgggaacctgggaggcagggcttgtccggattcctagagatgggcattgccagctyctcctcaccaccttttcacctctcaatggaggacagtgccacagtgggtattatttttaattaaatattttaataaaaaattgagaaaactccttgcaggtgttttttgtttcactttacccctaacagatgacattttctgtactaatttatgtttacaactagattgaaacaaaatggaagacttttaaatatgtctctggattttaagttttaaaaagccatagagtttttgaaactataagttatcttttatatggtagtattgattttatataacaatgtaaacttagaattttcaaatctgacctcattttctatgaatatgacttaggacttaaagatggattgaggcttctggttcaaaatagtataataaagttcatgtattggcatccttctgtcccaaacacataagaggaaaccaaaaaggcatagctgagctcaaaaacaagatcatggattagtaatggaacaggaattctaagagatggatgaggctgaagcaggcatggatgtcaaaagtttgattcctataggatgatgcgggagaaagagactttaaaggagaatcagagtcaggtccactgtttgaagacaaggacttstgcggctcctcttaaaaatgctggtttttaaatgccgctgatttgctcctggagctagatttataagaaawtttccatcaaggaaggcagcccagtacagttatggtagaaatacaggggtattcagccactgtgcactgggaaaagtcataccaattattgtgrctctgtctgttctgattggtcagttatctcacctttagaaatcattaacaggatacctagaaaacccccatgtctggaatttgagaaacatttctaaataactcatgagacaaagcatcatgaaaattagaaaaataggtggaactgaacaataacaaaaaaactacatgtaaaaacttgtaagatgctgctaaaacagttctgggaaagaaatgtgtagctttagcggcttataaagaaaatagaataaggatggtgaatgacttaagcattcatcttaagaatttaaggggaaaaaacagtaaaatatgcccaaagtaagttgaaagaaagaagtaataatagcagaaattaagtacataataacacctaataaaaaagactcaacgaagtcaggtttattcttggaaaagacaaatgaacaaatcccaggtgagattaagagaaaaaagtttaccaaaatactaggaatgaaaatgtggacatcatatcagatgccagaggcattaaacagatatgaacttgatgccaaaaatgtggaaactttatctaaaactcctagaaaaatataattatgaaaacaataaaaactaatactataattattaaggaaattggatcttcttataataacgcaaagcaagatggtttaacaagtgcctaccaaatactcaagagttgaataatctaatttcacaccaactattctagagtacggaaagggaaaactctgccatagaaaatcattttatgagattagtataaccagccgggcacggtggctcatggctgcaatcccagcacattgggaggccaaggtgggcggatcacctgaggtcaggagttccagaccagcctggccagcgtggtgaaaccccctctctactaaaaatacaaaaattagcaaggtgtggtggcgcgtgcatgtaatcccagctattcaggaggctgaggcaggagaatcacttgaacctgggaggcagaggttgcagtgagccgagatcacaccatcgcactccagcctgggcaacagaacaagactgtctcaaaaaaaaaaataaagattagtataaccatgataccaaaatctaataagattgttatgagaggctgggagcagtggctcacacctgtaatcccagcactttgggaggctgatgcaggggaattgcttgagaccagaagttaaagaccagcgtggtcaacatagcgaaaccctgtctctacaaaaaatttgccaggcatagtagtgcatgcctgtaatccttgctactcggcaggctgaagcaggaggatcacatgaggctgtagtgagccatgatcacaccaccgtacttcagcctgggcacagagagagacccccgaactcttaaaaaaaaaaaaaaagtagctttgagaaaggaaaattgctggccagtatcagtcttaattaatgatataaaaatccagaacaaaacagacaatgcaattccagtcagaatcccaataggtagtgttttgtgattattggtttatatgatttttggaacttcacaagctgattctaaagtttatacagacatgcaaaaggccaagaagatcaaagagactcttaaagaacaataagacaggagggcttattctatatggcaagacttaataataagcaaagctataatactaaatgtaattttagttcagggataaataaactcatgcatgtatgcttgaactatgacacaggtagtattgctgataagtagaggggaaagggaattttcaggaaatggtcctggaaaggaaattgtgttatcatataaaaataacaaaatgccaacggattaaggtcccaaatatgaaaggttttgtaaaattttatttattcgagtcggagtcttgctgtgtcacccagactcgagtgcagaggcacaatcttggctcacttcaacctctgcctcccgggctcaagcaattctcctgtctcagcctcccaagtatctgggattacagacacccaccaccacacctggataattttttgtatttttagtagagttagagttccaccatgttggccagggtggtctcaaactcctaatytcaagtgatctgcccacctcagcctcccacagtgctgggattacaggcctgagccaccacatctggcttataaaactttaaaagaaaatgtaagagactgttttagggatctcaatcttaggaaaaatttcatagcataccaaaaaacaacaaaaaaaatccataatggaaaaacatacatttgactacattagaattaagaatttaaatgcatcaaaagcaccataaagaacatgaaaagataagccacaaytttgtagaaaatatttgctatacatacaacaaaagattaatatcaagaatatatatagaattcctatagagaaatagcccaaacaaagaggccccaacactcaagtcagtactcaaaaggcctgaatggctaacaagcacaaaaacaggcaaaacctcattaaatcagagaaattagaaccataatatgatacattaaatctgactaatattgttttcatgaatgtggagtaattgctagggggattacaaatcattatagatactgtgtgttaggcccatctttcattgctataaatacttgagactgggtaatttataaagaaaagaggtttaattggcttgcaggtctgcaggctttgcaggaagcatgatgctggcatctgctcagcttctgggaaggtctcatgaaggctaagggggagcaggagcaagagagagggagatgccacacacttttaaacagccagagaacagaactcactgtcatgaggacagcactcatcaccaaggggatggtrcactcatcaccaaggggatggtgctaaaccattcatgagaaatccaccccagtgatctagtcacctccaccatccaatcacctycactgggccccacctccaatatagggattacaattccacgtgagatttaggcagggatgaatatacaaactatcacacagccactatcgataggaagcatcatggcaccgaagagaaaagttttatatatgtggactcaattattctgtatttcttctcttattatgtatcttagagaaattattgcacatttgtaccagtacacatatgtaagaatgtccatagcatcattgttcctaatagcagaaacataaaaacaactcaaatgtctgatagtagaatagataaaatgtatatttgtgcaatgaaatactatattgtagtgaaaatgagttatatacattttatatatacaacataaatgaattgcaaaaaatagtattgagcaaaaaaaaaaaacacacaggtcttaaaatagtgttaatccatgcatatgcaatttaaagagaagtaaactgtttagatttctgtgtgtgtgtgttacatttaaaggtgataaaactataaagaaaagccaaaatatgattatctcaaatatctgggtagttacttttagtacttttttttttttttttttgagacagaattttgctcttattgtccaggctggagtgcaatggcgcgatcttggctcactgcaacctctgcctcccgggttcaagcaattctgcatcagcctcctgagtagctgggattacaggcacgcaccaccatgcccagctaattttttgtgtttttagtagagagggggtttcaccatgttggccaggctggtctcaaactcctgatctctggtgatccacccacctcagcctcccaaagtgctgggattgcaggcgtgagccactgcacctggcagttgttatctttgggaggggaatgtatggggtttcaaaagtgttttttaacctagctggtggtagttacacaggcatttgctctattattatttttctttaatgtggaagtatatgtgatataattcacagtaaagtaaatggtgaatcagagagagtcaaagggcaatgagttagtgaagatggaatacaggagttttctcaggtggatcagagaaatgggatggtattggaaggccacatggaaagattgttgcattttctagggaaagatatttctagtcctgattagtcttattaacrtctatgcatgatccctattaacaactgagacttgagcatctcattgttctccccctagtggcatcattctcccagtcatccaggcttgaaaccttcttgttatgcctgtatgttgtcaccatatcatgattttttcctttgaaaaatttttcatgtatcttattattgtttctcttattacttaacacctttgttaacaggtgtttactacttaactttctaaataaatcattggatgtctttgttaaagaaaaaaattaaaatttaaaaagaaaaattataaatttgtattataatttaaaaagaggtatttgagtagctcaatgaaaagccatatatacgacaattaaaaaatatttaaagtcatattgggtaaagttggtttttaaaaagaaaataacattttttagagacatcttttggtgcaaataaaagccccatgctgcattggtattgtaggtagtgtagatggttctagttatctgattaattggcaaaaagcaaatgcttaagactttgtctattcatttcttattgctggaatttcgtattcacttcttgttggatgagtaaactggattatggtagagataaggcaacataattctcagtcctgccctgctcaacctctagagtttagtcttagatcagatgcttttgactctgcaaacttgtgatttaaggctttctggatgtgtacactggtggttgaggtcatagaggttccaatattgaggagactgctgatactggatgttgtctccttgatttttttttttttggagacaggatctcactcttgcccaagctggagtgccgtggcacaatcacagctcactgcagccttgacctcctaggctcaagcaatcctcctacctcagcctcccaagttgctgggcctgtaggtggacaccaccatgccctgttgatttttaaattttttttatagagttgaggtctcggtatgttgccaacctagtctcaaactcctgggctcaagccatcctcctgcttctgcctcccaaagtgctgggatcacaggtgtgagccactgtgcccagcctccttgatttgctttatcctctcattgccaatctctctagcctgtctttggagattaaagtttctgtgaatttgcgacctgtagtcctggtacgaattttgctccaccggcccacctttttttcgcacacctagttatggtacattaagtcactccttgcctagaagggtgggaataccatggtagatgcccaacaataagaatggttgtgttggtcttgccttttggaatatccacatatttttccccattctcattactgtggtaattctactggtaattgcatggagatccaccttggtaactcatttcttttttcttttttttccaactagatttgatagctaggtgtctcatttctttaacctcaaccacggcctcttcatttcctgctgagggttattcttcacagtagtctgattaaaatgcatcttccttaggctgaaatatttccttcctttctgctgataaaaccatatcagtgttttattaaactcttttactttctccaaaacctttgttgctataatcttcttgtccccactagtgggtattagtatattgtggggctgccacgggcagttggggaaaggatggctgccaggtcttagcctcactactcatgttgtagagatggtgattgatgcggggcttgatgcagcagcggtaggctcctcccagattgtgatggtgactgggctgcttatggctctctggggtccactcttcattcccactaccagttaaactcatcctctttctcatatgctgtggcagccatgcaggtgcactgcttagatgtctctctaagaaagaatttcagtttcagggagtgcagttagctgacaacctccagttgttagtaccttcagggcctttaggtttggggttgagaacttgaatttcctgggaaatccacagccagtgatagagcatggcatgggtaataggacatatccattttggctcagtgcaggactcctctaatgggcagtcttgctctgaagcaccctactgggttgaccaagactttgttagatctgcatcaaggtctgaggctttctctgctcagtcctgcttcacagccacttccttcataggtttcaaatctgcatcatggtctgaaagttttcattattttttattttaatcttaatttttttttttttttgaagtggagtctcgctcttgcccaggctggagtgcagtggagcgatcttggttcactgcaacctccacctcctgggtttaagtgattctcctgcatcagcctcctgagtagctgggattacaggcgcccaccaccacacccagataattttgtatttttagtagagactgtgtttcaccatgttggccaggctggtcttgaacccctgacctcaagtgatctgcccgcctcagccwcccaaagtgctgggattacaggcgtgagccaccgcacccagcctggtctgaaagttttctgtgctcagtcctctttcctcccccttttatctttagcagtaaacctcttgtactcccaactctctcatctgcttctcagaggactccaaatgacacatatcacttccactggttatttacctaatttgtctctgaaattgaagtaaggattatttaatttcccttttttaactcccttttgactcctcccagtatttttttaggtcatcaatttcacccacccccagcacctgcatctcctctaatgcccatctgtattagtaaaaggcaccactatttactcagttgcttttacatctttcacatttaagtttgtgacccatcttttggggaagtggggggaatggaggtggtattgtgtgagataggaatcagacaattaaaaaggagtgactttagtaaggcatgaatgaggtcacaggtaatgcgggtcagatcatgtagggctttgttgtaagtcattaataggtcattgaaaggactttagcttctactctgtgtgagatgggggagtcattggaaggttttgagcaaaggagtaatatctgactcactttttaccaggaacattttggctgctctggagaacagacagagggcagataagttggaagcaggaagactagttgggagagtatcacagtaatctaagtacaaggcattggtagcttgcaccaagatgatagcagtgaagttgttaagaattggctcattatctgggggcaagactcaagcaatgtcattttattttgtgaaagctccctaggagtttctggtacacatgagggttgagaatttgtgttaccgtttatacatttttataggaatgcctggacttaagacatatagacatcttcatcagcttaattgaagtgagtagagaagcatagtgattaatagcaagtacttttacatctgaccaaggtttagacccatgctgcttattcactgtgtaactttgagctttatttttctcatctwtaaatgcagttaccggctgggcgcagtggctcacgcctgtaatcccagcactttgggaggctgaggcgggcagatcatgaagtcaagagatggagaccatcctggccaacatggtgaaaccctgtctctactaaaaatacaaaaaattagctgggcgtggtggtgcgcacctgtagtctagctactcaggaggctgaggcaggaaaatcgcttgaacctgggaggtggaggttgcagtgagccgagcgagatcgcaccactgcagtccaacctggtgacagagcgcgactccatctcaaaaaaaaaaaaaaatgcagatacctactttgtaggtatatttgttatgattaaatgaaccaatgtgaattaaatgagctagtatctgacatattcatacttaaaaagtagtagcttaaagaaatctgacacatgagatgataaaagtgttaggattgataatgctcagtgttgttgagggtgtggaggaataggtcccactgttggtgagaatgtatacaaagggcggttcaggaatatctatcaaaatttcaattttcttgacccactaattctccttctagaaattttatttgtggaagcattcacacctatgttcagatattcagtgcagcatcttttaatggcaaacagttggaaataatactcctaataaaggaataaattgtgatatattcatttatggaatgctttgtggttatgaaaaataataggtaggtctatacatattgtcatggaaagatcactagtatgtattttagttttttctttaaaaagcaacaccagtatatcatttgagagtacttaacatcctcactatttgaaatctataagattatgttcatttattacttatatggatttttatatgagctcatataaaaggtaggccacaaggccgggcgtggtggctcacgcctgtagtcccagcacttatggaggccaaggtgggcagatcgcctgaggccaggagtttgagatcagcctggccaacatggagaaaccctgtcctctactaaaaatacaaaatttagccagggccaggcrtggtggctcatgcctgtaatcccagcactttgggaggccgaggagggcagaccacttgaggtcaggagttcgagactagcctggccaacatggtgaaaccccgtctctactaaaaatacaaaaattagcccattgtggtggcacgtgcctgtaatcccagctacttgggaggctgaggcaggagaattgcttgaaccccagacacggaggttgtggtgagctgagattgctccactgcactccagcatgggtgacagagcaagactctgtctcaaaaaaaaaaagagctgggcatggtggtgcatgcctgtaatcccagctgctacttgggaggctgaggcatgagaatcgcttgagactctgtctcaaaaaaaaaaaaagaaaagaaaaaatagaaggtaggtcgggcacagtggctcacacctgtaatcccagcatttcagcaggccaaggcaggtggattccctgagcccaggagtttgagaccagccttggcaacatagtgagactctgtctctgttgaaaataaaataaaaggcagtgatagtaatttcataaacaataatacttattaaattattatagtgcccatgttttaacagtattgaatgcctcattataataacattgttttctgtactatatatctgtttttagacatttaaggagctataaattatcttaagataaattatagatgcccccaaggatttctattaggaaatattgaagatgcagtatattgcatagtttctgtctctacttgagtaacaaccagatggatcggtaagatgaaaacagatgaaataaattttttaaaaagtattttatatatgtatatattctgttggtgtgcttctaggaatttgtcctaggcaaataatccaacaagtacataatgacaaatatacaatagtattcattgcagtgtttataataataataataaatggcacataacctaagtgaccatcaataggtattaaataatttatgataaacataatgaaatattatgtaataattaaaaataattatttagctctgtagttattatcagataaaacctacagtctactaagaagggaaaataagtttactacattatatataatatcttctctctacagattgtaagactggagtagttagggaaagtaaggaatagaatagatttggatagacaacatatagaagaggacattttaaatgagcatttcccaacctttttggaatcacatttcttaattttaaaattttatcaatttgcatcgtatatggtaaaaagtggtttttaagtaaaaagtattttatatcagtataatatttaaaactgctttctgaaccaggcacagtagctcatgccggtaatcccatcactttgggagcccgaggtgggtggatcactcgaggccaggatttcgataccagcctgcgcgatatggtgaaaccccgtccctactaaaaatactaaaattagctgggtgtggtgatgcatggctgtaatctcagctacttaggaggctgaggcacaagaatcacttgaacccaggaggcagaggttgcagtgagccaagatcgcatcactgctctatagcttaggtaacagagcgagactgtctcaggaaaaaaaattttgctttatacatttttgttctttgttctacagaatcatttttggctcatagtaaggacactttctaatgattagaactgtttaacagtttaagatttcaggcattgtatgtcactgtgtgaccatttatcatatatgctgaaaataaactttaggtcttacctgatttactgatttactggacttgacaagtagcaaattgatttatggccccgtggacaaagttcattccctgttcctgagggtctgtggaaatctcttgtaaggaaaagtagtgtcattttttttttaatttccaagttataaaattgtatttcacagtgtttaggaatgccataatttgtggcatttttaaggtgyatactttattcccacataggccgaatacatcaagcaatggtaacatctttaaatgaagataatgaaagtgtaactgttgaatggatagaaaatggagatacaaaaggcaaagaggtaagatcactgagtttaattttattcctagtcctgcaatcaagattctgaatataaaayaaaacagaaaagtacataatgttattttatttagtgcatatatttttattattccttgaaaactttcaaatgattaaaaattttcacttaaaggtagattcctcctgtatctcttatgtgattgcacatatcagtcttaattatttgataaaatatactattctttaagtctagctcacacagtttgaaaatgtgctataatatttaattatgtggttctattggtcactgtgttgttagcaattcatagagtcaagactataaaatgatattttaagagagattctttaaatttgtggattataattctaaatctcatttgtaaggctaaggcactgtattcttttttttttgtttttgagacagggtctcactttgtcacccaggctggagtgcagtgtcatgatcatggcttactgcagccttgacctcctgggctcaagtgaccctcccacctgtctccagagtagctgggactacaggtgtgcaccaccacacctggctaatttttgtattttttgtagagatggggtttcaccatgttgcccargctggtctcagactcctgggctcaaatgatccgcccaccttgacctcccaaagtgctaagattacaggcatgagccactgcacccagccgagttactgtattcattargctaaagtaatttaagagttatttacttcatcaatttacttgaaaartaaaaggttaattgtcaaaatatactctcaaaagactatgtgtatgtgttgtgaacagattgacctggagagcatcttttcacttaaccctgaccttgttcctgatgaagaaattgaacccagtccagaaacacctccacctccagcatcctcagccaaagtaaacaaaattgtaaaggttagtgatgaaaattcagagtgcaggacactgggagagagcgggagttgtagatgtgtgtgtgttctagtttgaaattggtaggctttgaagagtttaagaattgattaatttgctttttctgccatcatattcatatatatacatacatattttcaaggattgaggttgtctaattcacaattatgaccatcgttggataaggtcttagaaatttctcacctaattagtatttttcctgagactaagtttctcaggagatatagatcaaaaccatttgcttggtgtttgttgaatgaagacatatgactttgacaaaggcataatagctgtttcttaggaataataactaccaactctgatagtcttttgaaagtataattctgctatttgtttcttaaagaaagatgggaaatgatagtgtagttcacttctatattgactgtcatgatataccttaaaactgtgctaaatcctccctagcagttttatctttataaaaattaaaagcacattattcttctggcttttaaagataattctccttcctttctctcaagacctttcagtattaaatttttgtttcaaaatacaactctttttaaaacaggtagtattgcaaagttgttgaatctgcggttctttgtgttcatctcaacaagcatttgtggttttkttgttgttgttttgcttttttacattgtgccaaatactatgctggacaaaatacaaagatgaatgatgacatggctttcagcctgtaggaacttgatatctttcagggaggacatagataagcatttaaatatagtataatagaagcaacaaaactttgtttcataaactatgcagttgaacctgaggcatattttcaactcatgagtttaatcatattgagagtcaccacttagaggttattagttaccacttatacatggattattttttatattcatcttcaaaatgagggatcttcattggaggatttttgtagtttattcttcctggtatatcattagcaacctttactgtacattagaattacctggaatagattaaatcagtatattttaaaaataaatatttattttaaaaataaggatttattttaattataaataagtatttttaaaagtattaaaaatatttttaaagtattaaaataaatcagtatttttaaaaatactgatttatgggccccactcccagagattcagttttattttacctaaagggagaccctggcatcagtttccttttaatagtactcatctgatttgaatgtgcatccaaggttaagacagctacattatttgatatctttttttgaggtgaataaaaggaagtcttcatgaatgaattagaggaccaaaagtttgctgccttaatctgtacagtgtccaagtcttagaaactcttatgaaacctttttaggataactgacaatgtacattttatagtattctgatatttcagtttaacaaggggttctaagctgtctagaactaatattttataaattaccccctattattcagaaatgatgattaaaacacatattattgtgaagctacttaacctctctttgtttcagtttcctcatcgatgagatgggaatagcagtagtaatgacctcataggttgttgtgaagaaagtccttagatcagtgcctggctcatattaattcctgaatatttttggagggtaggggaaaatatataaaggaacttgaatattgatagcattaatagtaattcattaagattatagtttttcttcattttgttttatattcttacatgtctgcctacttttgtttaattgaaagaagctcagatcatgatacatatgagggagtaaagatagaaaacatartgaacattttttcctttcatagaatcgacggactgtagcttctattaagaatgaccctccttcaagagataatagaggtaaagtaaaaatttatctcttaattttggctattgacttcttagtatgttcctgacaaggtaaatcaaaagtaaacattacccttgatgttggtatttatttaaattttacctggctaattttaagaggtgcttttttgttttgttttgttttttgttttttggttttttttttgagacagggtcttgctctatcacccagtctagagtacattggcatgaacacagctcactacagccttgacctcccagggtcagatgatcctcctgcctcagcctcacatgtagctgggaccacaggcatgagccaccatgcccagctaattttttgattttttagtagagagtctttccatgttgcctgggctggtcttgaactcctgggctcaagtgatcctcctggcttggcctcccaaagtgttgggattacaggcatgagccactgtgcccagcctagtgtcttcttgatctcctaatacaatatgccagtaatactgaaaaatgattttgtccaggtgcggtgactcaggcctgtaatctccacactttgggaggctgaggcgggtggatcacctgaggtcagtagttcaagacccccctggtcaacatggtgaaaccccgtctctactaaaaatacaaaaaattagccaggcatggtggcagtgcctgtaatcccagctacttgggaggctgaggcaggagaattgcttgaacctgggaggcagaggttgcagtaagccaagatcgcacgactgcactccagtctgggcgacagagcgagactccatctccaaaaaaaaaaaaagatttttaaaatgtatgggatgatggctgggaacggtggctcacccctgaaatcccagcactttgagaggccgaggcgggcagataacctgaggtcagaagctcaagaccagcctggccaacatgatgaaactccatctctactaaaaatacaaaaactagccaagtgcagtgacacatacctgtagtctcagctactcgggaggctgaggcaggaggatcgcttgaacccaggaggtggaggttcagtgagccgagattgtgccactgcattccagcctgggcaatagagtgagaccctgtctcaataaataaataaataaataatataataaaataaaatggatgagatgaatatgaaattatgaaatgcaatttttaattcatcttatttactaaataattttgcaaattcgagaagaatattatgagaaagaaaggaatggggaaagagtcaattagttggctgatttcactagctaaagaagttgaacagacataaaaattgtgtagttaactgaagtctcccatatattttcagccaggacatgaaaagcataatgaatttattttctattgttaagtagttcagaattgtcttttctggcagtattatttctctgtgtgtggatggtagaacaggatggacagaagtattaaatgagagattggaagtggagggacagtccttcagtttaaacactatcttttgagtcttatgtaaatttatatttcttttaaaatttgatatttatatttaattttatattcttttttccacttgtataatatccacattgggaaattctctgctgaagatttgcatatttgaggagcaaagagtgggatttggaatatagggagggttgaagctaagtttttactctctgtatatatttgattagtgtacatttttaaaaatgagaaggcatgtaaaatttatattttgccgggtgtggtggctcacgcctttaatcccagcacactgggaggccgaggtgggtggatcacctgaggtgaagagtttgaggccagcctgaccaatatggtgaaacctcgtctctactaaaattacaaaaatgagccaggtgtagtggcgtgcgcctgtagtctcagctactcgggaggctgaggcaggagatcacttgaacctgggaggcggaggtcacagtgagccgagattgcaccactgcactccaacctgggcaacagagcgagacttcatctcaaaaaaaaaaaaaaaaattatattttacacacatattttaggaggatttctttgcagtttaaagttttaagacgtggagcggtttatatatacatatatattttgttttcacatatatattttaaaggattattaaaaaacaagcttggctttggcttttatgtaaattatttagattgaattttgtagctaaaattacattggtgaaagctaagtctgcacgtattactttgaaagcctcttttagcttatgtcagtttattgaacagaattattataaactatattatattttacatacataaatagaaaacctggcaacttactaatgtaacttttaagtatcaggttttgggggctatctcttccttttactaaggttagcttttactaattttctatcctgaatttaaaattttttttttttacttacagtggttggttcagcacgtgcacggcccagtcaatttcctgaacagtcttcctctgcacaacagaatggtagtgtttcagatatatctccagttcaagctgcaaaaaaggaatttggacccccttgtatgtaaattatgtatcaaggatttagtcattttaggcatacatgtattctctcttggtcatccttttaagtcctcaaaragtaaacactctaaatacaagcttgattgcagatttcattttaccactgtggaaaatttaacttcttcttattagtctgttaattgggttttttaaagtatattttggarcaaaaatttktttgtgaaattatagcaatgtttcagtttgagtttaaaattctgggcagatgataatttgtcagatgttacagaagaatgtgttgggctccttgattctttgaattaaaaagtctgtgtttctaaaccaagagatgacatgtatcaatatgtttgagtcatttttctggactctcatctgtacattgtcctattttagttttggtaaagcagctcattaagtaaagctcacgtagttgttataggcatgctttgtcactgtgtaccttttatgtgtgtgtggtgaagttatacataaaaaaagtttaatattagtactctaaaaaagaaaactatacttctacagctcatcttttcttttcagcacgtagaaaatctaattgtgtgaaagaagtagaaaaactgcaagaaaaacgagagaaaaggagattgcaacagcaagaacttagagaaaaaagagcccaggttcgtaacataaacatatattttgtttatgtaccaaccagagattagattatatcagtgaaggtgattgatgtgaacaaaataattaaggcattttttttgaagaattttaagaattccttaaattgatattgaggaataatawaaactcttgtgcaaataagttaccgtaacacatttttactgcattgttcttttcatgttttattggtatgtgttaacgctaaaatttgttccattaagaaaaagccattgtgttacagaattctaatgtgtatggtgtaacatttaagaatttttattttaaaaagacctaaaaatacattgggaaaaatacccagttaaagtgcatgattaaactataaattttattattgtttttctatggttagtaagttcacatgtcttagtgaaaggggggaaattccttggattttcatttatgccacatatgaagagtggatctctattgtgtccccctcagggtcccttcagatggtagcaagactgtttaatagcagtgggaaaattgcatagaaaactggtcttttactcttctacaggtctttacatattagacattttgttattatacataactgcaccattgtgcttgtatggcatctattacattttcagaactacttttctctaataaaacatcaagattatttatttaatagtatgttcaaatgcccttaatcatgttaaactaccagttcagatgttgtgttgtggaattgtggacctagtattatatccaacctgaatgaatcagcttttatctgaaagtgacctgagaatgaccagttgggttttgaaatgaataataaaacatattatctactaatacttagcatagatgccacctggtgtttcctgtgggtacttcataatacttacacatctctctgtgatctcttaattctcacttcacagtctgcttctcagttgacataggtggtattatttcctagaagaaggttaattgaaagtaagtttcagtaacagtttgtaatttagttgcattcaaaacaaatctgaatatgatgtataaaaaaatgtgacttcttagaatgattaataatttattgttcaaggctaggaaagactgttgactattgctatttgtatcttaatctgaatttctgttttgaagccaaataaattgtagttggcattcaaaaatttgaattttaaagtttttttaaaatgatcttggcttctgattcctttaagttctatgttctgttgatttggggcagttttgtcattacttagtattttttagaaggtcagcaaaaatagaaaatgaagacaaatgaatctgtatttatactttgctgaaacactggattaaattagaagatgaatctgattaaatgaattttcctagaatttcagcttttctagagttatttgccagtggtaacatgagcattatttctctgttgctgcattttataggataattaaggtatatgtataacagatggatttttgaaataggtgaagggtaacttcaatgaagagtccttaatttggagttaacagaatgcataccgactaagagaattgtgtttgtaaaacacaattttacaaacacaaagtggttcagagcttattatgaaaccacaactrtgaaactatataatatcgtcagtttaagtttaggcttggttatgacaaatggcacaatttaattttaattttcaaaccaaatataaatgtaacaaatacattattatatttataatggtgaattctctctgtcttctaataggacgttgatgctacaaacccaaattatgaaattatgtgtatgatcagagactttagaggaagtttggattatagaccattaacaacagcagatcctgtaagattctttgtaaaccattattctggaactttttatgcttcaaataaaaacgtgtttgacacttgctaaattcatattgtgttcagctatgtagtttttcctttccttktgggtgctcattccccatattttaagaagaaaatcaagaaattatccacattaaygcttattttccataatttggtatatgagatatgctccctatagagatrtccttctcgaagcaaaacctccctgtctttgggagggcaaagcaacacttaaaggagtgatagcagaagactcactttcctttctgactgtgagttatactttgatctcagttccaagcttatctttgtcttgggctgtagatcccaccatcatttctaatttactattggtaatttgttagttttaaatgttattctggcttttaacaataagtgatggttgttgagggctgcagtggaccagaaatctagaactggaaaaaatcctctgctgttattactcaactcctttgctgttgatgaatgagaattcattggacagggagtgcctttttttttttttttttgagatggagtcttgctccatcgcccaggctagagtgcaatggtgtgatctccgcctcccagttcaagcgattctcctgtctcagcttcccaagtagctgggactacaggcgcctgccaccacgcccggctaatttttgtatttttagtagaaacggggttcacctttttggtcaggctggtctcgaactcctgacctcaggtgatccacccgcctcggtctcccaaagtgggaggcctgtaatcatgcctgggattataggcgtgagccaccacgcccagccgggaatgcttttataactaatttgtacttataaaaataatmcatctgacatagcatatacagaatgtgttagttacaaaaaagacatttgtgttagatagatgtattatatagaattgaatagaattgttgataatacttgtatcccacatattttaggccttgctattccttcatgtgtttcacttactgcattagagctcaccctttaggacaggaattggcaaacattttctgcaagggtctttggctttggagctatatggtctttgtcacaactactgaactctgtcattgtattgtaaaagcagccatagacaatacataaatgatgggtatgacatttgtttcaatcaatgtgtgtcagtaaaattttgcagaagcaggtagtagctaaattagacccacaggccatactgtgctaatccttgctttatgttaattattattaaaatgaggcatgtattgggaacaaaatttttataaaaaatacttatgcataagaattggcatatttataaaatagttcaaattatttggctcagtaatcgtctgagaatcctgtttcttgccatagttatctttgctagcaactttccctatgatcaacctatgaaaatatgtcacttagtagaatagaaatgttgacttttgttgtgtatagcacatcttgaagtggataatacagctttttttttttttttttggagacacagtcttctctgttgcccaggctgaggtggagtggcaggatctcggctcactacaacctccacctccagggttcaggcaattctcgtgcctcagccacctgagtagctggaattacaggcatgcaccaccatgcccagctagtttttatatttttagtagtgatggagttttaccatgttggccaggctggtcttgaactcctgacctcaagtgatccacccaccttagcctcccaaagtgctgggattacccaccatgcctggcatcacaacttctttttttttttggtccagagataaagtctcactgtcacccaggctggtgggcagaggcataatctcggcccrctgcaacctccacctcccaggttcaagtgattctcccacatcagcctcccgagtagctgggactacaggcatgcaccaccactcccggctaatttttatatttttagtagaaatggggtttctccatgttggccaggctagtctcaaactcctgacctcaggtgatctgcccaccttagcctcccaaagtgctgggattataggaatgagccatcatgcccggcctcctcacagcttcttaatgtgaacttaatgctastaacaatagtagtaccctctacagaattatttcctaaagtgatggttttccaaataacaaaataagcaagtttccattacactcagaattttagaagtaattatatctgacaaccattaaaatttgtgcaaagctaatttgttttttaagcttacctatcatttatgctrtgtataaatttctaaaacccctggaggaaatattacataatttacgttttagtgttttacatgacactaataatcactgaaataaaatactttttatttctagattgatgaacataggatatgtgtgtgtgtaagaaaacgaccactcaataaaaaaggtatggcacttaatgagctctaataaaagattgattttatcttatttgtaatgtatttttataatagcaaatcaaattggtttggaaaaaatgtaaatcatttcctttgatttgtatgtaaccattatgcagatttctatggctaaacttgtcagtttgttattgctctgaatcattgccattcygagtcttgcttcacagaaatcttgattttgtttttactttgctgttgaaatattttgtcttagtgagttgcatttttatgggatattatctttatatgtacagaacttactacttgtatcttagttcttactacttaaaataattttgtacatgaactcaaatgctgtgaaaattattgggcattgattttcatttattcttttagaaactcaaatgaaagatcttgatgtaatcacaattcctagtaaagatgttgtgatggtacatgaaccaaaacaaaaagtagatttaacaaggtacctagaaaaccaaacatttcgttttgattatgcctttgatgactcagctcctaatgaaatggtttacaggtaggtaaattcattttaaatcagaattttgttcttatgccatgtggtcatcagcaccttsaaatttacattgattgtgggatatttcttaagaggtgcaatatgctgttttattctgagtttaaacaaagagaatgtaataaatgctgtaatgaatattaacacttgttctctgtaatgctccccaaaatcatagtttccattactatttgctaattagcttattacacatatatatacatatatatacatatcacacaaaccatgtatatggataagaaatttcgggaaaatgttaacattacctctaggaataggatatgataagaagacttttaatttttaccttttaatctctgtactaataaagaaacttgaaatgtttgtttgaggcatggtcttgctctgttgcccaggctggagtgcagtggcacgatcacagctcactgcagcctcgaccttccaggctcaggtgatcctcccatctcagcctcctgagtagctgggaccacaggcatgcaccaccacacccagctaatttttgtactttttgtagagttgaggtttcgccatgttgcccaggctaacctcagactcctgagctcaagtgatctgcccgccttggcttcccaaagtgctgggattacaggcatgagccactgttatgcctggccaaaatacctgttatcagttaattattaatttatctaaatctgtatttagtatgtattgtcacttaaggcgaaaaagttccgtacttgtatttaaatttgtcatctttaagcttggagatagttttagtacatgagattcttgtatgttttctgtattcaacttaaaaataattcaaatttatctgtgttatacattggtatctcaaatttttatgccagatttagattttcatacgtaagtttgcaaacattcatttctaataattataacaccagttttagcagtattgttattttggtttatctaggaatattactgtctttgtaattgcttgaatactatatctgattgccctttttcataaaaatgcctagaaaggaaaaaattagagttaatgagactaagaattgaaggtgttacaaaggaaatacttttgagaccaactctttttgtcttcaccaagtgtactgggtagtcagttgtaaaaaaaaaaaggatcaaattaaaggacatatgaatactagatagagatatttgtgaagaatatgtttaaaggggaatcataattgttaattgtagaatttttttttagctttctgaagagtccacttttccttttcattccctctttctactcctgcctcataaaatataagtttgacttttataatagtttttaagaaattattacaaatacaggcatgtttctgtgtgtatgatttagtaaacattgtgtttttaccctatgtttatgtttcttaactttatcaatatttatccttctcctctatctcttatacttaactattatggattgaggagttacatgtttttttgtgggtagggttgggaggtaggggtttgatctacttagcaggctcatccctagttctgtttgaccagaactttttcctgctccttttgttctgtactttcttcagttttgccttttacaaaacaaaacaaagacagcagttatataaaatgttctacttgtagatctgttttccatctttttttktttttgtttttttgaggctgagttttgctcttgtcgcccaggctggartgcagtggcatgatctcggctcactgcaacctcygcctcccagttcaagcgattctcctgcctcagcctcctgagtagctgggattacaggcgtgtgccaccacgttcagctaattttgtatttttagtagagacggggtttcaccatgttggtcaggccrgtctcgaactcctgacctcaagtgatccacccacctcagcctcccaaagtgttgggattacaggcatgagccaccacgcctggcctccatcatactttttagtgtactgctcaggggaaaagtacttcttataccttcccacctttttattttaactctagcagtgggttataccaatacatttgaaatataattcaaggccgggtgcggtggctcatgcctgtaatcccagcactttgggaggccaaggcgggcagatcgcctgtggtcaggagtttgagaccagcctgaccaacgtggtgaaaccacgtctctactaaaaatacagaaattagctgggtgtggtggcaggtgcctgtaatcccagctactcgggaggctgaggcaggagaatcacttgaacccgggaggcggaggttgcagtgagctgagatcgcgccatttgcactccagcctgggggacgagaacgagacttcgtctcaaaaaaaaaaaaatgtaattcaaaccataatatttaggtatccttttcctaaattgagagtgtcaacttactaatagaattcattttcctacaagcacaatttatattctttttgcttaagtataaattacttgtctaaattcaaggtaatcaacatttttctatttatttagatggtctatagataatatttttgcagtttttttcctctattaactttttaaaattgagattaccactcttgtttattctgtttctgttgaaattataatactttgtgtttgtttttattgtatatgccttattgtgaccattatttattatggaaatattgcttgaaattatgctttaagtagtttaagtaattttagcatatgatatttaaaattcttaaatcaattcttcratattgttatttaaaatttttaacaaagatttgtttagaatcttgctattaagttttatttattaataaaatactttgtattactcagcattactattattcatcaaaatattggtgacacattctgactgatgcattttatttttaaggtttactgctagaccactagtggaaactatatttgaaaggggaatggctacatgctttgcttatgggcagactggaagtggaaaaactcatgtaagtaatttattaaagttacattctggtacgaagctacagtttcttttccttatagcttaattctgygaactaaattcttaagagttattcctgagtaatgtctgttctttattttctttttaaaatatagactatgggtggtgacttttcaggaaagaaccaagattgttctaaaggaatttatgcattagcaggtaactgtcctttttccatawaatttggaatattcttctgtggtattattcaggtaactttgaaataaggctttaaaatattgttcagcaactataatgctatattaactgtctattatgtcaattataggttattagattgcttgaaaagaactataagattatatattcacaataattttttttttttttaagaagacaagaactgtaggctgggygtggtggttcaygcctgtaatccctgcactttgggaggccaaggtgggtggatcacttgaggtcaggagttcgagaccagcctggccaacatggtgaaactccatctctactaaaaatacaaaaaaaaacttagccaggcgtggtggcgggcgcctgtaatcccagctactcrggaggctgaggcagaattgtttgatcatttgaacccaggaagcagaggttgcagtgagccaagatcatgccactacacttcagcctgggcaacagaccaagaccccatctcaaaaaaaaaaaaaagaactgtaagattgattttgagggggcagaaatcttgattatatttgtcagtgcattctagcacattgttggagatgagtctcarttgttgaatttctgaactgtaaaaagctactagctatggtataagaataacctcattatgaccacctataattttatgctatttataaatataaatattaatatatataaataaaagtagcacccttttatggcatatgaaagagaatagcttctattaatactattttttgtaaaattaatattcactttctcatttttattattgatactgttatcctaggtaaagagtaactgattcctctagaaatagaaaatttgagttgctttttaaaaatatttgttggatctcaattttctgtatatgaaatttttgacagctcgagatgtctttttaatgctaaagaagccaaactataagaagctagaacttcaagtatatgcaaccttctttgaaatttatagtggaaaggtaagtgggaacttttttaattttaattttttaaaatatatatataacataacatttgccattttaaccatttttaagttcagtggcattaaatatattcacattgttgtgcagcgtttaccaccataatttatgtgtatttagaacttttatattagaatttatgttatgagatttttttaaaaagtcctttgaaacttttcaacttcagtgttgagaattcttattccaattattattttaatctctgaaataattcttaaactctgggtgactcatwtttatagaactgatattttaattgccacaggatctcgctgtgtcacccatgctggagtgcagtggcatgatcacagctaactgtagcttcaatctcctgagctcaagtgagcttcccgcctcagctttcctagtagctgcgactataggcatgcaccaccatgcccagctaatttgttttatttttagcagagacaaggtctcactatgttgcccaggctggttttgaactcctgagctcaagccatcctcctgcctcagcctcccaaaatgctgggattacaggcgtgagccattgcacctagcctgttttttactttaaagctagttttctaatttgaatatggtttttcataggtgtttgacttgctaaacaggaaaacaaaattaagagttctagaagatggaaaacagcaggttcaagtggtgggattacaggaacgggaggtcaaatgtgttgaagatgtactgaaactcattgacataggcaacagttgcaggtaaatctcattttgattaagaaaggaaacatcagttttagaaactttgggtacagtataacaaaatgaggatgttatctrtcaatacatcttggaagtaaaaatcattgttcataaaaacttgtgttacatgtaaatgtgagtgacaattattatattgatactacattacaaatatattagaaatatgcyggattaaattgtatgaatctggttctatttaagtgttataactcagtgtctcatctgtatttaaaagatgaaaactagctaaatcgatgtttttgctgctgttgtttttaatgaaaataatgtggtttgaacatgtaaattsaagtttttaatgtatcaagatgtccttaatcacattgtagaacatccggtcaaacatctgcaaatgcacattcatctcggagccatgcagtgtttcagattattcttagaaggaaaggaaaactacatggcaaattttctctcattgatttggctggaaatgaaagaggagctgatacttccagtgcggacaggcaaactaggcttgaaggtgctgaaattaataaaagccttttagcactcaaggtaaataaaatgtattttatcatgaaaggtcttttacttttgactttaattttctttactcagttgcaaaatagtagtacttgttttacctaataaaaagaggttttcaaaattcagatgcttgtaatgtatagtgtgattttattatacccagattttttccttgcacacattctttattctttttagatgggataaaggatatgtgagttagtaggtcagttctggggctacataggtaaactccagaggttttttttttttttgagactgtgtcttgctctttcgcccaggctggagtgcagtgacacaatctcggctcaccgcaacctccacctcctgggttcaagccattctcctgcctcagcctctccaggagctgggattacaggcacgcaccaccacacccagctaatttttgtatttttagtagatatggggtttcaccatgttggctaggctggtcttgaacttctgacctcgtgatctacccacctcagccttccaaagtgctgggattacaggcgtgagccaccgcgcccggcccagagggtcttaattagtcatattttctaggaggagggcaacgaaccactgaattgagctaagaaacagtttctcagaaaaaygtggaatggctttcaaaatgttaggccaggttattacatcttttccttgagtagaamascaaaggttggaaagactaaaataaggcattctgtgtttttttcttttggagtgccatgttaagaaattaactttttacagttatcctactgcctgtcactttcaaacactagtcatagtttccagaaatatctgttggaagaataaagtaggtttttttgctgtcattttttattttcttgaattagcatttatgggaacatctacactatgctttaaaactgttggccaggcgcagtggctcacgtctgtaatcccagcactttgggaggccgaggcgggtggatcccctgaggtcaggagttcgataccagcctggtcagcatggtgaaaccccatctctactaaaaataaaaaacagccagtcgtggtagcaggcgcctgttatcccagctacttgggaggctggggtaggagaatcgcctgaagcctggagacaaaggttgtagtgagccaagattgcgccaccacaccccagcctgggtgacagagcgagactttgtctcaaaaaaaaaataaaactgttagtagaattttcaaaactgatcagacccttaaatgttcaagttgtagtaagagaccttttaaaatatgttaattaagattatcctttataagaaagactaatctgtgagacttgttttcttaattttcaggagtgcatcagagccttaggtagaaataaacctcatactcctttccgtgcaagtaaactcactcaggtgttaagagattctttcataggtgaaaactctcgtacctgcatggtaagtttatgtttattttttgtttgttttattttaatcctaaaggaataactacacaatatttatggaaaatgtatttgttagtgacaattatttgaatccttctattttgagtgatatggtgatatttaagatgtggtccctgccactctgatagagaggattatattgcagttatataattccagcatctaggtgttattgagggctggtctttcttgattttctttttctttttctttttctctttctctttctttctttttgagtataggtcacacttttctttatggtcatatgtctggtaatttggggttatatcatgtgcattatgaatgaacatagagactggattctgttatgttcttctgaagattattggttttttgtatagcagaaatttaactaaacttgctccaaactcttatctcccctgggcaacaactggaattgaaagctttgtttagtcctttcagatttagctatgttgcttatagtttgccttgtataatatatgtctaggtctggaatcagctagggatttgggcagtttgtatataaaagtttgtcccagaagggagagtaccacactctctgcagcactttcccttctgggacaaacttcacttttccagctgctatgaactccactcccaaactatatcctttcatttctttaccagagagactgcaagttttcagtcaagttttagttgccctgtgtgacagcagcaaagcttgccctctgtcaaaragctgtttaaaaaaaaaaaagtcaggtggagtgggggtcagtcagtactattcccttccaggtattaacctcctccatttcagctggagtttgattgttttctagtgccttcagagtttgtattttaactagactttatctgattatagatatgataacaaataatcttggagttgagatatcattaataagtctttatttttaaataaccatggtaagattagacctaaatgagctgtatgtcagtattattgtcttgatcatttataacattttgtttacctttgcattttttttttcctgtagattgccacaatctctccaggaatggcatcctgtgaaaatactcttaatacattaagatatgcaaataggtatgagagatagttctccattttgaaatttgaggggagtacagcagtacatagtataatttaatatctgcctcgtgcggtggctcacgcctgtaatcctagcactttgggaggcccaggygggcggatcacaaggtcaggagatcgarattatcctggctaacatggtgaaaccccgtctctactaaaaatacaaaaaattagccaggcatggtggtgggtgcctgtagtcccagctactcgggargctgaggcaggagaatggcctgaacccgggaggcagagcttgcagtgagccgagatcacgccactgcactccagcctgggcaacagagtgagactccgtctcaaaaaaaaaaaaaaaattaatatttgatagggtaaatcttactacattgttctttcaattttcaagaaaaaaatgttttgcatattattccttaagatgacaatatagaatcattttgtcaaattctaaaaataagtggaaatgggtaatttgggaagggattgataactttagtaaagttggtctttttatcctagaacaaggtttccatttcactgttttatttcctaatattttactgcatttaaatcatgcaaattcttcttattacattaagactctgaagtaaatgaatgtcaggggccagtttgtatttcttgaattgttttggtatatgttgcatattattcctgataatattaaatgctctatatggggaatctaggatttgagtaagaagtgatagcacagttctttctggtgttttttttgttttttgttttggtttttttttgagacagagtcttgttctgtcactcaggctggagtgcagtggtgtgatctcagctcactgcaacctccacttcctgagttcaagcgattttcctgcctcagccccctgggtagctgggaccataggcgtgtaccaccatacccggctaatttttgtatttttagtagaggcagggtttcactatgttgkctaggctggtctcgaactcctgacctcaggtgatccacctgcctcggcctcccaaagtgctaggattacaggcgtgagccaccccgcctggccctttctggtgttctatatgggttacattttgttattcatattaatagtcttataaacattataaacattataactgggtttttacagatagaaggacagaatgcattacagactactaaagcagtttattctgtatagtcatgaaatgcctttggaactttgaattataatgggcatatttatatttgatccatagatttttttttcccactgctcttgagtgactttatttaccactgctcttattttgaatgactgtttagtgttaaatttctcttctcaaatgttaaatttgtgattttaacctagagacaaaattcctctttgtaatccatttctagtatagcagttctcttaattcaagtatagcagttctcttaattttgctggataaaagtatctgtcctatatctttgttttaatcactatggaaatgttattttttaatcttttattaaaatgtaaaatacttatgcatatagaaaagtacctaaagtataagtgattaattaaatggataatggatacttataaagtraaaactcctgtcattggtttgggaaatagagcattattgkccccccaaaaggttccccatgtgctccttcctgttcacaaatcctgaataacatgccttattcatctrtctctaccctgatgtaacccatggattaacttctgtggaatacttttcttgtttttttttttcctctttttaaaaataattttactatgaatctatttctgagtaacataggtagctgatttgaacattacacaatggtattataaccccccgggttttttttgcatcttgtttctaaagggattttcttaatggtagtaaacactgttggacaatatcaacctattgagcttttgcaaaaaaagtgattaaaatataatcacttctttaaaaatgtaatagggccaggcgcggtggcttacacctttaatcccagtgcttttggtggcccaggcgggtggattgcttgagcccagaaattcgagaccagtctgggcaacatagcaaaaccccgtctctataaaaaatacaaaaattagcctggcatggtggcatgcatctgtagtcccagccacttggggggctgaggtgagaggattgcttgaacctggaatgttgagtctacagtgagttgtaattgcaccactgcactctagcctgggcaacagagcaagaccttgtcttaaaaaaaaaaaaagtaatagaactacatttctaagtatgaactattatattttgtaaatttaatccctttaaagtttgaattatgagctcctagctgcaaatccttattgtgttagttttaattgatcttggtaattaacgtttttgatatgtgggatttttatcattaatttaaaatgtttcttatttcagaataattcttgagaaagatgaggaacagcctagtgtaatagattcttgccatgttgtagaattaaaacaaacaaaacccctctgtttcttaagatttgaaactacaaaagattcctccctaatattgtgaaaatgctatatctagctgttcctctagttcacttaggtcaaagtaaaatgttttaacctactgttatatcatgtaactcacttgcaacatgactaaccatctgggacactgtattaatcggttctcacactgctacaaaggaatacccgagactgggtaatttatgaaggtttaattgactcacagttcagcatggccacagaggcttcaggaaacttacagtcatggtggaaggtgaaggggaagcaaggcaccttcaccaggcagcaggaaggagaagtgccaagcaaactggggaagagcctcctataaaaccattagatcttgtgagaactcactatcacgagaacagcctggaggaagttgcccccatgattcagttacctccacstggtctctcccttgacacttggagattatggaaattataatttaagatgagatttgagtggggacagaaagcctaaccatatcagacacataattgtttcaattttatttccaaatctctaggaataaagatttttaaccttccttgatactcataccaatgttttgtgaccttaagagtcagtaatttttttttttttaacagccaaaaataattcattcctcctttatactaaatctgccttattttttttaggccaatactttgaggtggtgggtaggtggcattacattaaaatttcatatttttaggaaactatttctgtcttaagtgtttaaactttttttgtatttaagacatagcttagtgattgaagtgttatttctcaggacaaaataggtttaataacttccttactacttaatggtatcaaagcctcgggaaagttacttaacctctctctgtctttatttcctcatctttagaatagacagctaatgaccatgtccatcttaaaggattgtttttgaggactaaaagaagtgatctgtgtaaaatgtttagcacagtacctgggatatattaataggaatagttatccctattgctactttagtgagcagttctgtctaaaaaattcrgttagacagatgtgaaagcaatgttttttcatatccttatattagaatcatatactttgaaagttttatatgggaattgtgggatagtttgtaacagtacacattgctgctaagtgattaagttgacaagtctagttcatcagatgacaattagagatactttatttatttatttatttatttaagatggagtcttgctatgtcacccaggctggagtgcagtggcacaatctcagctcactgcagcctctgactccggggttcaagcgattctcctgcctcagcctcccgagtagctgggattacaggcgcccgtcaccacgcccagctaatttttttgtattttttagtagagatggagtttcaccatgttggccaggctggtctcgaactcctgaccttaagtgatctgcccgcctcagcctctgaaagtactgggattacagcataagccactgcacccagccagacaattagagatattttagaggagagtacaagggaaaactttcagagtggaaggaatggttgtcycaaggaaaaaaaatttataggatatatgagaaatagacagtggcctctatcctgaagcagagatacttaatctttgggtaatggaagaggttagagtgattgggtcttgggtagaagagtgattagagtgattaggagtttttagtaacatgtttgaagaatgtgattcttgtatgtagtatagtctggcttgggcaagagggctttggatagaggaaaaaatgtgtggatgaagctaatagggtgtctaaattaaaagatttagataagaaatggggtgggagtgaaaatagttgtttgtattagaaatttagatttttcaggccagacgctgtagctcatgcttgtaatcccagtactttgggaggccgaggcaggaggatcacttgagtccaggagtttgagaccagcctgagcaacctaacgagacctcatctctacaaaaaaataaaaaattagccgggggtggtggcacaccagtgatagtcccagctgaggtgggaggatcacttgagcaggaggtcaaggctgcaatgagccatgactgagccactgcagtatagcctgggtgatatggtgagaccttatctcaaaaaggaaaaaaaacatatttagatttttcagcatgtgtggtaaataaactttaaggataaaaggcagatgaatccaatattgaacctttgacagtagatattaaccaataggtcaaagaaagactgttagtagaggaaacatattagtttgatttatatgaagatattgatacttgtttttgacctaaaaagaagggaatttcatttagttcaacctaagagaaatgacaagaaaatcagagaatatggttattatattgaagtgtttaaataacataggctttgtactcagggctaggttttaacctcagttatgccacattctcagtgaatgaccttagagaagatactttatttctgagtcatttttctcatctataaaatcaaagatggttgaaggactaaataatataatgcctaaaaatgactaatcctaatacctgacatacaggaggtacttaataaatattttatatgggtatgaaatagggttggcccaaaagagacataaggaattacatagatggggtgagaaaagtcataatttggttaaatataactattgaagatgttagcaaaagcaatttaaatttcattgctaaaggctgttctcaaccagagttcttcatctgaatcaccaaccactgaaaatagagtgaatattttctcagttataccaaggacatttcacagctaatgccattctggatgcataggaaagaagttaattcattacaaacaatggatgccttaagacattaggacttaattcccttgtgtcctgtttggaaaagactgcaaaaatgttgaagactcatgaatgctaataaacaaatagtcatggtactgactacatgaagaaattagattgagtggtcatgtagttaggggggcatttcagatttaagtgacttagttaaacttctaggaaggattatgagaaaagaggaaaatacaccagaaaggaaagacttaggactatagagcaggggatcaatagaacaaagatgttcaaaaacctcttaaaatttgttatttgtaaaataatattctaaatacattgtcacaacaatatcaatatccttttctaaacaaaagtgaatactaaatgaaaatgtgcaatgtgcattgctgtctttcaagagcattttcttttaatttgttgctcttttggtgctgcagagtaaaggagtttggaattagtccatcagacattcccttctcacagggtagtggcagtcgccctgatctctctccttcttatgaatatgacgacttttctccttcagttaccaggtctacttcattctatacataagatgtttatttgtatactttcttttgaattgtgctttgtataaacatttcatttgctatttttgtcctgagccattttagttttcattgtcatttcatttggcaggtggtggttgtactgcatgatctgcattcttacatcttttattaatttgtttgctttaaaatgttgatttagaattcaggcttcctatttccccctcatatttttaaggatgatgtcacttttgcatacttaccattaaaattaccatacttaccatcgaattgttaaaagataaattatcttgcttaaaatgaagagattgcctttatgctgtatgatcttataagtttccttgtctgcaaggagcctcttgacatagaaagtttaccctcttttggccgggcgtggtggctcacacctgtaatcccagcactttgggaggcggaggctggtggatcacctgaggttgagaattccagaccaacctggccaagtggtgaaaaaaaaaaaaaattttttttaaagtaaggaaagtttaccctttcccaaatgtgtaagtttaaatataatgagtaaacacttttcaaatgataaaacttaaaatcttataatctttatacattataaataaaattattttacatgtagctattttaattgagcatgataactaccagaaatctgcagggtttttttgttttgtttcagcagtgatccatttattggtctaattgttattgtttacatttttctgttcatataatttaattgcaataacatcaactttgatgagccagtagtaaataaaatggaaaatttaaaaaattttttaaatcataacaagtttttttctttgaatactgaatctacatactgttctcatttaatttrcacaataattatatttgatataatataatatgaattatataaagttacctaagcagatttcctaaaactaaacaaccacttaagtgtttctacagatttcagataaattttacctataaaggtgacatcatcaatcttagtatgttaactgaattgcgtgtatattgaataggctggtattttctcgttcctctgcatgagtgtttttaactttagatacctcttatgtatttatagggtcaaagaattgactgtagatccaactgctgctggtgatgttcgtccaataatgcaccatccaccaaaccagattgatgacttagagasacagtggggtgtggggagttcccctcagagagatgatctaaaacttctttgtgaacaaaatgtgagtgtactatggttgtaaatgttataatcttagttcatttcatcagtagcagaacttaactgaaaactatcatttaaatgargtgtcaggctgtgggtgtggtggctcaagcttgtaatctcaccaatttgggaggctgagtgagaggactgcttgaggccaggagttcaagaccagcctggacaatttaatgagaccctttctctacaaaaaatttaaaaatcatccagatgtgktggtatacacctgtaagtctagctactaggcaggctgaggtgggaggattgcttgagcacaggaattctgggctgtagtggactgtcatagcatcactgcactctagcctaggtracagagcgagaccttgtctcttaaaataaatgagtaaataagtcaggggtcagcaaactacagcctgtgggccagccatctatttttacaaataaagttttattggaacatatccatgtttattctcttaagtgttgtctggctgctttcttacctaccataacagcagtaacagagactgtttggctcataaacccaaaacatgtattatctggccctttaaggaagtttccaactcccaatctaaaccattcatttttttcccttagatttttgtctgatattaaaatttgggaaaaatttaaagtaatayagggaaaaacaacttccaactcccaatctaaaccattcatttttttccctcagatttttgtctgctattaaaatttgggaaaaatttaaagtaatataggggaaaacaactttaaaaattacacatataataaatattataaagcttaaaaacaagccaggcgcggtgtctcacgcctgtaatccgaggccgaggtgggcggatcacttaaggtcaggagttcaagaccagcctggccaacrtggtaaaacctgtgtctactaactacaaaaattagctgagcatggtggcacacgcctgtagtcccagctactcaggaggctgagggatgaaaatcgcttgaaactgggaggtggaggttgcagtgagctgagatcccaccactgcactccagtctgggcatcagagtgagactccatctcaaaaaaaattttttaaagcttagaaacaaaagaactgtggacatatgcatctatattgaaaggatgtatgcactatattaaaatcaaacagcaaaatactaacatttgttaaatctgattgcttttctgtatgattaaaatttttaatgatactttataatttaaatttttgatttcccaattataaaaataaatacatgcccattgtataaggatagaaagagataaagaaataaaaaggtatatataatacactttcacataattgcttttaatgtattgagagggttcttttctgtgtgtgagatgtaaaggtgtgtttttaaaatgcatattctgcatagtttggtgtcattctattcccactaagtcttatcatggcattttctcatcatgttaagttagcattgattagttgcttactacatgacatacattgctaagcattttatttattatctgatctcattatcacaactcattgtagtgggtactataattatccctactttataactgatattctgaggtttaaataatttgaccaagattttacaagtagtaagtactgaagccaggattgaaatttagatcttattccagcgccaaaccttgtatcaattaaactcattgcttcctgcaatacagtattctttgtaaacaatgttagttagttctaatactttgtagcagatacttagcccaaaatattctagagtaacagatacacttactactttttgttaccatgttccaaatcactgttactaaagcagggcttaaagcagtggtccttaactaggagcagtttggcccccaaagcaaaatgtatggatattttgcttgtcacaactaaggtgatgctgctagcatatagtgggtagagccaggaatgctgctgaacatcatacagtgcacaggagtgtccccctcaccttatccccatacaatgtcagtagttccaagactggaaaaacctggttcaaactaagagttctaaactttgaaccataaaaactaaaaatgagattctggcctcagtccatcacttatgtccagaatttttaagagagactgtagttgcttttagactctttaaagtaaaccctgcattgcatctagatatgttacctcccaaagatgtggaaaaccagagcaagataagtactccctatacatatctttccattttattattgcatctattgggcctctgtagagccttaatttggagaggttagatgaccagaactaatccaggggagtatgacatcatgagtttttacagcctccatgtttgagagagtgtgcatttctgtcacctttgccacacccagggaattatcttgccatgactcagcattagcctttagttaagtattggtgcgtgtgtacatattattattgctatattgtcttaacaaagtagattaaaatggaacagcatctaagacacgctctagagatcggagaagttttttttgkttgtttgtttgtttgtttgtttttttgaggtggaatcttgctctgtcacccaggctggagtgcaatggcacgatctcagcttactgcaacctccgcctcccgggttaaagtgattctcctgcctcagcctcccgagtagctgggattacaggcgcacaccaccatgcccagctaattttttatatttttagtagagacggggtttcmccatgatggccaagctggtttcgaactcctgacctcaagtgatccgcccgcctcagcctcccagagggctaggattacaggagtgagccaccacacccagccgaagtttttttttgttttttgttttgttttgttttgttttttaatcatcatctgaacatggcctggratcagagaagctctgacttgctataggacgaaaatatgaatatattgtatatagttgtccctcagttatacatggaggattggttccaggactgcctgaatatacccaaattgcgcatrcacaagtcccacagctggccccgtggaacttgcaaatatgaaaagttgggcctctgaatatgaaggtttcacatctctcaaatactgtattttcagtctgcattggttgaaaaccagatataagtggacaagcactgttcaaacatgtattgttctagagtcaactatatgttttttgttgttgatgaagtaaaattgtgaattgtccattgaaatttctataaaaactggtataaatatattctgtagtatatttaagaaadtagttaagagttaagtcctttacaacactaatttgatagtcatgaaagacattttctttacatcatctaaagatactatcttcatatcttttttaacaaaagaaacttaaacatgtaaattaaattgttagtgaaaagtagacaatactgaggaaatatttcatacatttacagcctgcaataactgtatttttgaaaagttgggctgttccaaaagagagtactctttcagcatagttcggcaataaagcttaggctaagtgaaaaatattccctactcatctaagttttagttgtcttattgagagttgcataaatatttttacccaaagaaagaaatcgtggctttgccttttatatatattttactagcctttaccattcaagcctcttcaatttctaaatgatatttttctaaattaaaaaaaactacttttataacatttaaaatacacactatatcataatttcttaactatttttattttaaggaagaagaagtctctccacagttgtttactttccacgaagctgtttcacaaatggtagaaatggaagaacaagttgtagaagatcacagggcagtgttccaggtaaagtaagacaggactttccttcaaaatatttcttgagataaattaagaatttgtcataattccttaaatatcacactrttccttaaaaaatacttgtttgtatatatgtatatgtgtatttgtagggcatgtgacatggcaaatttttaatacaatgaacgatggctacaaataacatttctttgcaccatggtgaaacgttctactttatttacctcccgtcccccttattggtttttgtcatttgtccatttttagggaagagtgtcacttctgcccaccagtacttccttctaaatgttaggccaatgtatttgatagcagttaagaaaaactcttttaaagggttttggagcagttgaggaagtatcagttgttgcagaaaagagagactacttacttcaggagatggagagttactgctctgagctgtcagtggcaagttaagggaagggtgttatatcaccacctgtagcagtaactccttaggcattcattccattatgcattcaacctgttaaaagtatttactatatgatactctactcccctttttttaaacaagaaaatgtcctatcatggtgatatttgagggagtgaagatatcatttggacatctttatgaagactgtacaattgactggcagccgcccccaccctcctgtaatactatgaacacttcttgagaaaaaaacaataactgcctcccttgttgacttgtattccttctttgatgttgaaggaatctttgtcattaaacaaaggaacttcagctctaggccattcaagaacctggataaagggctcaaaaatgacagagaacactttatgtcagattaggatacacgttcattaaaactattagagtttggccaggcgcagtggctcatgcctgtaataccagcactgtgggaggcccaggagggtggatcacttgagcccaggaattcaagactagcctgggcaacatggtgaaaccctgtctctacaaaaaatacaaaaattagctgggtgaggtatagcatgcctgtagtcccagctactcgggaggctgaggtaggattccttgagcctgggaggtggaagttgcagtgagctgagatcacaccactgcactccagcctgggcaacagagtgagaaaaaaacaaaaactctagagttttagtcaaactgttattatgagactctctttagaagccaaggtgtttaagtagagaacggatgctaataatttaagaaaattacacacctgtaatcccagcactttgggaggccagggtggatggattgcttgagccctggagttagagaccagcctrggcaacatggcaaaaccccatctctatttaaaaacaaaaagaaaagtgtcatatgtgcccttttggaacaaggtatcctataaagaccatcatttcccactctgccattttttagataaaatcttacagctgtttattggtaaaattaggtgttctgactttcaacccagtattctttttacaattctctatatcattcctctgtattatgatctgccatttcacaaaataaggttttgttaaaccaaaattaagtgtacagctaaaggaaaaggaaagaaaaattggagtgtatgaccaggcgtggtggctcacacctgtaatcccagcactttgggaggccgagacgggtggatcacctgagtttgcgagttcgataccagcctgaccaatatggagaaaccctgtctctactaaaaatacagaattagctgggcatggtggygcatgcctgtaatcccagctacttgggaggctgaggcaggagaattgcttgaacccagcaggcggaggttgcagtgagccaagattgtgccattgcacaccagcctgagcaacaagagtgaaactcaggaaaaaaaaaaaaaaggaaaattggagtatttttgcattttctaattaatatgtttcctaatcaagacacatacctatgttaaccagttctgtctggtgctatatagtctaattataattagtcattaaagtcaattgatgttcggaaaattgagattgtatgcatcctaaaagcaaatccacgtataagagcttttatgtccaaatagctctttaattcagaaagatctggtcttgttttgttttttgttttgagacagtctcgctctgtcgcccaggctggagtgcaatggcgcgatctcggctcactataacccctgcctcctgggttcaagctattttcctgcctcagcctcccaagtaactgggattgcaggcgtgtgccatcaygcctggctaattttttgtatttttagaagagacagggtttcaccatgttggcccggctgatcttgaactcctgacctcaaagtgatccacttgcctcagccttctgaagtgctgggattccaggcgtgagccaccatgcccagctggaatttattattacctcttggcccaaccactgtgagtccctaattggatatgttagtttgtcaggttctaggctaccatagcccccatcaaagtgctcagtagctttattatgcacattcttcccgttttagggatggatattgaggttttgagacttactctcctctttaatattgatgtatttgatgcattccctccccaaaattcccatccaaagtagagtaaagatagagaaatgaaatgatgttgctcagcccatctttcatgtgtttgtgttagattttgaggacatacagttgacccttgaaaactgcagggggttaaggatgctgacccccagcacagttggaaatatatataacttttgagcccccctaaaacttgactattgaccagaagccttaccaataacataaaagtctatgagtacatattttgtatgttatatatgtgatataaggtattcttaccacaaagtaagctagagaaaagaaaatggtattaagaaaatcgtaagaaaggagaattatatttactattaagtagaagtgcatcatcataaaggtcttcatcctcatcatcttcacattgagtaggctgaggaggaagaggcaggctggacctggtgtctcagggctggcagaagtggaggaggtggaagggatggcaggagaggcaggcatactcagcgtaacttacattgaaaaaaatccacataagtggacccaaacagtttaaacccatgttgttccagagtcaactgtatttcttaattatactgtctgtgaataaagatgttttatgtctattgacattttagagaatactatcttaagtatgtttgattatatttaacagaattgtaatttggtttctgttkcacaaagakgcttattggattatcgaatttttgtccttgtaggaatctattcggtggttagaagatgaaaaggccctcttagagatgactgaagaagtagattatgatgtcgattcatatgctacacaacttgaagctattcttgagcaaaaaatagacattttaactgaactgcggggtaattctttttccattttaatgtttgaaatctgattggtattggtatgtatattggtgagagggcttcttcgtattgcaagaggacatacgaagtgaaaattaggggcactgtttagcatctattttccagaggtataaagacaactaaccattgtggtttttctaaaagtcatggcatagcatttcaagttttctctcatattttaagaagacagtcatcttaaagagagaaaatgtatttttaacaaatttataaattttatgtacctattcagatctttagtttggtaggctgatgcttatgagaattatcttctttctgtgccttttttcgggtctcattctgttgcccaggctggagcacaggggcgtgatcatggcttactgcatcctcaacctcctgtgctcaagcagtcctcccacctcagtctcctgagtagctgggactacaggcgcaagccaccacacccagctaatttttaattttttgtagagatggggtcttgctatgttgctcaggctgtctcaaactcctgggctcaagcagtcctcctgccttgacctcccaaaatggcgggattacaggcatgagccaccacacttggcctctgccacttttttttaaatgaaggaggtgtcaagatgactatcctctgtaccttactcatgaagggaagcatgtgccttacctactaagtcgtgtctttttggttttttagttagcttatctgtgtagcttcagctatgtatttctttatgtgttaatttcttaggcatttgcacactgttggctttgtttaggtgtgagtgaccatctggatgtgtgtgtacacgcaatccaacataaaccagaatgaaattcctaatttggggcagtaaataagctgcttaatttttttaaggaggccctctgtgatgttgattagttgttttgaagggttatttttcttttaaatttattcatttatttaaattgacatcccagcctgggcaacatagagatcccatctctaaaaaataatttaaaaatttaaaaattagccaggtatggtggtgcctgcctgtagtcccagctattgggaggctgaagtgggaggatcacttgatcccaggagtttgaggctgcagtgagctaggatcacgccactgcactctggtttgggcaacacagtgagatcctgtctcaaaaaattaaagagttgacagattaaaatgtatgtaataggtacaacatgatgttttgaagtatatacacgttgagtatcccttatgtgaaaagctttgaacaagaagtgttttggatttcagattttttcagatttttgaatatttgcattataccaaaagtttgggatttttggaacacttcaggtttcaggtttttttttttttttttgtcatggagttttgctcttattgtccaggctgggttacaatggcacgatctcagctcaatgcaacctctacctcccaggttcaagcaattttcctgcctcagcctcccgagtagttgggattacaggcacgcgccacaatgcacagctaacttctgtatctagacggggtttcaccatgttggccaggctggtcttgaactcctcacctcaggtgatccacctgcctcggcctcccaaagtgctgggattacagatgtgaggcaccgagcctggctttgctttttttttttttttttgagatagtgtcttgctttatcgcccaggctggagtgcagtggcaatctcagctcactgcgacctccgcctcccaggttcaagcaattcttctgcctcaggcttctgagtagctgggattacaggcgtgtgccactgtacccggctactttttgtrtttttagtagagaccgggtttcaccatattggccaggctggtatcgaactcctgacctcacgtgatgcacccacctcaacctctcaaagtgctgagattacaggcatgagccaccatgcctggccagatttttttttttttttttttttttttttttgagatggagtctcactctgtcacgcaggctggagtgcagtggagcgatcttggctcagtgaaagctccgcctcccaggttcatgccattctcctgcctcagcctcttgagtagctgggactacaggcgcccgccaccacgcctggctaatttttttgtatttttagtagagacggggtttcattgtgttagtcaggatggtctcgatctcctgaccttgtgatccgcccatctcggcctccgaaagtgctgggattacaggcatgagccaccacgcccggcctgcacagccagatttttggatgagatgttcaacacatatatgttgctgactggttatgaagttggttatttgaaatcatattttgtaaagtcagcagtgactgttgaactaaaattttcatttgtttctcatattgttcatattcaaccctttatttaaattgttttgatcatttttctaatctgcaataattcacaatcagcttctgtatccattttattcagaagacagatcctaatgcaytctggtattttttctttgtagcattcaacttaattgacttcctttccttttctcaaatttcatgtgtatcaagcatatccataacttttaagaaattactatctagatatattgcattattcagtccttagaatttttttaaccacccagagataaatttgggatttataagaaaaatttgggccagacacctgtaatcccagcactttgggaggctgaggcaggtagatcacccgaggtcaggagttcaaggccagcctggtcaacattgtgaaatcctgtctctactaaaaatacaaaaattagccaggcatggtggcacatgcctgtagtcccagctactcaggaggctgagacaggagaatcacttgaacccggggcagggggcggagggcggaggttgcagtgagccgagatcacgccactgcactccaacctgggtgacagagtgagactccatctcaaaaaaaacagaacagtaacagtttgagagcaccaaatctagaagttcttaaattcatttcaaaatttcaaaaaagttaactttttaaacatcactgtactttcaaaaaggggaggaaaattgagattccaactttattctgaagtctacagagtagggtttcgtaaccttgacactgttaacatttggggctaggcctttctttgttgaggagtgttatcctgtgccttgtacaatatttaccagcatcgttggtctctgtccactacatgacagtagcaccacaccagttgggataaccaaaaatgtctctagacattaccaaatgcccsctgggggccaaaaatcatatccagttgagagccactgttaytgaaagatagcttatcttcacagctgcatgtaatttgtctgacaatttactaacctatttctagtttttacatgactctagagcagtacatgaccagaaaatgcgtaaaatcaagaaatatatcatttagtcatccccccttcacaatcccccttcctcacagtgaggacaaaatgtaaatttctaaaaattcaaatatattttacatgttcatagctttaaaaaggtaaaatagggggtgctgagcacggtggctcatgcctataatcccagcactttgggaggccaaggcgggcagatcacctgaggttgggagttcgagaccagcatggccaacayggtaaaaccccgtatctactaaaaatacaaaaattagctgagcgggtggtgcacgcctgtaatcccagctactcgggaagctgaggtgggagaattgcttgaacccatgaggtggaggttgcagtgagcctagatcgcaccattgcactcaagcttgggtgacagagtgagactccatctcaaaaaaaaaaaggtagactatgtattttacaatgtgaaacctgcctatactctaggaggaattccaataaattaaaacagagaactgtaaatgtgccaaacagaacagaaagctattgaaagatacagaaaaacaggtatttctggaaatctgtaacaaaaaactttcgcaatagttgagcattctatttagttccgagtttctagacaacaaagaacaaaaggaaaaatactgagttactgttaggaaataacacagctgacttgattgaacccataaagttgtaaactcttactgcgtgtaatacaatacttattccctctttcttttctttttccaagataaagtgaaatctttccgtgcagctctacaagaggaggaacaagccagcaagcaaatcaacccgaagagaccccgtgccctttaaaccggcatttgctgctaaaggatacccagaaccctcactactgtaacatacaacggttcagctgtaagggccatttgaaagtttggaattttaagtgtctgtggaaaatgttttgtccttcacctgaattacatttcaattttgtgaaacactcttttgtctacaaaatgcttctagtccaggaggcacaaccaagaactgggattaatgaagcattttgtttcatttacacaaatagtgatttacttttggagatccttgtcagttttattttctatttgatgaagtaagactgtggactcaatccagagccagatagtagggggaagccacagcatttccttttaactcagttcaatttttgtagtgagactgagcagttttaaatcctttgcgtgcatgcatacctcatcagtgattgtacataccttgcccactcctagagacagctgtgctcaccttttcctgctttgtgccttgattaaggctactgaccctaaatttctgaagcacagccaagaaaaattacattcctwgtcattgtaaattacctttgtgtgtacatttttactgtatttgagacattttttgtgtgtgactagttaattttgcaggatgtgccatatcattgaacggaactaaagtctgtgacagtggatatagctgctggaccattccatcttatatgtaaagaaatctggaattattattttaaaaccatataacatgtgattataatttttcttagcattttctttgtaaagaactacaatataaactagttggtgtataataaaaagtaatgaaattctgagaagagttttatcttaggaaaatacatatatatgcagtgtgtgtgccagtgtggtattaacaagactaatagtgcagtttgatccttaccaatatcattacttaatttgaagtgttcattagcaccccaaaatataccttttctatgtactgttaaaagaaattggcttctgatgcatgaacatttacatgtacattgaaagtagtccataatagaagttagtttaagccaagtgtagacagtacattactcccttgaaaaagaattaagttgaaagagttgactttgccttaaaaggcagatctaacccaagctccatccagtaccaaatgtgaaacttcattgttgtttggtgagaatcgccaaattctcactaatacattggtatggtgtagggcatgctactttttaaacagcagcacttatttttacagattgctactccaaggaagaaaactggccacttttcatgtaaatattttgttcaaagatttgtatatctctctaggagttttccctcagttcccaggatggggtccaggagtagattaacagctaaaaatctcccaaggatatcttgttttgatttatttactccagggaactatcagctccttcacaggagccaaaggggagctatgaatagagggtcacatgagccagattctttactgttcataaaacccagagagtagttgtgaaagatcctaatacaattgtgaaaakctctgtaaacatgaaatctaaaacaaatgtagattttcacaatatgcttattaataaatgaagtctatggaataagttttagagataatttacttcagtcacctttgttttggaaaggactcaggttttcttgcagctgtaagatatattctatttgtgtttatttcaaagggaagaggaaggatggasaactgttacaattgaccttgcaaaggatatttaaaaaaaaggtagtttttgagattaaccaactttcaaagggcaataaagacatgtgaatttgctcattttaaagcacaacagatgattagcttcaaatttattatttgcattggatgggtactgtctttggaaagtctccttatagacaaatatgctgccttacactatgatggcttcattctgatcaggtattttaaaaattagtaccagaaaagatactggaggtaatataatacagtccttcagctttacagatagtgaaaactgaaggccagaaaaggaactaaaactcagcagttcataggggtagagggaaataacctgagaaagccgagwtaaatcttaaaatttttactataaggatagagatgatacaagtgaactctgcaaaatagttttgtgaaattaaacaaaaaaatctaytcttaatgwatatttcatatttgtttaacaaaagcagcttgatgcctttgttctggattatacattaagaacaagcattattttaattatgtagtaacatttactatgactttgaagccagatttcaaaatctggctttgttaaattaattggaaacactcttctattaagttaggtattaaaaaaagccaaatatcaataaagatatttttattaattttttatagaaacaaaatagctactataactctattatagtatattaacagcacttagtattatattgacttaaacatagtagctaataaaactagtttatgacatctattgaaattctcagtctgacagttttaaaatagcttaaaactaagcaccrggtatatgaaaaaggaactggaaattttaattgtccagaaatcataggaatactgggaacctgtagttaygggaaatggctgtttttctgaagttgaaaccagtttcaattacaaaaccctctgaaattttgctaagcctatagttatctccctaagaaccataaaaaaagatmattttattgttaatttcattccagtttagcttcctcattttacatgttgggagtcatgccctttaatatgcctggcactgcacggtggcagtagcagacttgggcttacccagaaccctaagtctctgacgctataggatagcgaaagaggtaggcaatcgtaacagacactgtataggataaatagggaagagaatgagagaaccaaaataaaaataatttaagaaacaattgttttactgtacatgtgaataacaagaaatggtacggggaatgtgaataacacgaaatggtatggggaatgtgtgactagtgaagcatattttaacttttttattactggaggaacagagctaaaggcctaaagaaggccttacagtatataacagtaaatagaagagtaacatctttatacaataaactgttagaaatgataagtgtaaagttgtgcgtctctgcggctcctgaacttgaagattattatgaatagattggaccagcattatatattaaaaactttgatacttagaactttccaactttaaaattcagaatcataaatggtgacaacagtagtagtattgaaccaaaaatagtcaagtaaataatgtctcagtaaagcaaaagcattatcttctcaaatacaaaaaatacaaaattcatttcttttcttgaccttgaaaatttctgttttccaaatacctaggaaaaatgaataccttctgcgttgaatccatgtagcaatctgaaaaaagaaatcaaaatggaatggtactgaaaagctaatttgtagcacataacggtatatagttctataccattaatactaaaacatgaatacagcatgcttacagagcccacccactcctaatactagttattaaagaaacgttactggctgggcgcagtggcttatgcctgtaatcccagcactttgggaggctgaggcgggtggattacctgaggtcagtagttcgagaacagtctggccaacatggtgaaaccccgtctctactaaaaatacaaaaattagcctggcatggtggcacatgcctgtaatcccagctactcgggtggttgaggcaggagatttgcctgaacccaggaggcggaggttgcagtgagctgagattgtgccactggagtccagcctgggtgacagagcaagactctgtctcaaaaaaaaaaaaaaaaaaaaaaaaaaagaaatgttattgtctgactaaatttataagatatgtattggttaaaaccatgccatgttggtgcctctttcattagagcctttatgtcgtaatgaatttgactaaaattatcttagactttcattatcccaggcctaagaactcactggcatttgtttcaaggtaactgaacaagaagctgtttggaattggcagaagtcagatgaaaaaccaatcttacatgccccttcttcctctcttgagctgttgtttatattcaaattaaatacacattgtttctctctgtagatacctatgtacttaatagattctagttagtaaactgcacatgcccaataactttgaggaaatttagtgaaaatgaagaaaaagagaaaatatttctctttagacctgaggttatgtttaggctggcccatagaaacaggtccagataaatttctaaaaaagcaaagtagatatttatgaatagtattcaatgcctaggattaacatctaaaatgactcagtagtactgctagccagccaataaaatataaactccatttgtcttagttatatagaactgtgtttccagcttagaaaaagtcaaaccaatgacttttagaacaatctactctcattttttattcagcctctagaacatggaagctttaaaagtgaattggctaaataggcaagaccttctgaaagttaacatcttaatgattaaaaacagtaagtacaggttagtaattacctgggtaattaattgaagccttattctgttttcataagacttacttgcttaattcaagcaaaacaaattttggtctaaattacctagataattatgacagctttttacttgagaagtgtagaacttgcttcaggctacaaaactgtattattcctaaatggataaccaggtaggattctaactggcattattgtatgcttaagattgatttaacaacagctattcccagtaaggaaattttaaaaatcagatccagttacatgtattatgatttttctaccttatggactattttggagggataagctattaagactaagactatgaatgagagttggggaaggagcaggaagggaggaacctgcacaccacattggaacctgcacaccacattaacacaaaggcaatcttctggctcggactgttctttactactgttcttaaagaaaatgttcattctgctgcagctaactagcctccatcttctacaccaaatactattccatgccatggaagtgctatgcaataactctcccaggtagcaccttataccgcttaaaagcctttaaaatctccartytgaaggtgtcacagtaaagaaatgtaaacacttaggaaaacaaaaatgtaattacctgatgaagtcatctatgtccatggaacgggcccgtttgtcactaaaacctgtgctggttaggatttgctgtattttatctgctatgctgaaatcttctggtattatctatcaatataagattcagaataaatgaacgacatatctttaatgaggtcaccttgactcttttttttagttcagtaagtcataaaatagtcacctttaatatatctgttaatgagactttggaaagcctgatttttacattaagacttggatctctaattaaaagtggctgatctttattaacaaaaacttggaataccttgaattagtaatcctgtctatattagccattttcttctttaaaattctgaaatagttattagtttcagacttcacaaataattacaactgtaaattaaattttaaagcaattgttactcctttcaaaataatgcattttcttcctacagatttgaccttaaccacctcatttttctcaaagaggtgacctgcccaagccttgggaatattaaggattttacacttaattcacatattttatccaaaaggattttacacttaattcacatattttatccaaatatttttcttaatctagcttaatatttttctattatacttaggcagattatctaatgactttttgcccataaaagagaaaatggagatagtattgtgatacattaaaccatataggttctgagtcataaaaaataaaaagaaaattggcctttctctctctgttctaattaaactggaagctaaaaagatagcaaacatcacatcgcacacactgttacacaaatgatacgcatgaggctcacaaccagaaatctgctattgagccatatgaactttatttcaatttctatacaaagaaagtaataactatatttgtaactgctatgtgagcaagaaacaagacgtggtcacaattcagaggacagtaaactacacaattattttaagttgtgcaagctacacatatctacagctttgaggaacctgtaactgctgaatctgattcttgttatggctaaaaacaactgtcagtagttagaggacagggtggagtaatcaaagttgctcatatctgtttcacaggatacacagcagcactgacctgtcagaattcaagtcaaaattgtgctagttatacattatatattgtcttttaaggatcttatggaatgtacaaaataatctcatgctagatcaacaagaataaaaatggacattttaaaagaaaacaaatcaatgaaactgcaggaacattttctaacttacaatattatggactgaacagtgaattctgtagtttttttccaagagttgttgcactgcacttgatctatagcataaagaagtgatgccactgttattattccaaagtcagagtaatttcttacttttttaaacttttttttaactaatacataagccatttaagcaataatttcattttagatgaaattaaatctatattctgtatggtgaaattaaggaattttaaaagttgttgaatatttaaacttatgaagcaaacactaaatatatttaaagtgcaaaatcctaatacctcttaaattcttagagaagttctagactctccacaaaaaatcccctaaaaaaaaatctccaagccctgtaaaactgtgtctcacctctcttttacccttgaaccccaaattgatgagctgcattttcccaggttaattacatgacacatatccttcacaagtgtggaaggggtccatcatcacctcatttttccaacaaaaaactagagcagatatatggtcagagtttgggagtgttttcctgttttgccaaaaaatgtgatctgactctcaactccagcaaactttcttcattaagtttgctttagagcctcccaagctctaaagatagtttaaaaggtgaagtttgtctggacccataatctttatgctttagggtagctgctcaggaaaaggaccaaattctagcatagtatctggagcactggccctttatacattagaaattagtgtaatacttacttaaatgcagcagagagtgtcttgtttttcctaacaaaggttatccttactagaccatcccattcctgaaatagaagatagacattttcttcaaattacaaacttcttgttcttgtctatgcccactaggtattattttgtcttttaatatatacaattgaaggaaactttctgaagtgaagaaaatgttctgtaatcttgatctggctggcacacacatgcaaaagtaagacatacatttgatttttgcactttggcgcatttcactgaatatgtcttttcctcagaatttttttttgacaaagcatgacaatttttttttttaatttgaaaaaataaagccaggcacagtgctgcatgcctgtagtaccagctactcaggaggctgaggtgggaggatcgcttgagaccaaaagttcaagtccagcctaggcaacatagtgaaaccccatcttaaaaaaagaaagggaaggaaaaacaaaatggtcccacatctgaacaaagaacatggcgtttatttaaatctaagtatcattttcaaaaataagattcaaaacagacatgacttcagatacttcctgtgtaacacacctaaacctccttgaaggagttattgacaaaccactccatttaccaccagttgaccacacacacaatcacgtttttctctaatgtggctgtagtaaggttttatatcaagtggtcttctttcttgtttttaaatctcaaaaaacaattacaatgaaaagatgttacccataatactactttaaaacaactattttcattttaccttgttttcctagttttattccattttttcttttttttttttgagactgggtctcacttcaaaactaccttgcatcaaattattccatctacttcagcacagggatgtgtcctaattaacattttcctatgtttgaatatttaggttgattcaatatttttctgctgttataggcacacatcttcccgcctggacttttttttcctttattgaatgagctagtattttaacctcacctgaaaattgatgggtggtggtggattcttaggttctatccttacaacactggattccaccttgggcggtggtctgaagttattctttcccacctgttaatgaaaaagtatttaagtagtactcacaaaggcaacttttatttagtaaccagatatgctatcctcacagaaggcacaactggatgctcaaggatgaattaagctagattatttcaataataaaaatcactggctgggtgctttggctcacacctgtaatcccaacactttgggaggccaaggcagatggatcattgagcccaggagttcaagaccaacctgggcaacatagcaaaactctgtgtctacaaaaaataccaaaaaattagtcaggcgtggtgacgcacacctctagtcccagctactcgggactcgagaagattgcttgagtatgggaggcagagatcgcagtgagccactgcactgcagcctgggtgacagagtgagattctatctcagaaaaaagagaaagaaaacaaaattcacttactttcattagatggtccacacgtgccaacagctgtgtattaattgagagtctgcagtataacttatctccaggttttgcaaccagtcggagggcaaattctctttgaaacataagtatagcacacctgaaaagaaagcagaaaggaataaggaaaatggtcattgtcaactataaatgaattttaactgcaatgaattttcttgggagagaaatagcaaagcattggcagctgattataaggtaggagaacacattcagccttttttttattgccacagaatgagagagctggctttgtttttataattgctgtactcctcatggcaagatagcttgcaaatataagcctttaatgactggatgagatgtttcaaatca

SEQ ID NO: 93614 - DNA, 79417 bp, Homo sapiens
  misc_feature (1)...(79417): n = A,T,C or G
tcccagatactcgggaggcagaggcaggagaaccgctggaacccaggaggcagaggtggcagtgagccgagatcacgcaactgcactccagcctcggtgacagagcaagacgccatgtcaaacaacaaaaacaacaacaacaaattaacatgtattttttaattaattgaaccactattcaaaggttaagtttaatcaggtaatggtttttattctggaatatttatactgaatttctccctatctaatcccaaagaaagactaataatcactattagttgtgtttagccagaacaaaaattaaacaaaaaccaaaaatacaagaaacccccaaaatgtataaaatattttgtatctattttatttttttctttttaaaatagagatggggtcttactctgttgcccaggctggagttgcagtggtgcaatcatagctcagtgcagcctcaaactcctgggctcaagccatcttcctgcctcagcctcccaagtagctaggactacaggcatgcacaaccatgtccagcttttataaaatattttacatgaaatatcctgaaaacactttgtaaatatgggatgcttcagtaagtatttgaaactaagattattggtcaagagtaagccaggcacttggagggtttttctttttgagacagggtgtcactctactgcccaggctggagtgcagtggcgtgattatgggtcactgcagccttgacttcccagactcaagtgattccccacctccacctctcaagtagttgggactataggtgcgcactaccacacccagctaattttcggttttttttttttttttttttttttttttttttggagagacgggattttaccatgttgctcaggtggatctgcaactcgtgggcttaagtgatccacctgcctcagcatcccaaagtgctgagattacaggcgtgagccaccacgcctggcctgaggatttttcactaaccaaaattaggatgaagccctatgcaggatgacatacagtcacatgagagcaacatatataaaaatagcaaacgttcattgaacattcagtgttcatttattcattgaacatccttcatcctcaagcctgaggttttcacaaagactgttctaagcaccttatatttatgaagtcatttaatcctacgtgatagttaactattgtccctcctccgccccccccaccgcccctgcctttttattttgagacgaagtcttgctctgtcgtccaggctggagtgcagtggcaccatctcagctcactgcaacctcctcctcccaagttcaagcaattcttctggaattacaggcatgcgccaccacacctgactatttttgtatttttggtagagacagggtttcaccatattggccaggctggtccctgacctcaagtgatccacccgccttggcctcccaaagtgctgggattacaggcttgagccactgtgcccggcctattgtccccatttttataaactggaagatggaggcacaaggaaaagtacattgtccattgccatgcaacttgagtggaaaagctaggaacatgaactctggcattctggctgcagggcctatgcacattatagctatactattctgccttaaggaagttgggctcatacccctcttgagtattcctacttgagggaggagagaagctttccttgctttcatagctacttacgagtgggcaagagtctagaaccacagtagacaaaagcagtggtatgtacatgtgtgtccatttttttatgcaggaatatgaaactagttgctttccagtccagagggaatctacacccctcttgggaaatcccagccatatactccattttgccatatcagtgttatctgtgattattccctaggagcttacaagatacacagaagcaacttttcaagtatcccttgaaagaaaccctagaaaaatagtactttttctgtgtccttacgtttcaagtgatctttcagttctaggcagctccctgaatggtccaccccttattgtggctctgttcacatccaacaggacagaaatagtaggttaaaggtaggaccagtttatctcatggttttcaatttgttgactttcttggcagtagaaagagtttctttctcgcagagctagaaaactctgccccagcttctgcctactggaaaaatttggagccacgttggagaggagtattggggagggcatagcttctagttggagttagcatcctttgtcctcaagcctcaggttttctggggggcaatcaggtcatatttgcttgatgcggtggacatatttttttgtgtgccttcttggtgttcttcttttagcaacaccttcccctttcctttgaagaactgcttcctcttgccgtatgtggctatatgactctatagggctttggtggagctgtcctatcacaatgtcttgccttctttgccacaggagtggggcatgtgactcacgctggactggccagaatccttgtctagaatataaaaagtaaggatggaggaatagcctctctcattttgggctgcaagctataaagttgtgattacagagctatttgaggattatttccctgtccatgaggtcagagaggtagttcaagagttctgacaacattctgtccctgggtataaatgtgctgaaagctgtttgtattcctgttctttccaattacgtgagctagtaaatccccttctttagtttgagtggtcttctatttattatttgtcagtgaaagctctgccctctaggcacatctttcaccatgactgtgagaaataaatttgtgagagctgcatccttgaagagctctgtgaaagctctttctgtgggagtgctgccactgaattgggaaatctagtactcatcctgtgggtgaagagtaaccacgatattggaagcaaggaaaaactggatcacatttgtatttttgacaggtccctctggagccaaagtgtgtgggatgaactgcgggaggctaaaggggttcactcaaagggtctttctgaggccttgattggtgccttttgttcttgtcctcatttcttttcacaggcctcaggggctcaacctatttctttttcctttgatacttgctaccatcttctctgtccactggggtacatttctccacaaagctccctaaaaagtaggacatatgtaccccagctccccatattcttatgcaaaggaatttttattttaataattttattgctattactggaattcacataagggttaataaaaatgactacagctatttcaattaaggttcttcgttgcgttagtaatggcaactggaagctctgatggccttcagccatcagatccaatgggactgaatctacgaacagggaaatggacttacataaagagatggtgaatgacacccccttgccatcattactttttttgttgtcgttcagaatgttttgatcaggagagaaaatccattccctcatttgtttgaattagacccagatgtccccttcccttcatagatcatttattttcttctccttcaggccttattcccaaaggtccagttaaggcggagctctgtataaagggaggtcaggcacccaaagtgtgtatcttaactggcgcatggttacaaagagttctttgttgtgttgggttagtgaggttcttcaaggctgatttgggaaaatactgtccttcaaagtttcttctcttttttgtcaaattatttttttatttactttttttttaacttttttttttttttctgagttggggactttccagtctttactgaaaacttttaaaaatttgtatttagacaaattctaaaagacctgtaacactagtttcttcttctcaactgattcataaatatcttccaaaatagtttgttgagtggagatggataagacaaattgatagtcattgtggtggagtagcaggcagaagaagaaagcaaagggttaaatagattactatagttggagcatgagaactctggtagtactgctgacattttctttgtggcattgacaggtttgctgccagtgcacaaagatgttgcttaagcattggaaccataccttggcttttaggtaatacaacggagttctaaccagagccttagatgagggttctgaggctagatgtatatccacagtcttttgtttcttgaattaagaaatgtattattaccaaaaagctcactgttttttttttttttaaactttgctctgggtgatccagggacctgtttaagggattgaaatatcaaaagggcttttaggtgagaaatactctgcttagttaaatgtgacatttttcagcttctctgaggcaagtgaaaaaaggcacttttccccgtaagaagaactgaaagccttatgctcacttaatcatataaccagccatagaaggttaattccgctaagaaaataggactttttttcactcattccaaaataaatttgatcttttactttgtgctgtggtctaaaagtgttgggtatgtaaaatctagttctagcttcaagaaacttacagcccagtgggaaaatacagaaaatcataaaatatcaaagaatatttctttacagtgagtagctcaaagagtaagaggttaatgcatgtctccaagtctgtctaggggggataaaaaaggctttcctgaagaggtagcatctaaacagagacgtggtggggattctatgcagagtaaccaaagtgtgcaaaagatttgagaatcttggcccagttgaggaactacctgttgagcctgttgggagtgtatagggctggaaggacggctaagaccagacacatgaacagcagtcagcaggctaagaccagacacatgaacagcagtcagcactccaggaattctgtgtgccatgtacgtttttgatactactctactctagagccattatagagttctgattactccacatttgactaaagataccatttaaggctgtttaaagcaaatgcccaggtaataaattctcagaaacatcatccctctctaatcaagtctctcttgtcagacatggcgcattaattcatagaatgaatcgttcgtaagtcaaacgcgcggctgttaaagctagggaattcctagccgtctcaggtgggtcatgggaggaggtgggccagcagtttcttacgtccaggctcatagtcggatagttgagccttacattcctcctctacccctccacaataaactgagggttatggaggcaacggatgcggagggcttttaggggccaagcatattacacaaggaattgaattgcttattaccagagaggctgacctttggggctttacagtcaagaattttgttatctctctcctcccacctcaacctaattctttgcaatttttttcagccttatgttccccaggattcccttttcatacttcctgcttttttcctcctctttcctcgcttcgtgcagtgctggcgcctggggcctggggctgcacggggcacgcacccgggctattgctttgctaacaattccatccttctctttccgtcattccctgccaggtgctgagtttctccctcnnnnnnnnnnnnnnnnnnnnnnnnnnnnnnnnnnnnnnnnnnnnnnnnnnnnnnnnnnnnnnnnnnnnnnnnnnnnnnnnnnnnnnnnnnnnnnnnnnnnnnnnnnnnnnnnnnnnnnnnnnnnnnnnnnnnnnnnnnnnnnnnnnnnnnnnnnnnnnnnnnnnnnnnnnnnnnnnnnnnnnnnnnnnnnnnnnnnnnnnnnnnnnnnnnnnnnnnnnnnnnnnnnnnnnnnnnnnnnnnnnnnnnnnnnnnnnnnnnnnnnnnnnnnnnnnnnnnnnnnnnnnnnnnnnnnnnnnnnnnnnnnnnnnnnnnnnnnnnnnnnnnnnnnnnnnnnnnnnnnnnnnnnnnnnnnnnnnnnnnnnnnnnnnnnnnnnnnnnnnnnnnnnnnnnnnnnnnnnnnnnnnnncctggcctcgcgggccgtgtctccggcatcatgtgtggtaagggggccgggagcggggggcgtgttgccgggtggcgctggggtgcggtgcgggtgccgctaaggcccaaggcgactgggcggaagcgggagtgtggagggtgcgaagtctgggtgatgggcaaggggcgcccagtggtggctgcgggggcgggggccggcatccacgggcgggagagggggtggcggccgggagaaaggcacctgagaggaaggcgggccccctttgccgggggctagcgggcgccttggcgcggagaaggaaccgaaaggggagagaaacgcctttattgaaaaaggaggagagagctgagggaattgaggtgtggagggggttgccttcaaaagggcccaccaggtgagtgaggaaacctgtggaacctcgggcgaggtctcttgaacttaccttgcatttttctaaaaatctttaaaaaaatattttacttgtttctggggaggcccaatagaaaacagaccctagctagagccacggtagtgccattaaacgtgatacttcctgccatcccttgtctcaacagaaaccattgctaatcaataacttggttcatgggcttagacctgatcctctggtggaagaggccttcaaatgtctgtggcgataggttatacataatttatcatttgcgtgtgcacccattaaaaatgccagctctgaaaaatatcagttataccttggatgtatacccctttagaataccaactatgaaaaatatcatttatcccttgcatgtgcatccattaaaaatactagctatggaaagttgagcaaatatctttcctagagccttaaaaaattaaggttaggcccttttattccatgttttgagagtcgtttattatgacctaagtgttagtgaaagagactttgagaatcgtgtctgacatgactgatatcttctaaaattggtgttaatttggctattgccagtaaaaataattgtattcttacctttcttattgaaatttacaaccgactttatccctggaagaaagtacactttttttttttttttttaaagggaagtaccattgtaagagaattgaaaactctctgggagacttcttatttgcagccttttacacgaaggaactgaacaggaggtggattgtactcgttagtgtatatatttcctgtatttaactttatgctcatttcagcttctgaaaatgaggagcaggtttaaatttagagtagattaaaaaaaaacccacataaaaacagaaacacctataaatagcttactgaaattattagagtagagctgacttcagaatcagacttttgcagtgtctacttagtagaatggttttgcatttagtttggagctgtgaagtagtgaatttgcaaactggtcaatctccagtgtgcttcatttggtagttaactgttcctgaatgatgaggggtgtgcctcatcaagtactcaacattctggttgcaggtcatttcatcatgttccaagaaaaaaacgtagtcaaagtacttactgaaaaaaaaataaataaataaataaatcagcgctgggcgtggtggctcccgcctataatctcagcactttgggaggccgaggcaggtggatcacctgagctcaggagttcaagactagcctggccaacgtggtgaaactccatgtctactaaaaatacaaaattagctgggcgtggtggtacgcgcctgtaatcccagctactcgggaggctgaggcaggagaattgcttgaacccaggaggtggaggttgcagtgagccgggatcgcgccattgtaatccagcctgggtaaaaaagagcaaaactccatctcaaaaatgataaataaatataaataaataaatcagatatggaaatcaggttcagataagggagatacctttagggtggagactaaatgttgggagttttcacatagtttgtgtctccattccatagagttttacggctgaggaaacaggtattgaagaaataaaaagtgaatatttgaggcatttctgaggtcctgcttttaagtcataccacggttttgcctgattctagggatagggttcagaatttattttctctctaatgtaaattctgaaagataagaagatgagtgtcattattttcctcccacatcttagtcattgaactaaaattcctgagcagagaaatggagtgaaaattagactagatgggaaaatctggaagcttactttctgattacttgctatctagttaagtttttctctttctttccttctttcttttcttttctttctttctttctttttctttctttcttctttctctctctttctttctttctcttctttcttttctttctttcttttttctttttttttttttttttttgtgacggggcctctctctgtcgcccaggctggagtgcagcggcatgatcttggctcactgcagcctctgtctccggggttcaacctcccgagtagctgggattacaggggtgtaccaccacacctggctaatttttgcatttttggtagaggtggggtttcaccatgttgaccagactggtctgctgacctcaggtaatccacctaccacagcctcccaaagtgctgggattacaggagtgagccaccttacccggccctagttaaatttgcctaaaagattattttatttcaacgttgtgcattgttgaagcagaagaatgaggattgaagattctgatgtgctttttttcaatcagatatactgataaaattgatatgtttaccagcttgtattgggatgttaataagtgttaggaaaaaagatcctctggtccagtaaatttgggaagcaacatattaaatcgcgtggtaatgttttgttttgttttttgattggaggatttcttggaatctttaatgtattaataataagcattgagaatctcccagagaagaatagtgtgtctattttccaaatttattttatcttcctttttcttggtagtttggaatatactttgtcctttttatttgcattatttttggttttgctgagtgtcaagtcacttaagctatccctagcttttaacagattttgctattgtttttataaatgtgaagttatacccttctgattcgacggtgtatataaaatggaattttggggatgggcgcggtggctcacgcctgcaatcccagcactttgggaggctgaggtgggtggatcacctgaggtcaggagtttgagaccagcctgaccaacatggtgaaaccctgtctctactaaaaatccaaaaaaattagccgggcgtagtggcgcatgcctgtaatcctagttactcggaagcccgaggcaggagaatctcttgaacccaggaggtggaggttgcagtgagctgagatagtgccattctactccagcctgggcgacaagagtgagagactgtctcaaaataaataaataaataagtaaataaataaataaataaatggaatgtttgcaaatgagatcctttttaaaagcagtaaaggaacttgcaattttaaagtatcctaaaatgaatttttcaaaagttttttgtaattatactgtctaatggctttggagataattgagggatgctgagattggctgctaggattggtcataaaaccagtactattaacatatccttacatatactggatatgaagaagttgtgagagaaaataattgcttaataagcatttcttcaattgtcccctggaaatggaggttaataggttctggtaatgagcagtagaaggcgggaaagggttttgtaacacaagtttgggaaattctgctcttggagattcacaattagcaagattaaaggttccagaaagttctaaatatatacctaactttaaccaggtagttcttaaacctttaattatgaaacctttctttacttcattcctttttagcatccggtgaaatagtgttctgtttctgtggtttgagaattttttgaccgtatatttcaggtgcctagaaagtgttagaagatacttgcaggtatttgaaatgatggctttatacttggcactctgccctttgcagagatgactaaaataagagagttgccttcaagaaatygctgcctgatcagaggaaagaaaatgaatgcacatgcaacagcttcaggtgaaaatacacagtccttgttcattgccatgtcatagaccacaagtagaatgagtagaaatttagagactggagagctctggggtttgggtwtctgtgttaggttcaggaatgttctgggtgatggggcaggacttttactcaacttgtagagtattagtatactgtgagaggtaatcattaatggcatatgttaaccgtcagtgaatggaggcggaaatagtttgagaactactaccagatgaaggaggaaatagaagtgccaggaaaacagaccaaggaacagtggttaaaggcagaagagttccaaagtagtatattgccttgaacagagtctataaaagtagaaaaaggtcattcatatgtaatactgcagagaagttaattggatatggttatgaagaaattattagagaaattgcatatgtcaaggcagaagggtctcagtttgtgtttaggaggagggctgcaagtaatatgaaaaagaagaggattttgggattgaggtcccctgggagtgttgagaagttgaattctagagctgtggttcctgacctacaagccctgaagttgttacagggtgttcattgcttattcatatgcttataactttgtctgtaagttgaataaagattgttctagatcattgaataataaaaatttaacccattgttgtgaaggagcctcagaatattttgatgttaacaaaagagttctgtatttacaaagttggagaaacactcatcaagagttaggagtaaggcccagtgtggggttccctctggtaataccagcattttgggaggctgaggtgggcgaatcacttgaggtcaggagtttgagaccagcctggccaacatagcgaagccccatctctactaaaaatacaaaaattagccagctgttgtggtacgcacctgtaatcccagctacttgggaggctaagggaggagaagtgcttggacctgggaggtgaaggttgcagtgagctgagaacacgccactgtaccccagcctgggtgactgagtgacactctgtctcaattaaaaaaaaaaaaaagagttataagtagccagtgttttggcttacacctgtaatcccagccactcaggaagctgaggcaggaggattgcttgacgctaggagttcaagatcagcccgggcaacatagtgagatcccatctctattaaaaaaaaaaaaattagccaggcatggtggtgcatacctgtagtccagtctacttagaagactgaggtgggaggattgagtccaggagtttgaggctgcagtgagctatgattgtgctgctgcactccagcctgggtactgggtgacagagcaggactgttaaaaaaaaaaaaaaaagttacaagtaggggagaggctagcttcagagagtagtatgtgtaatatgtctctcttgagattacaaggaaggatgagaagtatttatatattgttaaactgttgaaaagaagatgggtgaggggcagtgactcatgcttgtgaactcagcattttgggaggctgaggtgggaggatcacttgaggcttggagtttgataccagcccggacagcatattgagaccttgtctctatattttaaaaacaaaaaaagaaaatgaagactttaattctggccaggcgcagtggctcacgcctataatcccagcactttgggaggccgaggcgggcagatcacctgaggtcaggagttcgagaccagcctggccagcgtggtgaaaccctgtcactgctaaaaatacaaaaattagccaggcgtggtaacacacgcctgtaatcccagctgctgctcaagaggctgaggcgggagaatcgcttgaactcaggaggtggaggttgcagtgagctgagatagcgccactgccctccagcctgggtgacagaacgagactctgtctaaaaaaaaaaaagactttaattctataaagtaagaatctaccaaaaatgaaaaagaagctgggaagagaaaatgaggatttgagagtagtatgtagcttagactactaaaataatttctgggagaagtttgaaagttaagcannnnnnnnnnnnnnnnnnnnnnnnnnnnnnnnnnnnnnnnnnnnnnnnnnnnnnnnnnnnnnnnnnnnnnnnnnnnnnnnnnnnnnnnnnnnnnnnnnnnnnnnnnnnnnnnnnnnnnnnnnnnnnnnnnnnnnnnnnnnnnnnnnnnnnnnnnnnnnnnnnnnnnnnnnnnnnnnnnnnnnnnnnnnnnnnnnnnnnnnnnnnnnnnnnnnnnnnnnnnnnnnnnnnnnnnnnnnnnnnnnnnnnnnnnnnnnnnnnnnnnnnnnnnnnnnnnnnnnnnnnnnnnnnnnnnnnnnnnnnnnnnnnnnnnnnnnnnnnnnnnnnnnnnnnnnnnnnnnnnnnnnnnnnnnnnnnnnnnnnnnnnnnnnnnnnnnnnnnnnnnnnnnnnnnnnnnnnnnnnnnnnnnnnnnnnnnnnnnnnnnnnnnnnnnnnnnnnnnnnnnnnnnnnnnnnnnnnnnnatggaatatttgaagattgtgagcaggaaagtacatgcttttttttctcaagaaagatgatgacataggttgactgtgagggaatgtatagagatgtcatgacttaactagtgatttgagctccagaatgttaaatgtgcaagagacgtgtcatggagccccttctagtggcaatagttacagtaaagtaggggagacatgaaccaattaaacacacaaataattgaaagtcttaattgtttcactccatatgttatttttgtatgtgtgatttattttattttacttttacattttttatttttttgagacagagtctcactgtgtcgcccagcctggagtgcagtggcgcaatctcggcccacttcaccctctgccccacctcctgggctcaagtgattctyctgcctcagcctcctgagtagctgggacaggcacgcgtcaccatgcctggctaggaattttgtatttttaatggagacggggtttcaccatgttggccaggctgatctcaaannnnnnnnnnnnnnnnnnnncctcccaaattgctgggattacaggcgtgagccacggcatctggcctttatatgtgcttttaggattgtagaagatgtaccttggctggatgcattggctcatgcctgtaatcccagcactttgggaggccgaaacaagaggatcgcttgagtccaggagttcgagaccagcctgggcaatgtagtaagacctcatttctacaagaaataaaaaaataactgggcgtggtagcttacgtctgtaatcccagctactccagaggctgaggcaggagaattgcttgaacctgggagacaggttgcagtgagccaagatcgcatcactatactccagccttggcgacaagagcaaaactccatctcaaaaattaaaaataaataagtaaataaataaataaattacaggcacattagcatgtgcctgtggtcccagctacttgggaggctgagatgaggggatcacttgagtccaggaggtggtggttttaatgagctgggattgtgccactgtactccagcctgggcgacagagcagacccctggtgaaaagaaaaaagaaaatgtatctcaaataatacttaattttaaagaaatcttaaatgtagaatgtgattccataattataatattgactagttcactgcaaccttgaacccctgggctcaagtgattctctcacctcagccttccaagtatctgggactacaggcatgcaccaccatgcctaattttttatttttggtagaggcagggtctccctgtattgcccaggctgatctcaaactcctgcccatgatcctcccgccttggcctacgaaagtgctgggattacaggtatctgctactgtgcctggcctgtagaaaaatttatagctgaaggactgggagtgtgtgtatgggaataacagtagttatctctgagaaaggggttggaacctgtgtggagacagaaaggagagattttcacaattctgtagcatctgtatagttttaatatttatttatttatttcaaattttaatagagacagggtcttggtatgttgccctggctggtttcgaactcctgagctcaagtaacctctgcctctcttcccacagtgctgggattacagatgtgagccactgctcctggcctactttgaatttttaatgatggtgatgaattaatttgtgactagcattataagaaaaataaaatttagagtttaagtgacattgtaggtagattttgattcagaagttttaagtttagagaatgaatttgaacacttatcactgataagttacaatgtttagggtcccaaaatattgcagctgtcaaatgataaaatatataaaaataaaatttagtattcataaggacataaatgcaaccagacataggaattttaataatttgacgagtcagttttcttttcagtaaggtttaacagtctgtatttgcagctacattgctttcaaccaggtgtgtctagtctgtgatccagattgcttctgaaattttgttagcaaggtgctcataattgcttttttgtcattgaatttaagttgccatttattgagaatgatgcctgtaggttcaagcatctgcttcagttatggagttattttattccaagtatattccattagtaagaaagcttacacttgtgaagtgcatgctgatttgggggtagagawtctatgcttatacagctactgtgtgtgctcttagagcaattactgaagagtggcggaaagttgatattaggcttttgtcattaccttacttaagaactgtttattgggagtttaggccgggtgcagtggcttatgcctgtaatcctagcactttgggaggctgaggcgagtggatcacctgaggtcaggagttcgagaccagcctagccaacatggcgaaaccccatctctactaaaaatacaaaaaattagccgggcatggcggcggccactgtaattccagctacttgggaggctgaggcaggagaattgctggaacctgggaggtggaggttgcagtgagctgagatggcgccagccttggcgacaaagcgagactctgtttcaaaaaaacaaaaaacaaaaaactgtttattgggagttttgataagacaagtcaaagacctgaaaatagaggtcagactaacgatttctgctctaacaagcatcattgtgagttgtgaatgcctcccttgtgaacatgccctgtgtacctgatgaattgctgccagtattgtctcgggcaccccaagattacagttaacccggtatccccgcaggtggaatgtcttgggctagtagtgctatcaagggacagggctatgaaactgacaggttcaacttcttagctcccattttcctcatcaggtatgtctgaggctaatccccttccttcttctagctctgttacttttttgtttgtttctttgtttgtttttttgagacggagtcttgctctgttgcccaggctggagtgcagtggtgcagtctaggttcactgcaacctctgcctcccaggttcaagctattctcgtgcctcagcctcccgagtagctgagactacaggcacgtgccaccacagctggctattttttttttttttttttggatttttagtagagacggggtttcaccatgttggttaggctggtcttgaactcctgacctcgtgatccgcccgcctcggcctcccaaagtgtcgggattacaggtgtgagccactgtgcccagccaaaatgttcttaagctctcaagattcatatagtgagccattataaaccaaggagattggagttagaagtattattaaagttgaatgctgttgttgagttacattattaaaaacagtgaatttaatattgcattacttaatcttttttttttttttttttttgagacggagtcttgctctgttgcccaggctagagtgcagtggcacgatctcagctcactgcaacctctgcctcccaggttcaagcaattctcctgcttcagccgcctgagtagctgcgattgcaggcacctgccatcatgcctggctaattttggtatttttgtggagacggagtttcagcgtgttgcccaggctggtcttgaactccttacctcatgtgatccactcgccttggcctccaagttgctgggattacaggcgtgagccacccagccctgccgcattaatctttaaaaaaaagtagagtctataaattgtcttaaaaacaattttatatcattagcatttaaatagttttaacacattcatatacatctttaatctttaaatcatttaccatccggcttacatttttatgtttttaccaactttcatttttatcatctggcttacatttttacttttactatcagacttagatttcttaaaaaagagagagtttaggagtgagtttttctggatgtgcttagaatttggcagctctggacaatctgcaaacaatcctcgacaggcttctgttttcaaataagctagattgtatcctcctttagtggactctagctgatgcagtcacagtggtgggaactagttcagattcagtttttttcacacttttttttttttcttttgagatggagtctcgctctgtctcccaggctggagtgcagcagtgcgatctcggctcactgcaacctccgcctcctgggttcaagggttcaagtgattctccccgtctcagcctaccaagtagctggagtacaggtgcacgccaccatgcccggccaatttttgtatttttagtagtaactatgggtttcgccatgttggccaggctggtcttgatttcctggcttcaggtgatgcgcctgccttagcttcccaaagttgggattacaggcgtgagccactgcacctggcccacatttgtattaaagtattgttttagaaaagatttgtgtgctgtgtattgtcttttaatgacctggttaaaatacttaattgatagttatctgtasgtgtttaatctttctcaaagatcagtgacccataggtgaagagtgcaaagtttgatttacaattgggttattcgtttattcatattacagatacttcatgaaggaacagcagtarcaacaaaaaccccggactcattcttctgaattaaatgggtgcagattggtctggagactcttctrctgccctctagtgtttatatcatgagtagccattgaaagttggaagctgcacattgctgtgccgctaccactcttaccttagcaatatccttaagcagcatgttgtttatccttatcttaattgctgtgctttgaggttgggaatgctatttgtgggtatctctgggatatcagttaactcaatttctatttttgaattatgtaagatagatgttctaccctcccttacagggtggtggtgctgtgaaagtaagatgactgtacattacaggaaagcttaaaaaaataaaaatgtaaggtgtgtgtgtatctttttttaatctgaatgaaatatgggatttctgtaagtctttggcctggaactgcttctttggggagagttgaaaccgttgtttcaggttattttggattttaatgtgtgagtttctcttttttagggcataataatttrtttgagaaaattgcaatgtattgatcatggtgatcagcatgtatgttatggctttcctgttgggtatcaacaatgtgccatttttgtatactgaaatatttcagtaggatcacactctatagaagtaaatgtctcttttcagatggaaatgaagactagttttttgggagttctatctcacagaattaatttaaacttcttatgaatcagaattacagtgaaatgtagttaagaaaaaaggaagttttaaaataagcagcttgaacttgtatttttgtatattttatataatttagtcttcagttttgatacattaaagctgtgtccactctggccaaagcacagccatggaaaacctcagataatgcccatgctgccattcctaaaagtgtggatttcctttacctgtgttttgttacttctttgcttatcccgttcagttcacattgtattactgctttgatttctagttttgtttttccaaatgattgctctttttctgtgaattttcaagggttgttatgtggttgtcatttgctaatgtgatgaacaagtaattcaagcaattatcttttaagatagttatatatttggtcagtttttactattttacgtaattatttaaggggtgagtatttttcatatcatttattcctaaatgtcactgatagcatggttattggaaataagcaaaattaatctcattggtacagattttagggcctatatatgttgcttaaattactttagaaatttttttcttgaaacgaaatgctctgtatataggacataaaccatgaatttgttaattggtttttaaaaaaattaaatttcacttgacaaaaatggcagtcatggaaaataagtagccagctttataagcttctttgccaggtgcagtggctcacacctgtaatcctagcactttgggaggccgaggcgggcagatcacgaggtcaggagattgagaccatcctggctaacatagtaaaaccccgtttctactaaatatacaaaaaattagctgggcgtggtggcaggcacctgtagtcccagctactcgggaggctgaggcaggagaatggtgtgaacccgggaggcggagcttgccgtgagccgagatcgtgctgctggactccatcctgcgtgacagagtgagactctgtctcaaaaaaaaaaaagaaaaaattataaatgtgtattttgacatgtttagttttttatacttatgagaaactcccccttgaaaaagttccattgcctttaaacggtttgaaatgtttgaaagacagaatctaacttcacgttttttcacatacttgacataattatgctaattttgattttttaaatcagaatttttcattaaatatttgtttatttgcaggtatatttgcttacttaaactaccatgttcctcgaacgagacgagaaattcctggagaccctaatcaaaggcctcagagactggagtacagaggannnnnnnnnnnnnnnnnnnnnnnnnnnnnnnnnnnnnnnnnnnnnnnnnnnnnnnnnnnnnnnnnnnnnnnnnnnnnnnnnnnnnnnnnnnnnnnnnnnnnnnnnnnnnnnnnnnnnnnnnnnnnnnnnnnnnnnnnnnnnnnnnnnnnnnnnnnnnnnnnnnnnnnnnnnnnnnnnnnnnnnnnnnnntcttactctaaattcttttttctttcctataactttaatttttatccattgatttcatgctttgacacataaacttgcctcagattcttttttcttatttttattatttatttttgagatagggtctcactctgtcaccccagctggagtgtagtggtgcggtcatagctcactrcagtctcraactctgggctcaggcaatcctccctccgtagcctcctcagtagctaggactatagctgtgtgccaccatgcccagctaatttttaaaaagtttttgtagacacgagagtctcactatgttgcctgggctggtctcaaactcctggcctcaagtgatcctcctgccttggcctttcaaagtgctgggattacaggcaagccactgattccagcctcwtctatcttaaataaattacacataaacataactttctggcaactttatgttctaccctagctccttccctcaactatgtcagaggttcctaagaccatcctcagatttgacgattccctaggaggactcacagaactcagcatttggttgtactcatggctatgtttcattataacaaaagaatacaaagcacaatcagcaaagggagaaggtgcaggaattgaagtcttgagaaagctaggcacaagctgctcaccagtggatcagtgcctaaggttttcattgggggttggtcacataggcaccctctgcccagcatgtaccaaaattctagactcccaaaataagagcagatgttcagcataaaccactttgtttgcacagtttgtgtagtgagacacttttggttagggtggtaggaatccttccaaaaaccaagtttctagacaccagtgaagggccaaccttgaaaacaggcctttctgaggatagcagtttcacacctgctgtgttaactcttttttgtacacttaacattgccacatggaatggacatttgtcttccttgactttccttagtaatggaaagtcagttcctcaactcctttgtttttaaaattctctccttccttagcttccttgacagcacatcttattctcttcctaagatgctaagattacttcttytctgtttgctttggaggctcctttcttctacttacagctcaaatattaatgttcttcaagattctttttttttttgaggtgagtcttgctctgtcacccaggctggagtgcaatggtgcgatctcggctgactgttgcaacctctgtcttccggattcagctgattcttctgccttagcctctccagtagctgggataacaggcatgcaccaccacgcctggctaatttttgtatttttagtagagatggggtttcaccatgttgcctaggctggtcttgaactcctgacctcaggagatccacccgccctggcctcccaaagtgctgggattataggcgtgagccactgcacccagccaatattcttttctagatccacttctcttatttggtgtcttcatgggtgagctctgactcatcaatcttcttttttttttttttttttttgagatggagtctcactctgtcacaaggctggagtgcagtggcgtgatcttggctcactgcagcctccacctcccgagttcaagcaattctcctgcctcaccctcctgagtagctgggattacaggtgcctgccaccacacccagctaatttttgtatttttagtagagacggggtttcaccatgttggccaggatggtctcgatctcctgacctcgtgatctgcccgcctcggcctcccaaagtgctgggattacaggcgtgagccgccgtgcctggcccatcagccttctgttaatatatgttggtaacttctttgttttattctttttattttttatttatttttaatttttatttttttgagatggagtcttgctctgtcgcccagcctggagtgcagtggcatgatctcagctcactgcaagctccacctcccgggttcacgccattctcctgcctcagcctcccgagtagctgggacaacaggcacccgccaccacgcccggctaattttttgtatttttagtagagacggggtttcaccatgttagccaggatggtctcgatctcctgacctcgtgatctgcccgcctcaccctcccaaaatgctgggattacagacatgagccaccgcgcccggccagtattttttatttttaattttaatttttttgtgtgagagtatgttggtgacttctaatccagatgtatttcttttaatccagatttatctcccaagctgtattctaggcctcctacaagtttcttcctagatagaccatgatattttaaactttgcatgttcaaaaattgaactgaggccgggcgtggtgactcacgcctgtaatcccagcactttgggaggctgaggtggatggatcacttgaggtaaggagttcaagaccagcctaaccaacatggtgaaaccccatctctacttaaaaaaaaaaaaaaattagccacgcattgtggtgtgcacctgtgatcccagctattttgggaggctgaggcaggagaattgctgaacctgggaggcagaggttgcagggagctgagattgcgccactgccctccatcctgggcgacagagcaagaacctgtctcaaaaaaaaaaaaaaaaaagaaaagaaaagaaaaataagctgaatacattgcagtcctcaccctgctccccaccctgttttttgtttgtttgtttttgagatgaatctcactctgtcgcccaggctggaatgcagtggtgtgatctcagctcactgcaacctccacctctcgggttcaagccattctcctgcctcagcctcccaagtagctgggattacaggcatgcccactctgtttttctatgtcccttttattgagaatcattcaacaagtccttcaagccattcaacaagtcctttgaggtattccacacttctcctgctttctcacttacattcagtcagttccacttttcaatatcatttatttctgtctgcattaccactgtttagttcaggtcctcttcatttttgctttgctgtagctgtagcttttgacagctggtttcttccttccgtttctctccctccagttctttccctacacttgtttctagaagggctttgctaaacatttttgccgaatcacttctctgcttaaaggacagtgttttcccagtatcttcagggtagctttttcaaattccttagcaacttaaggagactcttaagagatgtattctgtgaccttctttccttagctaccttctgaggtgggtgcccatcttttgcatttctccattgtatcccaattgtaacctgtagtatttttattataattcataatcacgctgaattattttttccttgtctgtcttctcgatagacttagaaatttgaggacaggaatggagttatttttgtttttgtgtctagcagctatcctggttcttgacacacaataggttttcagtaggtaattgaattaatacattagtgaattaattagatgagaatgtattttttaattaaaaattttgcctcacattaataattttatcagtagccagtttctaaattttgcttttttacctcatgatggtttaggtgtgggatttgatggaggcaatgataaagaytgggaagccaatgcctgcaaaatccagcttattaagaagaaaggaaaagttaaggcactggatgaagaagttcacagtaacgtacttaatttgatttttgtcccctytccccttctcttccttttcccctccccattctcctctaagttactccctccccccatattttgggaccaattttaatgataatggtctgtaacattgaagggaggaaagaaaagtagttttgttactgtctggactagttttaaaatgtacctgagcctgaaaaataatcattgcaactagggaaggaaattagttaggtatattaccttcagtgtaagctctgaatattaaatgaagtatcttcagagccaccattcctgaggaagagcttttcataagacaaaaggtatttttagtgatgcccttttacacatgtcttcacttgctaattgtcttcactttggattaaatgcctagcttggatgtagtcaattttgacattgcacctttgaataggtctgatataatctggtaagtatcatgttttccctcacagttttcttctctggcacaaggagttgtcagagatgtatgccccatcaaagaggatttacttctcagtatttagatcataacattattcttacacattttatttttttcacaagaaacttgaaaacaaagcaaactttgaagtagattgattgaaaaaatatttttaaaattctccacaaaacccaggaaaccgcaagtattttatgtacctactcatatgaatgccatcataatcattgtaaaagagtacaggtagaggaaaatgatggattttgtcttttttttttcccacataagccatacgtttagctctgtagtacttgtttaacgaattaaatcaatacttattttgcctgtattgtagtgtaagattagctaggggtaaagcagacacccaaataactatacttcaaaaacagtagtataaatatctactatgtgttctgcatcctgtataccaggctgattgtagcaggttctgtaggagagaacagacattgctgtgagattcaggggagagttcccacaagttgacgagactgggaatacatagggaatgggtgctgattatatttggtcagtgaagatgtgaagggaggaccttctgagtagatagcatagcaagataagaagagtaatggcaggcgtgttgatggaatgatagtagtcctttttatttacagtattggtagacaaataagggaggctagaaaggcagattgtgaacagaatcaccatttttcaatgtcagcatattgaaacatgcctcttcgtggtcaacttttttttttttttcttcccttcccagatggagtctcgctgtaacgcccaggctggagtgcaatggtgcaatcttggttcactgcaacttctgcctcccagattcaagcgattctcctgtttcagactcccgagtggctgggattaccaggcgtgtgccatcatgcccggctaatttttgtatttttggtagagatggggtttcaccatattggccaggctggtcttgaactcctgacctcaagtgattcgcctgcctcggcctctcaaagtagtgggattacaggcattagccactgagcctggccaactggtttgtttttgaagtgtagttatctgagtgtctactttactcacagctaatttttttttaagatggactcttggtctgttgcacaggctggagtgtagtgacacaatctcggttcactgcaacctctgcttcctggttcacgccattctcctgcctcagcctcctgagtagctgggaccacaggcgcccgccacaacgcctggctaattatttcgtatttttagtagagatggggtttcaccatgttagccaggatagtctcgatctcctgacctcgtgatctgcccgccttggcctcccaagtgctgggattgcaggcgtgagccaccacaccttgctaatttttgtatttttagtagagacggggttttgccatgttggccaggctggtcttgaannnnnnnnnnnnnnnnnnnnnnnnnnnnnnnnnnnnnnnnnnnnnnnnnnnnnnnnnnnnnnnnnnnnnnnnnnnnnnnnnnnnnnnnnnnnnnnnnnnnnnnnnnnnnnnnnnnnnnnnnnnnnnnnnnnnnnnnnnnnnnnnnnnnnnnnnnnnnnnnnnnnnnnnnnnnnnnnnnnnnnnnnnnnnnnnnnnnnnnnnnnnnnnnnnnnnnnnnnnnnnnnnnnnnnnnnnnnnnnnnnnnnnnnnnnnnnnnnnnnnnnnnnnnnnnnnnnnnnnnnnnnnnnnnnnnnnnnnnnnnnnnnnnnnnnnnnnnnnnnnnnnnnnnnnnnnnnnnnnnnnnnnnnnnnnnnaacagcctaaatgtctataagtaagggaatgggatgatataataagttgtgtgtgccgggcgtggtggctcacgcttgtaatcctggcactttgggaggccgaggtgggcggattgcctgagctctggtgtttgagaccagcctgggcaacatggtgaaaccccatctctactaaaatacaaaaaattagccgggtgtggcggcgtgcacctgtagttccagctattcgggaggctgaggcaggagaatcacttgaatccaggaggcggaggttgcagtgagctgagatcgtgccactgcactccagcctgggtgacagagtgagactccgtctccacaaaacaacaacaacaacaacaacaacaacaaaaaataagttgtatatgatagtgaatgagcatatgtagcttttgaaagaagtgtactgaatctggttctgcatatgggaacatggataattcctggtatgtaaagtataggacatttaaaaacacaaaacggtactatcatttatggtctcatgttaacataatcatagtttaaaaggcatgaatagtaagactgtgtcaacttgaaaatcttctgaggagtaagtgaatgggatggggatataaaggaggttatcaactgcattttttacatttatttatttcaagtttccatataccacactgattttttacattttagatcttaaaaaatatgtaaagcacagatgactagatgttttgttaactctgagtatgggtagttgggtgttcattattcccagcaaatttaaatatgtttgaagtattttttttgaaaagggaagatgacatctgagaaaaggcaggcagagggcaaggagccatgggagtagaggtagggtaagatagaagatgcaaatgaggaaattattgaagcactacggcccaagaagatcaaggcacaggcaaggagttagcctttaaaggaaaaagtgtactttaggaatcaaagatgaaagacaaacttaaagcagataattaccaggtgagaggacaaaagctgagtaaagtggaaattgagggattgcaggtaggattgagctttatggagaatagaaaagatatgatgaactgtcagggaactggattgagctatcagtttaatgaataaggaacttggatacatgtttcttaggtagcaacagtgaaatagatatgtgaatttgaaagggtcttaatttacagaattttctgactttcttcagtattgcttggcagtagatgggagaagagaaaccgagtgtgggggttaatctagacttaagattcagcaaagggctttaaaatgggtaacagacaataaggaagcgtcaaggattcaaagtcatgattaatttatatgacaggaaatatttattatgagaaatgtgcttattgtcatagcaataattttttcttactagacattcggtaatgttcctacagcaacagtgaaataaaggtgtggtaattatcatgaatttgaaatggattcaatatatagaatcttgtgactttctccagtattgcctgccagcatgtgcaaggagatactgctttaattatagttagcttaaaaaagttgtcaaagaggccaggcgtggtggctcacgcctgtaatcccagcactttgggaggttgaggtgggcggatcacctgaggtcaggagttcgagaccagcctggccaacatggtgaaaccctgtctgtactaaaaatacaaaaaattagccaggcgtggtggtgcgtgcctgtaatcccagctactcaggaggctgagataggagaatcgcttgaacccgggagggagaggttgcagtgagccaagattgcgccattgtacttactccagcttgggcacaagagcaaaactccgtttcaaaaaaaaaataaaaaaagtagtcaaagatgttttcatttcttgcattggcctgttgaataatggtaaatggtatttttcttgaggtcatttatcaggttgccttaattacttagaacacagttaagccaggaaagaatagatgcctgagtttattcattgatagattgagccatccaacaaaaaggtatctgccatgtataccttttagtgcttaggattcaaaaataataaggtaggctgctgtttttgtagaactcaaattctggtggaagctaggttgacaacatataaatgttatagtacaatagaatataccattgtggttttatttatttatttatttacttatttttgagacggagtcttgctctttcgcccaggctggagggcagtggcatgatctcagctcactgcagcttccccttcctgggttcaattgattctcctacctcagcctcctgagtagctgggattacaggcgtgtgctaccacgcccagctaattttttcagtagagacagggtttcaccatgttggccaggctggtcttaaactcctgacctctggtgatccacctgcctcagcctcccaaaggtgctgggattacaggcatgagccgtggtgctcggccagtttgctcttaatttagacctaactctgataaactttgttatctgggttcttagccaaattaattttatatttaggaaattaagagcattactagttaataactggagctgtccatttttttaagaaaccccaagaaaagatagcttatatgaaaaataagaatcagctacttcctttttttttttttttttttttttttgagagggagtctcgctctgtcacccaggctggagtgcagtgatgtgatctcagctcactgtaacctctacctcctgggttcaagcgattctcctgcctcaacctcccgagtagctgggattacaggcgcgcaccaccacacccggctaatttttgtagttttagtagagacagggtttcaccatgttggtaaggctggtcttggactcctgaccttgtgtcccacccgcctctgcctcccgaagtgctgggattacrggcatgagccaccacatctggacaaatcagctacttttcaagataaaggaacattggcctatgccgatttcccagtagccccatactttcatagcattgctyggttcttaaatacctatttgattttggaggcactccatagttgcagtttctattgtgagacgtgtgtacactcaccagagaccaaagaaattgcagtcataaggttgtgtgtcattgggaaaatgaatttatttttacatgtttaattaaattgataatgactttttaaggcaagaattaaatatagatttaaaagattacattaattgtttttgtccttaactcttgagtatttgtatctccaggaaacttgaaagaatagtacattattacctatatatacttcacctaactttatctgttattaaaattttgtcatgtttgctttaactctgtattagttttttggttgttattgaaaccatttgccttcaatatttcagttgcataaactcctaaatctttatttatctttatttttaatttttgtgggtatatagtaggtgtgtaaacttactgggtacatgagatgtcttgatacagacgtacaatgtgttcctaagtcttttttttttttttttgagatggagtctcgctctgttgcccaggctggagtgcagtggcatgatctcagctcactgcaacctctgcctcctgggttcaagcgaatatcctgcctctgcctccggagtagccaggactacaggcgcgtgccaccatgcctggccaatttttgtatttttagtagagatggggtttccccatgttggccagactggtcttgaactcctgacctcaggtgatccacctgcctcggcctcccacagtgctgggattacgggcgtgagccactgcaccctgcctcctaagtcttttaatcactattttgaatatgcctgatctttagtttcagtgattgtatattccaagagagcagcattgtaataattgtatttaaatatagcttatagcattatctctgcagcatgatttaatattgaaatttttcttttcatattcttcagagcaacaagatatggatttggatatagaatttgatgtacaccttggaatagctcatacccgttgggcaacacatggagaacccagtcctgtcaatagccacccccagcgctctgataaaaataatggtatggaaagattttttgtgctttggaatgattgtggaaacctaataatgggggcagaatgaaggcttttagattttcattattttaataatttttcatctggaaaatttcaaacattcagaagtagtagagagcatatggagctgagagtgctggctcatgcctgtaatcccagcactttgggagcctgagttgggaggattgcttgagtccaggagttcacgatcagccgtggcaacatagtgagaccctgtctctacaaaaaataaaaaaataagttaggcattgtggtgcatgcttgtagtctcagctactcgggagactgaggtgggaggatcgtttaagcccaggaggtagaggctgcagtgagccgtggtcacacctcatgccattgccctccaacctggacaacagaatgagaccctgtctgtccaccatgcctggctaatttttgtatttttagtagagacggggtttcactgtgttgaccaggctggtcttgaactcctgacctcaagtgatcctcccgtctcggcctcccaaagtgctgggattataggcatgaaccactgctcctggctgagaacttttgttattggttttgtccttagggcatatctctctagaaatgtataatcaaattactgtgttttagagttacttggaatagtctttctccatgcagttgtgctacgtgttactttaatatgttttagaaacattttttttatttttattattattttttgagaccaagtctcgctgtgtcgcccaggctggagtgcagtggtgcgatatcggctcactgcaacctccaccttccaggttcaagcaattctcctgcctcagcctcccaagtagctgggactacaggtgtgtgccactacacccgggtaattttttgtatttttagtagagacggcatttcactgtattagccaggatggtctcgatctcctgaccttgtgatccgcccacctcagcctcctaaagtgctgggattacaggagtgagccactgtacctgtcctattttttatttttaaggattgatattctttaaaaataaatgttatttataattatttaaaatatttacataattccgaagtcacatctttaaaataagacacactaaaagaagtctacccagcactttgggaggctgagatggagggattgcctgagcccaggagtttgagaccagcctgagcaacatggcaaaatcctgtgcctacagaaaatacaaaaattagcttgatggtggcatgcgcccatagtcccagctactcaggaggctaaggcaggaggatcacctgaacctgggggttgaggctgcagtgagccatgattgccccattgcacttcagcctgggtgacagagtgagactgtctcaacaaaacaagtctagactcttctgtttcctcttattcccctcgtaggtaacattcaccaattattgagtctgttctttcatttaaaaaaaataagcaaatacatacagaatacatacaaaagtgtgtatgtgtgtatttatccctccccattttttttccttttattttagagacagggtctcactcctccacccaggctgggtacagtggtgggatcatagctcactgtaacctcaaattcttgggcacaagtgatcttcctgcctcagcctcctgagtagctaggatcacaggcttgcaccaccacacccagctaatttattttatttttgtagagataggggtcttgctttgttgctcaggctggttacaaatttctggactcaagtaatcttcccacctcagcctcccaaagtgctgagattacaggcatgaaccactgcacccagcccttgctgatttttagtttaattcagaagctgcctatttaggcttcttgtgcttcaatacttactgttgaatttgatcataatgctagcaataatttagacttttgacactgacaaggcctttatgaaagattcccgaaaacttacatctagattatgttttgagaatttggctttaagttaagacctttaaattagctgtttattaatctctttgttctagcatgaagtttttttttttttttttttttgagaaggaatctcgctctttctccaaggctggagtgcaatggcatgctttccgctcactgcaacctctgcctcctggattcagcgattcttctgcctcaagcctcccaagtagctggaattacaggcgcctgacaccacgcctggcaattttttgtatttttagtagagacaaggtttcaccatgttggctaggctggtctcgaactcctgagctcaggtgatccatctatctcagccccccagaatgctgggattacaggcatgagccaccgcacccggcaagtttttttataaatttatttttgtggttgctatcatctctaaaaaatctagtgaaaatgtttattatttggtttctaattactgtcagccaaaatatcagatctttatgtatattaagaacattgnnnnnnnnnnnnnnnnnnnnatgtatattaagaacattgttgggggccgggtgtggtgactcatgcctgtaatcctagcactttgggaggccaaggcaggtggatcacctgaaattaggagttggagaccagcctgaccaatatggcaaaaccccgtctctattaaaaatacaaaaattagctgggtatggtggcatgcacctgtaatcccagctacttgagaggctgagccaggagaatcgctggaacccaagaggtggaggttgcagtgagccgagatcgtgccacttcactccagtctgggtgacagagcaagactttgtctcagaaaaggaaaaagaacattttggcctggcatagtggctcatgtctgtaatctcaagacactggaaggatgaagtgggaggattgcttcagctcaggagactagcctgggcaacatagcgagactctctctacagaaaaataaaaaaattagttgagtgtggtgtaagcagckgtaatcccagctgcttggaaggctgatgtggaagaatcacctgagcccaggagtttaaggctgcagtgagtcatgattgagccactgtactccagcttggtgacagagcaacatcgtgtctccaaaaaaaaaaaaaawattttgataatttcatataaaatttaatttagcagtaatttttctcctaactgaaatgaactctgaataataaatccaggattggtaggatttttttttttttttttttttttgagacagaatctcactctgttgcccaggctggaatgcagtggtgggatctcggctcactgcaacctctgcctcccagattcaagcgattctcctgcctcagcctcccaagtagctgggtttacaggcacgtgccaccacgcctggctaatgttttgtatttttagtagagacagggtttcgccatgttgaacaggatggtctcaaactcctgacctcaggtggtctgcccatctcgacctcttaaagtgctgggattacaggcatgagccaccgtgctcagccggattggtagtttttatgtaccagcagtcgctacaaataatgatattgtcaactcttgattatctgttcttacagttttcaaaattagttaaaaaagatgaaaattatcccgagatcatgtctattttctcttggaatgatattttaacatttatgtttctgacattctatgacttatttggatctcaaacaagtaaatttaactatggaactgattggtttttcttagcaaattccttagttctagttcttaaattcatttagtgtaaatcagattattgttttagtttgaaaggacttctctttaaacttttactcaagaatgaatgaacagagaaataagaagaatatttagttcagctctctcattttgcaaatgaggcaacagacccaataaacttgctcctttcacatgggtaacatttgattactagtttagccacaactgaaattgttatctctagacttcctgtttatttccctactgtacccacctcccctgcactgtttgcttcagctatgccacataaacaatgctgctgatctacctgatgataatctggtaaatgagaagtagatgtaattatgttataaataacataaatagtatatagcatgttaaaaatttttgacttgagaaaaatccagttagagtaatagctattttagatttatcatacttctaacttttttgtcttcaacacttttacctcttttagaatttatcgttattcacaatggaatcatcaccaactacaaagacttgaaaaagtttttggtaagtaaggtgacctcaaaagaccccagyctttgagaatacttctaacgagagcactggggtcggttgttgggatgtgcaacaaacaccatatgtgtgtcatcaaktaatttcttggacaattccaagggcacggtggtttattggatttttctttgctaacagtggaacaattgtgttttttaatatgaaaaggaaatgattagcatttgactgtaatatacatgacaaaaggctcaaataaaattggaattttgtggagacattttttgcattctgagagattgtcatgctttaaagttcctaggatatattaatacaagaagaatcaggacaaattaaatgaaagttttatgtcgtaaatagctatatactgtatagtagtggtcatagtgctgacctgcatgagtgctttcttagggctgttcaattgaactttctccagtgttggaagacagtgtatctgggctattcagtatagtagccactktccacatgtggttgttgagctagtatgactgaggaactgaattttaaattttatttaattttaattaaattgaaatagccacatacagctaatggctatttattagacagtaagttaagtgtatgttcagttaaacagagtcccacactgttttagagtcactgatcagctggtgactttaattttgaataatgggatatggtgttcaaagaatattagaaattagtggcattttgacggaacaattctgtagaaaaggtttttttatcattaatatttctttaattgtatcttttttttctttctacttacaggaaagcaaaggctatgacttcgaatctgaaacagacacagagacaattgccaagctcgttaagtatatgtatgacaatcgggaaagtcaagataccagctttactaccttggtggagagagttatccaacaattggtattaagccacatttttaaagataattatgccaacattaatgctgagaaactttctggaaattaagtttgataagcaggaactgtgctatttttttatttttggcttttatttctcatataactattcaagttgaataattttgagaaactgattgatttattgattccccccsaccctccatttaaaattctacttacttcattcaggtttaatgtcatgaaaatgaaaattaatccaaaatcagtgtgtctaaaaactatgcatatatgcacacatccataygcaccacacgtggacatgtacacagtacacacgatggaggattagttattcccttgcttcttgctcatccgagtgttcttctcaaccaataacttagcacaatagtagcttcacagctaccacagtttattttctgggataatgcctgcttgtctctgagccaacaaagtcaactacttatttttccttttggggactttcccttggctctgaacttctatagaaaagcatttccaagcccatgagaaaatcagtattctttttgattccatccaacattcctaattaaagattaaagacatcaaagatctacaaatgtccaaatccatagtgatacctacatttcccttccccactcataactctagctttcccacttaaaagtcctttacttcccaaatacggtccagccctcacttctctcccacctgcacccaaatcttatatctgtagcaaaaagaggaagcaggaagatggagaatgtagaggcctattccttccctttccccaaggcagagtggagtagtgtgccttcccagccttttctcgtttctaacaggctttgccttttattcattgtataatccagtttgtgttccaaggtggttcttccctctcctacttcatgttcctcttttatctgttcttgattcctgtaagctctgtccctgaggattcgggttgatggagttgtatggtgtgcatgttaataattgtatatatttatatctctaatatcaaggtcagaaagagtggaagttaacagtggtgtacaattactagggcagagaataggttttggattttgatcttaggatcttttctaattctgtcgttcctctgataattcatagtattatgacgatatagataggtagatgatggagataggatatataggttcagaagtgttcatagcctgtagaaaggatgactttttaaatgatctatttttgtagttgttatctattgagcatattttgggtgtaggcttggttaaaaaagtgggtcttggctgcgcgtggtggctcacgcctgtaatcccagcactttgggaggccgaggtgggcagatcacgaggtcaagagatggagaccatcctggccaacatggtgaaaccctgtctctattaaaaatacaaaaattagcgtgggggtgcgtgcctgtaatcccagctactcgggaggctgaggcaggagaatcacttgaaccagggagttgggggttgcagtgagccgagatcgtgccactgcaccccagcctggtcacagagtgagactccatctcaaaaaaaaaaaaaaatgtgggtcttggatacaccaaagcttaggagtaagtgtttacttaaactttagacttgtttataaactggtacaaaagagcatttgtgtgaacaaaaaatttctgcgctgaagccagtatgttctaggcatttctgacttgataattgattaaatagtgctaatggatttttttccctccctaggaaggtgcttttgcacttgtgtttaaaagtgttcattttcccgggcaagcagttggcacaaggtacatataactctaacaatgactaatgtatttcaacatatttgagttacatgtttattcttcgtagactatacatgaccctttattataaaggctctgccctttattagatatattcatgtgagcatattttcacatcttccttcttgtctgttgcttaccactcttccatttaacagaatccctgaagaaagcaaatacaggccgggcgctgtggctcacacctgtaatcctagcattttgggaggtcgaggcaggcggatcatctgaggtcaggagtttgagaccagccaggccaacatggcgaaaccccgtctctactaaatatagaaaaattagccgggtgtggtagcacatgcctgtaatcccagctactcgggaggctgaggcaaggagaaccgcttgaacccaggaggcaagaggtttcagtgagccgagatcgtgccactgcactccagcctggcctacagagcgagactctgtctgaaaaaaaaaaaaaaaaaaaaaaaaaagaaagcaaatatattttggcatttaattggccttttgtctttgttgggcgcaccaaggttactttgtgaatttggatattgaatattatctaataaagttaaaatattagctttttctgtattttttgaaacatatattctagacagattcctagataattgtaccatcactacttcttgctaggatatttaggcctgatcatgaagtcctaagtgaggcrccctaagatattatggtaagagagatatttttaatctgaaaacagggtgactaaggagaaggtgctacactttcatatattggcattctgtgcacaattgaaaggaaggttccctttaacattacaaaggaaaaaaattaaaatacattgttacagaacaggtgttggcaagttttctggagtgggccggatagtaactattttaggctttctggaccatgtagcctctgtagcaactactcaactttgcagttgtagtgtgaaagcagctgcagaaaataagtaaaagaatgggcatgggtatgttccaaaataactgtatttaatacaatttttatttgtcaattaagaaaaataattaaaaaaaaaccaaaaacctgtattaggctgggcgtggtgactcatgcctgtaatcccagcactttgggaggctgagatgggtggattgcttgaccccaggagttccagatcagcctaggcaacatgacaaaatcccatctctataaaaaataaaaaatttagctgggtgtggtggtgcatgcctgtagtcccagctactcaggaggctgaggcaaggggatcacttgaggccaggaggtcaaggctgcagtgagctgtgattgcgccactgcactctagcctgggagacagagcaaggctgttgtcaaaaaacaaacaaataaacaaaaaccgtttatttataaaaataaaccctggggctgcaggtcagtttgctgacccctgatagagaatattttggatataggatcttgttctgtcatccaggctggagtgcagtggcgcgatcttggctcactccaaccttcacctcccagactcaggcaatcctcctaactcagccttccgagtagctgagactgtaggcacgtgccatcacacctggctaattaggagacggggttttgccatgtttcccagagtggtcttgaactcgtgggctcaagtgatctgcctgcctaggcctcctgaagtgctgggattacgggtgtgagccattgcacctggcccaatactgatttttttaaaaaattctttttatctagttcttatatctgaagttgagcttggggaggatgatttaaacatttgaagagtattggcccattaaattttatgtcattagtccattatttataaaaatggtttaattctaactgcttttgcaatttacaggcgaggtagccctctgttgattggtgtacggagtgaacataaactttctactgatcacattcctatactctacagaacaggtaaaattacctctacaaatgcagtgcagtagatatgaagaattattttccttaagttggaatagatggctctttggtcagatgcacatgtatatatagttctgtctagacatgaaaaagatttgtttttgtgagttctctgatgattagaatttttttctgttgtgtatccttagctaggactcagattggatcaaaattcacacggtggggatcacagggagaaagaggtgggaaatgcactctgcatggatggggaggatcttatcctcttttgtttattctttactaattcttttgttcttggagtgaatgaatgtgctgggcctctaaaaatgtgcttattttgtggggaagcatattttgacatttttctaatttgcggagtatattttgcgtgtctgcttttggcatttagaaagtgcttttaataatttcattaaaatttctgaaatttgagaaaatagttgaaattgtaaattattttttcctttgttttaaaatcatgtaggatgtatgcttagattaggaaaagagcattgtgtgctaggttattatagattgactaagtgggtagttatttgaatcatttaggctaacttttaactgaaatatgtttaagtggtctttattttttatacatgacatattgttggatttacatttgctatcttgattggctttatttgaatttgtagtgattgttcttttatattgtttatgtgtaaagtttattttttgtttttcttatttatttacttcgatgtaacttttttatagagcggcagggggagacagggtcttgctctgttgcccaggctggagtgcagtgcagtggtatggtcatacctcactgcaatttcgaactcttgggctcaggtggatcctcttgcctcagcctctcaaatagctagtactacaagcgtgtgccatcatacccagctaattcttatttttagccagggttttgctctctcagccaggctggagtgcagtggtttcgtcatggctcacttcagccttggctgcctaggctcaagtgattctcccacctcagcctcttgagtagctgggaccacaggcatgtgccaccacccccagccaatttttttatttgtaaaaaggaagtcttgctatgttggccaggctggtctcaaactcttgggcttaagggatcctcccacctcaacctcctaaattacagggattacaggaatgagccactgtgcctggctcccagctaactttaaattttttgtacaaatggagtcttgctatattgcccaggctgttcttgaactcctggagtcaagtgatccacctgcctcagcctcccaaagtgctgagatcacaggtgtgagccactgtgcccagcccagaagtgttcttttcatttaaacagacattgatatctcaaattttttttaccttatttatttattttttgaaacagtcttgttctgttgcccaggctggagtgcagtgacatgatcttggctcactgcaacctctgcctcccgggttcaagcgagtctcatgcctcagcctccagagtagctgggactaccagtgcacaccaccacacccggctaacttttgtatttttagtagagacggggtttcgccattttggccgggctaatctcgaactcctgacctcaggtgatccgcccacctcggcctcccaaagtgctgggattacaggtgtgagccgctgcacccagcctcaaattttttttacatattttaactaaatatactttgttatttgaagaatgaaattatcaatatttggagaaaaaacacagtgaaactcaagcctattaggacattttataagcaaaagtagttgtttttttttttttttttttttttttgagacgaagtctcgctctgttgctcaggctgtagtgcagtggcgtgatctcggctcactgcaacctcggcctcccgggttcaagcgagtstcttgcctcagcctcctgagtagctgggattacaggcacgtgccaccacacccagcaaatttttctatttttagtagagacggggtttcaggctgttgctcaggctggtctcaaactcctgacctcatgatccgcccacctcggcctcccaaagtgctgggattacaggcctgagccaccacacctggttgcatttatttttttwaaatgctgagctctctttttatgtgtttttaaattcacttttttgttttgtttttgagacaaagtcatgctctgtcacccaggctggagtgcaatggcacaatctcacctcactgcaacctccacctcccaggttcaagcgattctcccacctcagcctccggaatagctgagactacaggtgtactctaccactctcagctaattttttgtgtttttagtagagacgaggtttcaccatgttggccaggctggtcttgaactcctgacctcaagtgatctgcccacctcggcctcccaaagtgctgggattaaaagcatgagccactgtgcctggtctctgttttttaacatacagtaatatttactctttttcatgtagtttcaccaattttgtcagatgcgaaattgcataagtaccaccataatcaagatacagaacaatttcatcactcaataaggtccctcaacctgccctctgtcatcaacccttgtctcattcccagcccctggcaaacactaatatgwtatttttctataatgttactttttcttggatgtcatcttacatttatttttcagtttggcatctttgctgttaaatatgaatgggaaaagttactttgttttcatcactaaaacatcaaataatcacagatggtggaaaacttcgaatatactttttttggcttttatttttaatagatatataattatatgtttatgtggtgtatatttcaatacatgtgtacaatgtataatgatcagctcaggataaatagcacatttgaatgcacatttctgataattatcaagtctgcctttatatgtgcattttaagaggatagatgaaatagcagtttttataagtatacttgtgatgttctctggctattgtgtccatagttctaagttctgttatgtcctggccttgaagaaaggtgcatttttgtctctaggacatttatgtagtcttcaactaatagatttttttcctatataaggccaatttataaaaccttagcattccagttttgatgaaaaagttaatattaatgtcttgacaaattaagtagaggtgtcataattctgaaatacaagaattaaaaggatattagctttgcaaaaagaccctactttatcctgacttaaaggaagmgtaagaaaacccaagttgaagaaaggagagtttcttggtttataaattttgtctctaacagtgggtgccacatatgatataccgtgattagagagtgatatgcatctgttttgttttcaaatcagaattagtgtagactacaacttgatttgttatgctgacttgctgctaaaatctagtgaggttttgttatgatacaataaaaattaatttgccactagccttcattttctttttcttttttttttttttttgagacagagtttttgctctgttgcccaggctggagtacaatggcgtgtgatttcggctcactgcagcctccacttcctgggttcaagtgattctcctgcctaagcctcccaagtagctgggattataggcgtctgccaccacgtctggccaatttttgtattttcagtagagatggggtttcgccatgttgaccaggctggtcttgaactcctgacctcaagtgattcacctgcctcggccttccaaagtgctaggattacaggcgtgagcccctgtgttcattttatttttcgttgcacaattttgatattttaaatgtaattttgttataattataggtacacaaacttttatgtgttaagatcattgttttgtataaagttaaaattaatttatacatacttttgatttaaaaaaccggttaatattaaggaattacttgtcttttacctggaaaataaatattatattaaaaaaacatataatgtagcacttttacctgccacgcactctttgatagttgctacttcactgtacactttttgtctgttcttattggcttattgcatggaaataaggtgatctacttggctttttaaatttgctaaaattgttttgtgttgctatgattttttcttgattttatagaatattatgcatatttctacattggacatgattttctacatgtttgccaattcatgttaactatatgctttaggcaaagacaagaaaggaagctgcaatctctctcgtgtggacagcacaacctgccttttcccggtggaagaaaaagcagtggagtattactttgcttctgatgcaaggtgagcttccttagttgattcaaagagatttttagtaaaacttctcattctgcaggaaacccaagaagtcattgtgtatcagtctagttgtgctctgtgagataactttttaaattaaagaaatacaggtgaccattttggagatggggctgtaaggacactttttctgtcatttcaaagtatgtgggtcagtttactaagaacacatatactgcttgagacttgttccagtgtatttattttagagctcttacatttttttccttcttatttcaggagccttatccaggttttgaagggaggagattctagattgaagagtaaaatggcttagttagtatcccaatagttatagcatagttgctaaactattgtagttttagtctaatgtagatactcatcttttacatttagaattaatttgcagcataatcatttttataaagggatagtagtagactaagatattttgagagaaaatgcagggggatgtttacatgcatttgtaaatgaaatagtaatgaggataaaataaaatcaccgaaattgcaaacaagtatttgagtcatccactgtacctgaaaataagagaaaataataaaaataagaaaataatgccatttaggacatcagggaatatattatctcagtgggaaaacaagctttactctttaatgtttttacaggtgtgtaaggtgtgtagtcagggctaagatgtgtaagattacacagttgacagttatggcttaaatacactggaattacagaaacatatcagccttttctcattcatttatacattcatattgaacactgggtgaagtcatatgctagcgtcaggagataatggtgagtaaaaataaaaatattacttttccttaggagctcttccatagtgaggaggcaaattttaaacaatgatcacagaagtgtagaattccagctgtgacaagagctgcagaatgctagtaacagagtgatttacccttggtgggtaaatttctttaagggaatgatgtttgaactgagagttaaggagagattaggagttaattaggttaasaggtagagggaggaacattcattctttgcaaatggctcagcctgtgagagtttaggatggctttgagtgtggccagaatagagagagtgagaggaagcttggggggagatgaagctggagaaggaggtatagggattacggtaaggcactttgttgtctctctgagagccaaagggaaactgtcaaatggtttgttgagtgaaggagaaatctttattagagttgttgccttttgatatcaattttggcagaaatggaggatggacggagagagatcagagagaaagtgggtggactaattgggagatcgctgcagtagtccasccgaggagctgatgggagcttgaatttgtctggtggtggacatagaaactaagaatatttggaagttaaaatttcaggacttggtaatggatagaatgaggaggaaacaaccatgctttctgatctaatctgtttggtttagattgctatgcagagttccttttattttttgtccacaatgaccaccttccccatactttcctgtaggggttggcattagtaaccagaaaattctctgagatactgcagagtgatagagtttatattgaaatttggttcttgtatccaaatgatagtttcatttgtaataatgatccttggttatcgattgtaatatctccttgaaaactttatagtgctgtcatagaacacaccaatcgcgtcatctttctggaagatgatgatgttgcagcagtagtggatggacgtctttctatccatcgaattaaacgaactgcaggagatcaccccggacgagctgtgcaaacactccagatggaactccagcagatcatgaagggtgaaagtttttgtcatgttatagcttgctgtccttactggaaagaatatattctacttcctttcctagcatattaaatctagtaatgaatgatgagtggaatcttccacatgattagtgaagggacaacgctaggaaaagggatgattctttagagaaattatctgctgtttttacaatcgtcttcaaactaattaatgatttgttatttgtaacattataaaaaggttattaacacttgatactttaaagatactttataaacataaaaatagttaatgttctgttcctttttattctctttgtgctttagttttcttatatataacatgaggataatatagcctgcctcattaaggttgttttgaggattaagaagctactatatggctgggtgcggtggctcacacctgtaatcttagcactttgggaggccgaggtgggcagatcacctaaggtggggagtttgagaccagtctggccttgccaacgtggagaaaccccgactgtactaaaaaatacaaaattagctgggtgtggtggcgcatgcctgtaatcccagctactcgggaggctgaggcaggagaatggcttgaacccgggaggcagaggtttcagtgagccgagattgcgccattgcactccagccttggcaacaagagcaaaactctgtctcaaaaaaaaaaaaaagaagcttaaaacagtgtctgacacacttagtcgtatgtaatatttgcttctgttaactattataattattatgatttggattattttattcctttctgatgggattgtggtaggaataaaaactaacattggccaggcacggtggctcatgcctgtaatctcaacacttagggaggccaaggtaggaggatcacttgagctcaggagtttgagaccagcctgggcaacatagtgagaccttatctctactacaaactaaaaaaaaaaaaagtccaggtgcactggctcacacctgtaatcctagcactttgggaggctgaagcaggcagattgccagagctcaggagttcaagaccagcctcagcaacatagcaaaaccctgtttctactaaaaatacaaagaaaattatgggcatggtggcatgtacctgtagtctcagtgactggggaggctgaggtgggagaatcacttgaacccaggaggcagaggttgcagtgaggtgagatcgtgccgctgcactccagcctgggcgacagagtgagactctgtctcaaacaaaacaaaacaaaacaaaacaaaactatgagccgggcatggtagtgtgtgcctgtagtctcagctactcaggtggctgaggtgtgagaattgcttgagcccaggagattgaggctgcagtgagcggtgatcttgcggtgatcacttcagtctgggtgacaaagaccctgtctcaaaaaaaaaagtaaaaataagaaataacatttattgcataactctatatatatatatgtcagattttttgctttattaatccatactacaatccatactgtgaagtaattggtctcttattttatagattaataatttccccagtttagatagtaaaggatagaactacagtttgggtgggttgcactccaaaacttaaagcttgtcccagttgactgagtgcggtggctcacgcctgtaatcccagcactttgggaggccgaggtggttggatcatgaggtcaggagttcgagaccagcctggtcagtatggtgaaaccttgtctctactaaaaatacaaaaaattagccgggcgtggtagcacacgcctgtagtcacagctactcaggaggctgaggcaggggaatcccttgaatccaggaggccaagattgcagtgagcctacatcatgccactccactccagcctgggtgacagagcaagactccgtctcaaaaaaaaaaaagcttgtctcattcacttgttgtaactgcacattkcaagtatgaagttaattaaaagtgacttttactgttatttttttccacagagtaaaatatgttcacccartcttttaggcagtcatgtctattgcatgaacttttgttatattttatttaccaagattatattaaaggaaacttttagttgtgtacaaattcttttatttgatttgtttttgttttaattatgtgatttctattactataggcaacttcagttcatttatgcagaaggaaatatttgagcagccagagtctgtcgtgaacacaatgagaggaagagtcaactttgatgactatactggtaattrcatatgaattattttattatttcagtgtctctgacagtaggaggtgccattaacaacctgaaagttcattgcccttaatagccttgtagaacaactacagctgccagccatcagtggagcccagccatcttggaaaaagttctttagtgtgtgattctacctatataagatatctagaatagtcagattcacagaaagagaaagtagattaatggttaccaagggctgtggggaggggaaatggggagtcactgtttaaagggtacagagtttcagttgtgggatgatgaaattacagaaatggattgtagtgatggttgcacaataatgtgaatgtgcttaatgccactgaattgtacatttaaacatagttaaaatggtaaattttatgtgtaggtcacccactgtgtaccagggactgtcctaggtactgtgaattctaagaagaataagacctggtcccgttgctgggcagcttatgtgtatctgcctggcctaggtttcctttctgagtgtataaataagtaaaagtgtgaacttccccagaggtctttcagttatttgcctgatgcctttggataacctgtaccctcctgcatttttaaggtagaggtgagagtacaacactactcttttttttaggatggagttttgctattgttgcccaggctggggtgcagtggtgccatctcggctcaccgcaactgctgcctcccgggttcaagtgattctcctgcctcagcctcccaagtagctgggattacaggcatgtaccaccagaggaattgtatctgcctctgtagacagaggtggttgttgaagatggttgagctggaagaactgggagagtagcagtaaattcttttatggtatttatggaaatgaggtcaggaaaaagatttgttttataagggaagaaaatgagacaaactttgggaagttcacggttttaaaaagtacttttggctgggtgcagtggctcatgcctgtaatcccagcgctttgggaacccaaagcgggaggatcgcttgagctcaggaattctagaccagtctgacctcctttttactaaaaatttttaaaaaattagctgggtgtggtggtgggtgcctgtagccctggctactgaagagcctgaggtgggaggattgcttgagccctgtagatcgaggctgcagtgagctctgactccaccactgcactgcagcctggttgaaagacctgtctcaaaaaaaaaaaataaaaaagagtacttatatctgtattatgtacataaaagttctgtaataaaacaggatagctgtcatcttttttgttgttaggatgaggagattgaggctttcagtttgtcaaaggtcacattgttagtcatttattgaaccaaactactccccatgtattcattgttctaagtgctctccatcccctcccctgtccatcaggcattctttcttttgcctgtagtgatggcttacctcatctcaaaagggatcaggcttttctcaaaagcatcaaatttagagctttgggcagcttctttcagaactatcccaactatcctcagccaccagaaatttctaggactaattttaaggaaacaaccgtggccagctaatctcactgtcttacatccatgtcattctttgtcatcatctgcaatacaggtctttctggtagttggtctgcctttttttttttttttttttttttgctttgcttttatattgagtctttgcctttgcatgaccctgatccagccttttactgctgtttcctttcttctcaaacatttgtaattaatgccaaggtctgtggaaaacactgtaggcagaggtacacaaacaggcttggtctagtgcagtaacagcaagaaggccagtctggctggtgtggcctgagtgagargggatgtgctaggtcagagtaagcaggagacaggtcttatgggacttgaaggccaaagtaagtagttcggatttgattataaattatttgggaagctagtgacactttttattttgtttggttttgttttctacttgctaattttttaaaatagagaaacataccttctttcattattgaaattcaaaacggagaacatataattattcaaaagataaaaagtaaaacacataccttggttttatagtataactaactaagataaaaaagaaggtggactggctgggcgtggtggctgacacctgtaatcccagcactttgggaggccaaggtgggtrgattacttgaggtcaggagtccgagacgagcctagccaacatggtgaaaccctctctactaaaaatagaaaaaaattagctgggcgtggtggctcgcggcctgtaatcccagctactaaggaggccaaggctggagaatcgcttgaacctgggaggtggaggttgcagtgagccgagattgcaccactgcactccagcttgggctacagagcaagactctgtctcaaaaaaaaaaaaaaggtgaggagatgaagagagcaggggcagagtagacagactgaaaatggttcagagagagcagcaggatgaggcccacgaggaggtacctgtcattctcctcagccagatttggaattgtttgagtccagaagctctcagtgccttgaccactatatttacttggtgggtgattagggaattttagttgaccagttgaatgaatgttgaatgagaatttctcacagatagaaaactagcctgtgtggaaggatttctggacaagacacatggagaacaacatgtaaatagctatagaaactgaaaatgaaaaagaggacagacttcattggagggtctttatgtttttaaaggatcactgtaagagatccttctggtagcatatggagagcagactccaggaggtggagaacagaagagagaactggagaatgttgctgtcgtccagggagagatgctgggtttgaagataaatgtggagggatcagaacaatcaagcattttgactgaagcattaggggaatggggacggcaaagactgagaggagagtgggtttatgttactctacagagcacctttctgggcaccagaggggaaataaacgtaactgagataatrtttttcccagacaggtttattgagacataattagatataataaaattcaccattcctagtgtataactctaagtttgacaaacctctacaacatagtcataatcataacctctacaaagtcaagatgtagaacagttccatcactcccaaaatttccttgcaccctattgttgtcaacccctcctccagctccagccctctacatctaatgatctgttttctgtgtccctctacttttgcctttaagataactttcaaagagaagaatgtaaaaataactaactaaggtagaatgtaataaatactgtaattgtgtggggatgtagagaggtgagtaaggtcagttacaagtttgggggcgccagtgaagttgtgacttatttaatttacttttcaaaattacagagaactgtgctttccaagaggaatattaattctttaaaacagcagtattcttcctcatattggcagtggatactcacaaaatgcgattgcctagttcacatggttctttgctaaataattatgtacacaaacttttatttcagtgaatttgggtggtttgaaggatcacataaaggagatccagagatgccggcgtttgattcttattgcttgtggaacaagttaccatgctggtgtagcagtaagtgctttttaaaattttaattatgttgaatattagagaatatctgtagaccaagtagtagtctaataacatactgtgtaaaactatgttttgttaatgtgttatcttttcccttttgtgataaaaaaagaaggtaaggggagaaatttaccagctgcttggaattatttatccatggaagatctgtagaaaaggtccctagatatacagatagacctcctgcaacggacttcatgaaaggccaagagggggagagtttgtgtactgtcctagacttgtagcctagggagcttgcctacatgtgtaagagccatcgttgggttttgcttagcattgttcacttgccctagacagatggcctgcatcatgtgtgaacctcagtgcaattttactttgtgggcacattactgcaaagaaaggtagtctgcttttttttttaaatcagattttattctttaaattgttcttttagaagctgaaattcagtatcaaaaatgtgtattgtcagtgcagaagcataggtgtatgagggtcttttattccaataaaagaccaatatttgcccacgtagtttccttagaaagagacagtttatgtgctgctgatgtcaactgttatgaacagaagacctttacattcaatttctgcttttaggattgacttccaaagttcctgacataacttatttatttgctgaggcataaatatttattaggagccatttatttaagcagtgagtgaaactatctggtcacctgcccttgcatctcaacaagctttgctcttttctaagactacaccaaatacctcctcccctcctcccccaaaattatatggtcctaaacagaaagtctatgtaatgttgaagggtagaggtctaaaaaagtgattgttttgtctgggtgttgtggctcacacctgtaatcccagcactttgggagggcaaagtgggaggatcagttgaccctaggagtttgagcctgggcaacatagcgagaccccgtctctaccaaaaaaaaaaaattatcggggtgtggtggcaactccctgtagtcctagctacttgggaggctgaggcaggaggatcgcttgagtccagaaggtgaggctgcagtgagcctagattgcaccgctgaactccaacctgggcgacaaaaccaggccctgtctcaaaaaaaaaaaaaaattttgaacacgggaagaagaaagatgtaaacacgttagtggtggcttagatctattactgaatgagccctgtattcagaaatagaaaatttgattaaacgcttcatctaaygctaagacaatttgggggcagaaattatatactctgttagaattctctaatgtaagattttttgttgttttgtggatgccaagactactgtagtaaacaaacattagaaatccccctgtggtttatcagacaaaatagtaccatttattttatcctgttttacatttttgttgttgtttcatgacacatttacatgttttttttttagtatctatatcctgaataactgactacactctaatcattcttaactcatttatgccagaggttgcaaaatttttttgtgaaaaatcatcagaccttggtgmtgaccttgagcagtaggatataaataactcccacatgcttaacgttccagtgatggaacactaggcataaatgatttaagtatagcctacttaatatgcttttcaaaatkttaattttctctaggttttgtagtggcattcagtggaatttatagcattaagttactctattgtgatggaaatatgtcattttgtgtatttataaaaagttgttygcagctgggtgcagtggtgtgtgcctatagttccagctcctcggaagctggggcaggaggatcacttgagaccaggaatttgaggccacagtgccctagaatcatgcctctgaatagctrctacactccagcctgggcaacaaaccaagaccccatctttaaccaaaaaaaaaaaaaaaaaaaaaaaagttgccccaactaaaataataaactattaattagcacagataaatcttgagattacttttttggggtttattacttttaaatatctggtaagcctccagatttctatctttctctcttctttccccatctttttattttgaagaatatgattccaatgtaacatttatattataaactgggtgaaaaggtttggtttacatttatttgtgggaaaacatttagcattttagtgtcggtaacttaattatgtataataaaatatattaatggaaaagaataataaaaaataggagcattttatcttcaatgattttctttacatgatgttgtaatattgttaaaaaatgccaaatcaaagttatttaatatttttgggggaaccaagtaaaacgattctgttcaaatttgtgggcaagcaaaagttaagggctatgaaataagggcacctttaagttctttattgctgagaaggaggaaagctgagatgggtgagagatggggagggccacttgcctgaagaggctggtgaaaggctgtcaggttaggtgagctccacagttagaattaaagcaacactaaatgtatacattggttgagcttaaagtttttgctgcctaaaagataatttttctgtttttgattttccgatgtttagtgtaaaaataattagaatggaaatttactgaaatgaaggttaaactacgttttgcacagaggcatactgctccctacttcattccccctgccccatgccacaaaagttgaaaatagtgagccctgttaaacaagatttctaaaatatattgacttcttttgggaaatggtcatatttatgaatacgttgtacttttaaagtgtttaatttttctctatatatttgtacatctgttacctgatttgaaacccctccctaacatgggtattacatgaattttcattttaaagattaggaattgggaggttagagataacacacaagctgactcagaaccatgctctttccacttctcaaaacgttttatatgtgtgggtatgtttccttataagaatgtatgtgtccaggcgcagtggctcatgcctgtaatcccagcactttgggaggctgaggcgagcagatcatgaggtcaggagattgagaccatcctggccaacatggtgaaaccccatctctactaagctgggcatggtggcgcacgcctatagtcccagctactcaggaggctgaggcaggagaattgcttgaacccgggaggcggaggttacggtgagccgagatggcaccactgcactccagcctggcgacagagcgagactccgtctcaaaaaaaaaaaaaaaaggaatgtatacatagatagttgtctaaagagactgatagtaaaatgttagccatgcttatctcaagtggtaggattttgatttttttttttwaaatattttaatctgggttgtttttattttctaacgtgtcatttttgtaatcagaaaaagcaaaaactatacattgaatccaaagaagtccgatgaaagagtatttgaaggaaagttctgtgaccaagtcatattttctctgcagacacgtcaagttcttgaggagctgactgagttgcctgtgatggtggaactagcaagtgacttcctggacagaaacacaccagtctttcgagatgatgtttgctttttccttagtcaatcaggtgtgttaattttaaagacttaaaaggaaggaaagttattctttctaataattctagcatatcttggcaaaagctgatatttaaagataaactggcattgcagatgacttgacgaatacasatttattttaatgttacataattctttatgaattagtaaaaatgaacaccttttgtgttcaaagagctggattttcaatgacagagaaggaagagagatcctgacaagccrtattactttaaagttttataaatttattaagtggatgttttgtattttatttaaaacaagtaatattgttgaaagtgtggtcaatttgtttttgctcctaagaaacagcatatgttaaaactgttctgtgtgttatggttggcctactttttacacaggtgagacagcagatactttgatgggtcttcgttactgtaaggagagaggagctttaactgtggggatcacaaacacagttggcagttccatatcacgggagacagattgtggagttcatattaatgctggtcctgagattggtgtggccagtacaaaggtaaannnnnnnnnnnnnnnnnnnnnnnnnnnnnnnnnnnnnnnnnnnnnnnnnnnnnnnnnnnnnnnnnnnnnnnnnnnnnnnnnnnnnnnnnnnnnnnnnnnnnnnnnnnnnnnnnnnnnnnnnnnnnnnnnnnnnnnnnnnnnnnnnnnnnnnnnnnnnnnnnnnnnnnnnnnnnnnnnnnnnnnnnnnnnnnnnnnnnnnnnnnnnnnnnnnnnnnnnnnnnnnnnnnnnnnnnnnnnnnnnnnnnnnnnnnnnnnnnnnnnnnnnnnnnnnnnnnnnnnnnnnnnnnnnnnnntttaaccatttttgggaatttttatttacctatttatggtttctaataaataatgtaaaaatatacatactacctctgaaagtttgtaaggaggaatacacctttggtataaaatttggcaactgccaggcatggtggctcacgcctgtaatcccagcactttgggaggctgaggcgggcggatcatttgagctcaggagttcaagaccagcctggccaacatggtgaatcccgtctctactaaaaatacaaaaattagccaggtgtggtagcacgtgcctgtaatcccagcatacccgggaggctgaggcaagagaatcacttgaacctgggaggtggaggttgcagtgaagcgagattgtgccactgcactccagtctgggtgacagagcaagagtccatctaaaaaaaaaaaaaaaaaaaaaaatttaaaatttggcaattaaaaaaaattttttaatgagtattgtatgacaatatctttctctttagatattgctctggggaggtttaaaggtactgtcttgtgttttgaaggcctggtaagactactttgctctttggaattggaatatgcataaatttaggtggctaataaaaataggaaatcttagaaagttgtataaatacaagagatgttatccctccacaagtgtttttttggggttttaggtttgtttggttgttatttagagacagggtcttgttttgtcacccaggctggggctggagtgcagtgacaggaatcatagctccctgcagcctcagactcatgggctcaagtgatctctgcctcagcttcctgagtggctgggactgcagatgcaccaggctagttttttttttttttttaagatggggtctcactatgttgtccaatgtgttactttttatgatttcacatttttgttttctcaatatttttctacttaagtttgatatttcttgctgattatctaataagatgttgggatattggtggatttgagtttaattaaaggattgtgaaagacaatgttaatgtgtacataactgcatttgaattcttttccctcaaagattctcatagagaattttttgtagaaagtttgtgattcttatataaaaattcttcttttctttttctttttcttttttttttttttttgggagacagactctcactctgttggccaggctggagtgcagtggcgtgatctcagctcactgcaacccccgcctcctgggttcaagcgattctcctgcctcagcctcccaggtagctgggattacaggcacctgccaccacgcctggctaatttttgtatttttgatagcaatggggtttcaccatgttggccaggcttgtcttgaactcctgacctcaagtgatctgcctgcctcaacctcccaaagtgctggaattacaggcatgagccacactgtacctggccccccacctttttttttttttttggagacagggtctctcctctttatcatccagagtacatagagtgcagtggtgctcatggcttactgcagcctggaccttcccaggctcaggtgatcctcccaccttagcctcctgagtagctgggactacaggtacaggccactacccatgcctggctaatttttgtatttttttgtagagacggagttttaccatgttgcctaggccagtctcgaactcttgggctcaaaygatctgcctgctttggcctcccaaagtgctggggttacaggcataaaaactcttgagtgagatttttatttcttgggtatttcgatattgctaacactataatttacagagtgctgaaacttgaattttctccatatggtaattaaaacgtgttacatgtttgtgcttgggtttccatcctgtggctgaataaatgaccagccacctttagtagcacttaaggatttgattgggggattggaatcccagaggctctttatttataacagattgtgaaacaagggctacaacgtggtgtatgtgggatatgggattgtttggatggatgccattgacttaatcttttcataaaatgtttctggaattgtgagctgccaagggaaatatatattttacatttctcattcctttgtttatgagaactttaatttgcctcaacattttatgatgatgattttcaaatatacagcagagttttaaaaattttacatacaggctgggtgcagtggctcacaactgttatcctggcactttgggaggctgaattgggaggatcacttgaggctaagagttcaagaccagccgaggcatcagagtgagaccttatctctataaaaaatacaaaaattagcggggcatggtggtgcgtgcgtgtagtcccagctactcagggaggctgaggcacgaggatcccttgagcnnnnnnnnnnnnnnnnnnnncaccactacactctagcttggatgatagagtgagaccctgtcttaaaaaaaaaaataaaaattttacattagcattggtatacccaccatctagcttctaccatagcatattcaccaattttaagtgtacagttttagtaaattcatttggctgtacaactgttatcacaatccagttttagaagatgatcacctgaaatattcctttgtgtttctttgtagtcaatccttactcctaccctccagcctcatactcaggaactactgttttctcttgctgtattatggcattttccagaaaatttttgtaaatggaattgtataacacgtcttgtgtgtctagcttctttcatttagcctgaagtttgttttttaaataaagccagttaaatttagcagtgaggtattgtataccaactttagtaacgctaatgttaatgagttctagtgacccactattggactaccctagcctgaagtttttgagatttgttcatgttgttatttgtatcattagttctttctttctgcaaatcttttttttaaatatttttattttgaaataactatataggaagttgcaaagatagtacagagaagtcttacatactttttacccattaccccagtggttaccacctatataagaaaaattagcatctttttagtacagactttaatttttttcaaaaataactcttaaaaaaattgagtaagtatggcaatttagtatttcatttttcttggattctaaagtaattttattcaaatgtcttagacattttgggcttagttacttacaataagttttgggttatttagtcacagaccattccaggtggcaaataagagtttttatgttaatgggtattgaaagaagtcgattattattactattattattattattttgagatggagttttgctcttgttgcccaggctggagtgcagtggtgtgatctctgctcactgtaacttccgccctctggtttcaagtgattctcctgcctcagcctctcaagtagctgggattacaggtaactgccaccacgcctggccaatttttgtatttttagtagagactgggtgtcaccttgttggccagtctggtctcgaactcctgaccwcgtgatccacccgtcttggcctcccaaagtgctgggattacaggcgtaagccaccgcgcccagccaaaagttgattattgatcctaatccctgggcccagtgatggagcacatagaagaattctgtgatcttgcctgtaaattctcaactttgcctgaaaaactgtcaggattagagggatcttactgagtttctcatagtatcagaccatagacaagttgatactactggaggaattgatgggtataaatggtaggttcagcaatttttatatgttattgcaggtgtttagaatttcaccacagtgctgacttttgttgatttaaaaaaataaaaatgtaactttgtttttggctgaacaaaaagaaaaaccaagtttaaaatttcagagtcagcattttcctggtaaactctttcaaacctcggtagattctgaatgtagggtatagcttatttttcctcataattggtttcctggtatgtattgatgaaattaaaaatatgaaattcaaattagaaattaaactgtaatagcaatgcaatggaaaaacatggattaaagttgctccgtttaatatttgtacttaaaaactagtgttcagatggtttcagttcaaacaaataaacactagtttgtagaataacatttttagttatgggctacaggaactggaatactcattatctgatcagtttggattggaaacagtttaagtattccaggggtccaagatacctctggcctggtagtatgttttgtgattaattgattaattgaaaagtaaaccacagtaggaagaagtagactggaagagtctggaatttagaatatagatgtgctcattagtctcggaggcagaggactccaaattcactttagtgttatgggaaaagattccagtctgctggtggaatataataggtgtacagggaggcagttgtggaggaccatgtgagcagctggaggctgggaagtccagcaggaggaaacagggagtctcatttaactattgggatgttaaggagttaccagactgtgattttattayagagggagtctcattatccacatcatgccaggaaatcactaatggagtaatcccttatcaagagaagagtaatagaaattcagcatataatccgcgcgcgcacacacacacccctcagcataaatttcctaaagctaaaattatatctaacactgtaactgacaacagcacaataacctactgaaagagatgtaaataaaagcctcaaatatctgaaacataaaaatgtttttcaaaataactattggattaaaaaaaatcagaactaccattaagaaagacttactagaggccgggcgtggtggctcatgcttgtaatcccagcactttgggcagatcacttgaggacaggagttcaagaccagcctggccaacatagtgaaaccccgtctctactaaaaaaacacgagaaaattagccgggcatggtggcgggcgcctgtaatcccagctacttggggtggctgaagcaggagaatcacgcgaacccaggaggctgaggttgcagtgagccaagatcatgccattgcaatccagcctgggcaacaagagcaaaactgtgtctcaaaaaaaaaaaaaaaagaaaagaaaagaaagactagaaaaaagtaaacaataaataataggggtaaaaatttagagtgtgtggccaaagtgataaatagagggaaatagcattaaattcctagcacaaattgatgaaaatgccatatttttaaatggaaagattgttttgtaaagaaatgacatatcttgggttagaattagtgttccttcaacttgcactaaaattaatttcaaacaggctaaaaaggaaaatgttaaaaaaataaaaaggaacagtgaaaacaaaagaagtaagaaaatttaataatacttagtttatgtaggatgtggaagagttatctgagtctaaaagtactacgtaaaagttaaaaaattatgtcagcaccaatataaaaggtcagtccacgatgagaaaaaatatttgagacataacaataactaccttcttttttttaattttagagaatagtattgtattgaatacgttttattcacagaaaaataaactttaatctacaatgaatgccagattatacagcagaaagcagttttcttagttttccacatagaaaggttcttactaagtgaaaaaaaccataaaattatattcagaaatatattactctgtctcaaaacatttcacatgattattcacaatactaatacaattagatcagtcattcagtcaggttaaaatataacagtaatgaaaaaaatgcaaaatctaacataaattatattaaaacccttgttacatcacaccaaaaatgcaaatttcttactaaatccagaaaaatggtaacatatatagtaatttaaggtattacattaatggtacagaataagaaagaagtggtaaactctgaaaatctgtaggcatatctgcaaacttcagacttcaaagtagaatctgaccacccaaacattaatgtagcatttgtctaatttttttgttttgaacaataactaccttcttaaaaccaatttgaataaagaaactcaagttgaaaaacaggtgaggaacaacaaagtcagttgtcaaaagagaaaatataaatggtcaacaaacatgaaaaaaaagcttagctttaggattcaagatatgtatgctaaaatagtagtgaaggttcattgtcccgcagtcaaaatggtaaaagtttgctaaagagataattctcagtatttcacagaacttgacaaaacaggcacatctcacagtcacataaagttagtaagaatgaaaatagtcttggcagtaggattgtgagttttgaaatacatacaattctgtatcctaagaaactaattgtcttttagttcaagctgtcatcaataaaatttatagtacrttttgagcctgtgtgtcagggattatacagaactgaatgcgttacatttgtctcatttaattgtcattataatcttgtaagtgtcatgtgcatttaacagatggggtatctgaggcctaaagagatgaaaactgctcaaggttataatgtaacttgacagagttcagttttaggattacacttgtactattatttaggagtgaaagcaagttataaaattgtacctgctaattaattttcttaactgtgtaaagaaaagaaaaacagtaaaaactttaaggcaatattcacaagtgttattaatagcatattattaatgtaattatttctaataacagatgagattaaatattatttctgtttacttttctacaactgtagttttccttttttttttttttaatgcaaacttaaaacataaaactgggattgaggaacaggcaataggcaaaggtggaaatcaaagagcaattaaaaaaaaaaatccagcaataccagtgcaagtaccccaaggagagtttatcaagcacttgccttttgacttacaccaaaaactaaatgtggttaggcacatgctgatttgctcatcttttccttcctttcttagggatattaggaattttataagcattcaatgggttataaggtgtttggcttttgtatctaagaaataaaggttgagtcatttgttcaagattcagaaaaggagaatagtgatagatttcccaagtactggttcagttcactgttactaagatagtttatttttgttttttggagacagggtctcactctgtcccaggctgcagtgctgtggtgcgatcctggttcactgcaacctctgcctcccgggctcaagtgatcctcctgagtagctgggaccacaggtgcacaccaccacacccagctaatttttgtattttttttagagacagggtttcgctatgttgcccaggctggtctcgaactcctaagctcaagcgatccccctgccctggccttccaaagtgctgagattacaggcatgagccaccatgcttggccctaacgtagttttaagagatagagaatatatactgtaaaaccaatgggaattttattttcagctttttaaaattaaaagttctaaattcttcagatgcagctgcaactaattgtcctgcttttttgtgatgtttcaggcttataccagccagtttgtatcccttgtgatgtttgcccttatgatgtgtgatgatcggatctccatgcaagaaagacgcaaagagatcatgcttggattgaaacggctgcctggtacaaagacactcatatattacacttttgttgtctaagggagtgggtaataggtaaaattctcttatccttgaagctgtggcttgtagctatttagtcaataagatctttctacgtttgctccratgtattaaaaaaatacccatactgattgatagcacagaggaatagaaacactggtcttttgttatttgctgccaatatattgttattttatttgtttggtttattgtccttttttgctaatattacttcttagatttgattaaggaagtactgagcatggatgacgaaattcagaaactagcaacagaactttatcatcagaagtcagttctgataatgggacgaggctatcattatgctacttgtcttgaaggggcactggtaagttttctcagttctaattagtatcagtccattgacctgcagacctgacacatagtcatacttttacattaaatgaatgaaataggtagaacttttgaaagtgcttctgtatttatgcattgtggtttgtttactttgagaaagtgcaacagagaactctgttcagaagtgaaaatcaaaaagagtacattttaacatgataaacttggatttagcaagtaacttgggttaatttgttcaaatatgaataaagattaagttctctagataagaaatttaattgaggtcaagctgggcacagtggctcacgtctataatcccagcactttgggaggacatggcaggtagatcaaacttgaagtcagaagttcgagaccagcctggccaacgtggtgaaaccccatctctactaataatacaaaaacattagctggatgtggtaatgcatgactataatcccagctacttggggaggctaaggcgggaagatcacttgaacctaggaggtggaggtggcagtgagccgagatcacaccactgtactccagcctgggcgatcgnnnnnnnnnnnnnnnnnnnnnnnnnnnnnnnnnnnnnnnnnnnnnnnnnnnnnnnnnnnnnnnnnnnnnnnnnnnnnnnnnnnnnnnnnnnnnnnnnnnnnnnnnnnnnnnnnnnnnnnnnnnnnnnnnnnnnnnnnnnnnnnnnnnnnnnnnnnnnnnnnnnnnnnnnnnnnnnnnnnnnnnnnnnnnnnnnnnnnnnnnnnnnnnnnnnnnnnnnnnnnnnnnnnnnnnnnnnnnnnnnnnnnnnnnnnnnnnnnnnnnnnnnnnnnnnnnnnnnnnnnnnnnnnnnnngctctttcctattagaaaatcaaagaaattacttatatgcactctgaaggcatccttgctggtgaattgaaacatggccctctggctttggtggataaattgatgcctgtgatcatgatcatcatgagagatcacacttatgccaagtgtcagaatgctcttcagcaagtggttgctcggcaggtaagtcgggggactgtgagaacaccttggggatcaaagaggggagttacgctagcttatttgaatgacttacaaaacatgtttacacgtgttaactcatttactttggaatacagcctttgaggtttacatgtgaggaatcagatacttaagagtttttttttttttttttttttgagatggagtctctgtcacccaccctggagtgcagtggcacaatcttggctcactgcaacctctgcctcctgggttcaggcaattttcctgcctcagcctcccaagtagctgggattacaggcacactccaccacgcctggctaattttgtatttttggtagagatggggtttcatgttggccaggctggtgtcgaactcctgacctgaagtgatccacctgcctcaaccccccaaagttctgggattacaggcatgagccaccccgcctggcccagatacttagagctttaagaagaccaaggtcatagatctcatattgggcagaaccaagaccagaactgaggtcttggtctccacatcctgtcttcttttagttaacatatgctgttcctttttaatttaatacttctaaaacatttaaaaatgtattttaaaatatttttaaatatatatttcagctggttgcagtggcacatgactgtagtcccagctactctggggactgaggcaggaggatcacttgagtccaggagtttgaatacagcctgggtagcatagtgagaccctgtctctaaaacagtaaataaaataaattaaaaaaaattacacacacgcgatatatttcaggggaaatctaacatctaggttttattttaatattatataattgagttttcttcagatcagttggctttatatataaattccaaaagatattattccctaagcacaatgtggtggtaatgaacttgagctttgaagttaggcaaacctgcagtcaagtactaagcctggtatttcttagttgcatgagtttaaacaaattactggatcccataacgcttctgtttcctcgactataagtaataacaatcagatttactacacaggaatttaaagaagtctgtccgtgaggcttcatatggattatgcagtgcaatttttgcacattcgtaagctatagmcctgcctttgcccaccagtgatgttgtgtatgtgtgtgattttctttcctaggggcggcctgtggtaatttgtgataaggaggatactgagaccattaagaacacaaaaagaacgatcaaggtgccccactcagtggactgcttgcagggcattctcagcgtgatccctttacagttgctggctttccaccttgctgtgctgagaggctatgatgtaagtcatctaccactgcagaaatcttgggatggttttttacctggatacattctgatttttttctcctaaatttttaacaatagtgtttgagaaatctatcaaatatatatctgtcacctgttatattttcatggcccaatttgtaggttacatcacaacatcttcttacccatagaacttgaaggaaccttggggttcacctccaagattgtgactcaccttgggtagtctccacctgttttcttaatataacctctatctcttaacagggcagctattggcatttggcaggacaattcttttttgtttggaactgtcccacacattgaagactttgtagcattcctggtttctcagccattgtggcaaccaaaacatagtgcttttgtttttagtgtcccctatgagggctactacttctgtagaggaccacagtagctctttctgtgtgaactggcacctttagaatgctttttcctaaccaatttcagtttttttcaggacacattatgtgattatattttctaatctaattctttgtagtctgtaataaagatggttaatgaatgtattgttttctgtttttataaacaaaaataatttgcttatagtaaccacccccttccccagtctatataatctctcaaatcttgctttttttttttttctttttgcaggttgatttcccacggaatcttgccaaatctgtgactgtagagtgaggaatatctatacaaaatgtacgaaactgtatgattaagcaacacaagacaccttttgtatttaaaaccttgatttaaaatatcaccccttgaagcctttttttagtaaatccttatttatatatcagttataattattccactcaatatgtgatttttgtgaagttacctcttacattttcccagtaatttgtggaggactttgaataatggaatctatattggaatctgtatcagaaagattctagctattattttctttaaagaatgctgggtgttgcatttctggaccctccacttcaatctgagaagacaatatgtttctaaaaattggtacttgtttcaccatacttcattcagaccagtgaaagagtagtgcatttaattggagtatctaaagccagtggcagtgtatgctcatacttggacagttagggaagggtttgccaagttttaagagaagatgtgatttattttgaaatttgtttctgttttgtttttaaatcaaactgtaaaacttaaaactgaaaaattttattggtakgatttatatctaagtttggttagccttagtttctcagacttgttgtctattatctgtaggtggaagaaatttaggaagcgaaatattacagtagtgcattggtgggtctcaatccttaacatatttgcacaattttatagcacaaactttaaattcaagctgctttggacaactgacaatatgattttaaatttgaagatgggatgtgtacatgttgggtatcctactactttgtgttttcatctcctaaaagtgntttttatttccttgtatctgtagtcttttattttttaaatgactgctgaatgacatattttatcttgttctttaaaatcacaacacagagctgctattaaattaatattgatatattcagtattctcttcaactttgtcacgaggaagaatttcctgtagttaattttaactttccttcattacattgttgcataaaactagtcccttagtgccagtttggaagttacttgcaattgtttggaagatttgcaggtcgctgacctcatcatttcactctaagtatatgtggtaggctaagctcagaaaaaggtatgtatgctttacactgataggcaccaaatttagtattgtatcctaagtatttttcmtcttctgtattttctgtgctctacccctgaaatatatttaggaataaagaagatataaataaagtgatattggggtatgttcagcttgtaagtgtcagaaatggaagttgacaatttggattaaaatatttaaagtagaatgttattatttgatacccccaaaattgtgagtaataatttcttaatggagcttttctggccagatcttcagggctataggagagtgtgtttgtttttggtgaagtccttctttttcaaaggtttttacttttaaattgtgaagataagctatttagcacaattatttaagtaagctgttttttcctttcttttctttcttttcttgttttaacttctgggtgaggttaagattttctaatagttattgttgttgccagagaagcatagaattctgcttgtgtcttagggttagagaaagatttgttatattttgaggtaatttggaaggactttcatacatggtgactagaaacctgatctttttaagaataaaatagggtcactatttacattatatataatatatggctattatagctatattaatctactttaattgtttctaagattattttgtgtaagtcagctagcgtgtgtatagtgtcatttcttatgttttgtatattaacgttttacaaacacaatttgtgtgggtttgtagcatttcttatagtttaaagtatgattcagcattctaagttaaaactaatatgtgaagtcagtcattagtctgcataatctctgtctccctctgtgtgtgtctttctataaagcacatgtgtacacacacacacacaaatatactgaaagctagggtaagttctaaactgaatatcaaaaaccaaaatcaagaacaaagaagtgatattttccaaacaaacatggattctctgccgggtgcagtggctcagcctgtaataccagcctccactttgggagtctgaggtgggagtattgcttgagctcaagagttggagaacagcctgggcaacatggtgagacctggtctttacaaaaatttttttggccggacgcagtggctcacacctgtaatcccagcactttgggaggccgaggcrggttgatcatgaggtcaagagatcgagaccatcctggccarcatggtgaaaccccgtctttactaaaaatacaaaaattagctgggagtggtggcgtgcgcctgtagtcccaactacttgggaggctgaggcaggagaatcgcttgaacccaggaggcggaggttgcagtgaggcgagatcacgccactacactccagcctggcgacagagcaagactctctcaaaaaaaaaaaaaaaaaattttttttttaaatgggctgggcatggtggcttgtgcctgtagtctcagcaacttgggaggcttaagtagtaggatcgcttgagcctgggaggttgaggctgcagtgagctgtgattgtgccactgtgcttcagcttgagtgacagagtgagaccctcctgactcaaaacaaaaaacatggtttctcctctctctcctgtcttcttactctctatcccatttgatgtagtgatttttaaatgcttttgtaagttaattcttaacacaaaagagacattgtaatgaggcacaccactaaagtgagcatgcccaattaaaaccagtgtaatataggataagaaaatctgatttttcaaaaaagatactctacataaagaatccttcatataaaaagttctttcttgtagtacatttaaagttttaattcactcatgtataactgagagttcctttgagccctttttaggcagggaggcatgtctgtcatctagcgtgtggcccagtaagtgattattacattggaatcagtttttcagtcttttaaaataaattctgtgccataagaataaaagataaagagaaaaattaatgttaactatttttagcttattataactatgtcaacaagtgtttattaatacctattatgggaaagtcactgtggttggcattgaaaattacatcatctttaaagcagtatttgtccccagatggactcatcactagcaaagactaggttcattggaaggcatagggtgagagaatgggaagatgaagtggaggcgggttgttaaagtgctgtcagtgagtgattttgtctacttgaataatggtccatgtttgggggcatattgtgtttcataagaagtgaaaggtatttgcaaagtaagctacaaatgacccataaatctgttaacaacagtccttaatatgcaaagatgaaaaacaagcattactgctacccaaagggaactggtgcttggtgatgtgcagatggggctgttggttaagagagctattacaggttttctctcttaggtttcataggaggtagttactgagatgagattgttttatctttttgaatacagatctcttgtcttgagttagttctgaggatgggagtaataaaggagttttttgtttttttgtttgtttgtttgttttggctccttagtaatactcctctgacatttatttctattattcttcaaagaaaggaaaccaactgaaatgtttgctttaacaaacattttaataagttctctgggtttttttttccccttttaaaaaaattagcatataccatagcaataaaagaactaatgttaactattgtatgctacaacttaagtgatttttctaaagaagcacaatgtcattgaaagtattattgaaaaggatcatagtcacattgaatttgtgaaggccaaagaaattgaagggagtgatattttcattttatgatattcacatatttagtaaattttgtgtacaagaataccaggcagagtgttttacccatggaaacaggtttcagattactttrtttttactgttagagtctcaagtttagaaatgctaacacttaaatcagtttttttctcactatacttgaagattgttaatattttgatatcttcctagcttgatgaatttaaacatatcttcagatctgtgacagtgacagccaataggactgataatattagcttcaaaccaataatatccagggttaaaataaaaatcatagtgaaagtacgattgtaaaattatgctatattaacttttaagtctgtaataacttgacatcaaaatgttatgtaattaccataaataatggctagcgagaacatctttggaaattctcaaattacctttcttactacactgtttgcagaatgaatgtagaaatgatcctgttagctttctgaatgwtctgtggttgaatgtgtttttgcttaaataaagcttttggtatttgtttaaattacacttcttgagaagtggaaattttaggatcatctttgctttgtttcagttttgtgatttttgaaatgaatgtttagtttactgagccagttggtcatttcttcctcatgtcgttaagtccagtgagtaagcctgaactgtgaataaattaccaaaaacttgcttagaatttcattttgaagcaatttgctaatatttgaagtgtatacacatttgtagttatgttagaaattgtattgtactaagaatgtaatcaatgtctactttagttgtaaacatttctgatgtcaaaactttattcattactgttgattttaagaataagaaatcactgcctaaatattaccaaaagccactgtctctacccgaacttcccagtttgggaaagaatcgttagataaaacaaaggctctgccctttctgataccaaactccacagatactttctcacatcttttaaaacattttgcaataacatattgtttataggaagtttacggggtatgcaatgattaaaacttttaagtgaattgatagttgcaaaagaaaggataatatttaaggtcagtgagtagcaagacaatctaaagtttctgtaatatctggctctctgttaattatagagcaaagtttcccttacagaatccttttatgaacagcaagctagagtctatccctagtggttatagcacctgctgcgtttttcaggagacagttaggccagggtgatttgaatggatagatgtgctgttttgcctgcttgtagaattcagcccagtctttggtctctctctctctctccctcctccacctctccctctctcttcttctgcaccagagcctaaggctgcgccaccaagatgcgtcattttttccagaggcttcttttttttttttttgagatggagttttgctctgttgcccaggctggcatgcagtgctgcaatcttggctgactgcaacttccacctcccgtgttcacacgagtcttttgcctcagcctctggattagctgggattacaggcacgtgccaccatgcctagctaatttttgtgtttttagtagagacggggtttcaccatgttggccaggctagtctcaaactcctgaccttaagtgatctgcccgccttggcctcccaaagtgctgggattacaggcatgagtcaccgtgtcctgcccagacatatcaaatttgacaggtattgtataccctttggatctttaggaattaatttttgcctctgtcactcagctttgyatattttgaaatggagataagtatagggaggtcttggaaggaaaattgccagaattcccaaaccatgtaacactcattgagaattccagatccattatatctaaagggcaagtgaaggaaacagtattgtgaactgggtataactccttggttcttaactagtacattcttaatctgtgagacccaaaggttgataaacaataatttaagattgtacagtactctaaacgtctgcaaaggtctagatgttatcagtatcactagtttttatttctgccagtagctcccttttaggttacattgttgtcctctttccagtgtsgcatctgtcattggtttttcactatggcaagttcattaaaaagcttgctccattgttatcttcaagtaatgcccataaggagatggaagatatctgagacaattaaggctttagcttctaggcaagagaaataacgttgcattaaatttcaagtttctttctgctagacttgaatgtgtctagccactctaatttatgggggcttttggttttttcctattgtactttgtatgtagaattgttttgaaatatcaagcatatttactttgaatttgaactctttcttaattttgtatttatcctttgaataaaatgtaaatccaatatttattattaatttactttcattgctgctacgtagaaacctaggaagtgttgggaatctttgtaggatttctgtcttttgttcttggttgttagcttggacccatgtggcattactaaagtttagagcatttctttgtttgaaaaaaactaatttagaaactttttcatatatgtagtctttttttggtgcttgaagtggtaaaaataagctggcctctgaatacagaattgactttgctgacatgacactgggaatttaaatgatttctgtcttcccagcagggacaaatttgtataaattagtttgtgcattcctagttctattagaagatagggctgattattattattattattttgagaaagggtctctcccagttgcctaggctggaaggcagtggcatgatcatagctcaatgcagccttgacctcctaggctcaaggtgtccttccaactcagccttccaagttgttgggaccacaggtatgctctagtacatgcagctaattttttattagtacagaatattcagcagacattgtccagcacagttcaccctttgcaacacacatctagactcacccttgaactcatgtttaaagttccaaagaaaaacatggtgaaaccccatctctactaaaaatacaaaaaattagccgggcgtggtggcaggcccctgtagccccagctactcgggaggctgaggcaggagaatggcatgaatccgggaggcggagcttgcagtgagtggagatcgcgccactgcactccagcctgggcgacagtgagactccgactcaaaaaaaagactatcatgattctgcctgccatggatcagctatcccttttgaaatgaagacacgctcaccctcttcccaagaagaggagataagaagttacacaaattacttggtccatttctgtgtggtattattcctcttgcttaatcacaacctcccttgatataaaagtcttatacacagtcatcccctcttgtctacaagggatatattccaagacccccagtggatacctgaaaccacagatagtaccaatccctatttatatttatactggttttttttgtttttttttttgatctgataaccggcatagctactaagtgattaatggacaggtagtgtataagggtagagacaccagacataggggtgtttcatgnnnnnnnnnnnnnnnnnnnnnnnnnnnntaggggtgtttcatgtcctgggtgggacagctcaaggtttcatcatgctactcagatggcatgcaatttaaaacttattaattgaagccatgcttgtaatcccctaggactttgggaggccaaggcaggagaattacactcccataagtattccaagacataaaagctcaaaatccaaaatgatacacatgggagataagatactacaaatgatagaatcaaatttgccaacactgcaaacattttaggcagtcctcccgcctcagcctcctgaatagctgggactacaggtgcatgccaccacacctgatttttttcctttatgtagagatggggtcttgctatgtttgcctaggctggtttcaaactcctggcctcatgcaattctcccccattcaaaagaagagagactctctagaatctctttatctgactaaggaaactactttccaaaaaaatgcaattgtcttaagacccccttttctaggaatcttataaccaggaaagataaaccactggagaagacaaagagattaaaagttgtcatcatgcccagatagacttttcatctgttcttctgagaacagctttgagagtttacttgaaagactatttgcataaggcaacctttgttcacaatgtagttctacccctcaccttcctgtaatttgctgatcatattcagttttctaagataatcaattataagataatgtctgcctcccaggttgattcattttccctagaaattatttactacccttccaaaacagctccccaccccattttcctcttccttataaagagggtgtttgaatttcagccatgtgtccttgctttgagtctcatatttgtgggattcccatgtccatgtgcatatgaaatttgtgtgccttttctcctgttaatctgtcatagctcatttcagcaaaccttcagagaggaaagaaggaaagctttacttccatctctgcaatctgtagattacttataatacctaatacagccaggcatagtggctcacacctgcaaccccagtgctttgggaggctgaggtaggaggattgttggagtccaggagcttgagactagcctaggcaatgtaatgagacaccatctctagaaaaataaaaataaaaaaattagccaggcatggtggcttgtgcctgtagtcctacctactcaggaggctgagataggagaattacttgagcctaggagttcaaggttgcagtgagctatgattgtgtcattgcactccagcctggacgacagaacaagaccatgtctctaaacaaaacagaccacccaatataatgtaaatgctgtgtaaatagttgtattgtattttaaaattggtattttttattgttgtaattttatatatctttttaaacaaatattttggatccatggttggttgagtccatggatgtagaacccatgggtacaaagggctgactgtatcagaagcagtaagaggaatcaaatgtatgacaaaggaataagacaataaagaaggacaaggcagatttcaggaaggactgaaaatgaaatataacaattgaaattagaatggataaacagattaggcccagctgaagagagaattagtgaacaaaaagataggtctgaagaaataatccagaatgcagcatttactatagagagtgatagaaaatgagaaaagtcaaagcttcttgactttttagagaattttctagaccagattaaaggcaaatcctagaatttagagtgcttcacacatcttaagctgataaaaggaaattgcattcttaaacacattgttttgaaactgaacacaaaagatgaagagatctaaaaagccagagagataagactacccacaaaaagtcaataattagactgacagcttatttcccaactgcaccagtggaaacaaggacaatggaactatttcaaagtgctgaaaaaataattcatgaaactgaatttgaagactgatgggaaaaatgtgctatctgatgaataaaaactgggactctcactaaaatcttccaaagataaatgctaaggtgatggaaaatgatcccacaaaggcttaagatacaacataatgaatggtggctgggtgtggtggcacatacctgtagtcccagttactcaggaggctgaggcagcaggatcacttaagccaaggagttcaaggctgtagtggactatgatcatgcctgtgaatagccactgcactccagcctgagcaacatagcaagatcccatctctttaaaaaataaaaaagaatggtgagcgaaacaaaacaaaacacttttaagtgagggtaaatctaaagcactaacggtctaaaacagtaatattttaggagctataaaacaatccataatgaactaaaatgctagacaataatattgtaacttaggagtagatgagcagggttaaaacataaggctctttttatgatgtggcaagagggtaaagataacttctgactttgtgaagttaaatatggatatttaaacttttatgaaaactaagattagagaatatagttcccaaagtaacagaagaaaaaaaatggaatttaggaaatccaagtacattggtaataatcacaacaagtatagaagacatctaaaacacagggacacagaaaagttgaatgtgaaaggctggaaaaaggtacaccaggcaaatcccaacccaaggaaagatggcaagctacatgaatatgacaagatagactgtaagtgaaaatgacttatttgaaaatagtgcgtcttccatggaaaagtttggtagcttctcaaaaagttaaacatggaattaccatacgaaccagcagttccactcctaggtatatacccaatagaactgaaaacagaaactcaggtacttgtacaccaatgtttatatcaggattacttataacagccaaaaggcggaaacaacccaagtgtccatcaacgaatgaataaaggaaatgtgatatatacacacaatggaatactactgagtcataaagaggaatgaagtcctgatacactccaaatcatagctgaaccttgaaaacataagcaaaataagccagacattaacgaacaaatattatatgattccatttatataaaatatctacaataggcaaattcatagagacagaaagtaaattagagattaccagaggcttgaaagaggaaaaaatggggagttattgcttaatagatacagagtttccattttgggtgatgaaaacttttgaagatggatagtggtgatcattgcacaacattgtgaatgtaattagtgccactggattgtacactgaagaatggttaaaatggcaaattttatgttatatgtattttaccacaataaaaacagtttaagactggatggattggctcgtgcctgtaatccaagcactttgggatgctgaagctggaggatcacttgagctcaggagtttataccagcctgggccacatagtgagttcctgtgtctacaaaacaaacaaaaaaccaaaacccttaactgggtgtggtggtgcatctgtggtcccagctactcaggaggctgaggtagaaggatcacttgtgccaggagcttgagtctacagtgagctatgattgtaccactgcactccagcctgggtaacagagcaagaccctgtcccaaaaaaaagtttaaaaaagcattactagagacaaaaattgttaccatcaaatgataaaagtttcaattcaacaggtattgcatttaacacttttgccaaatggtgaataaatctttgtctctcattatggttttaatttatatttcctttttttctttttttggagatggagtcttgctctgtcacccaggctggagtgcagtggcgccatctcggctcactgcaacctctgcctcccgggttcaagcgattctcttgcctcagcctcccgagtagctgagactacaggtgagcgccaccacgcccagctgatagtttgtatttttagtagagacggggtttcaccattttagcaaggatggtctcgatctcctgacctcatgatccgcccacctcagcctcccaaagtgctgggattacaggcgtgagccactgtgcctggcctatatttccttgattattaatgatttgagcatcttttcatatgtgtattgactgctttttttggtgatgaatctgatcaaatctttttaaaatcagtttttaaaaattggatgatttattgtttactttttaacttggaggggttttttacatattctgaattctagttctttgttgtgtattgcaaatatgttctcccctttgtgacctgtcttttcattctctttttcgtattgtatagaaattcttaactttaatgtagtcaaattgattacttattttccctgatttgtgcttttatgtaacttgttcaaggaatccttcctaggtcttaaacatatcctcctgtattgttttctaaaacccttaaagcttttcctttcatccttggatttttagttcacctgaaatggattttaagtttgatatgatgtaggaattcattttaactttttttttttttttttttggccgggcatggtggctcatgcctgtaatcccagcactttaggaggccgaggtggatagatctcttgacgtcaggagttcgagaccagcctggccaacattacaaaatcccgtctgcattaaaaatacaaaaattagccaggcatagtggcgggcgcctgtaatcctggctactcgggaggcttaggcatga

SEQ ID NO: 93615 - DNA, 102496 bp, Homo sapiens
tctgtaatgaaattctgagttgaaaattctttcctttaagaatgttgaatattggcccccactctcttttggcttgtagagtttctgccaagttatctgctgttagtctgatgggctttcctttggcgtaacctaacctttctctctggctgcccttaacattttttccttcatttcaaccttggtgaatctgacatttttgtgtcttggggttgctcttcttgaggagtatttttgtggtgttctctgtatttcctgaatttgaatgttgacctgccttgctaggttgggaaattctcctggataatatcctgaagagtgttttccagggtggttacattctccccgtccctttcaggtacagcagtcagatgtagatttggtcttttcacatagtcccatatttcttggaggctttgttcatttctttttactcttttttccctaaacttctcttcttgcttcatttcattcatttgattttcaattactgataccctttcttccacttgattcaatcggctactgatgcttatgcatgcatcatatagttctcatgccatagttttcagctccatcagatcatttaaggtcttctcaacactgtttattctagttagccattcgtctaatcttttttcaaggttttcaggttccttaccatgggtcaaacatcctcctttagcttggagaagtttgttattaccgaccttctgaagcctacctctgtcagttcatcaaagtcattctccatgcagctttgttccattgctggcaaggagctgtgatactttggaggaaaagaggccatgtggtttttagaatttttgacttttctgctctggtttttccccatctttgtggttttatctacctttggtctttgatcatggtgacctacagatggggttttggtgtgcatgttctttctgttggttagttttccttttaacagtcagttccctcagctgcaggtctgtgggagtttgctggaggtccactccagggcctgttttcctgggtatcaccagcagaggctgcagaacagcaaatattgcagaacagcaagtattgctgcttgatccttcctctggaagcttcatctcggaggggcacctggctgtgtgaggtgtcagtcagcccctactaggaggtgtctcccagttaggctacatgggggtctgggacccacttgaggagacagtctgtctgttctcagagctcaaacactgtgctgggagagccactgctgtcttcaaagctgtcagacagggatgtttaagtctgcagaagtttctgctgccatttgtttagcaatgccctgcccccagaggtggagtctacagaggcaggcaggcctggttgagctgtggtgggctctacccagcttgagcttcctggctgctttgtttatgtactcaagcctcagcaatggtggatgcccctcccccaaccagactgccaccttgcagttcgaactcagattgctgtcctagcagtgagcaaggctccgtgggcatgggacctgctgagccaggcacagtgtagaatctcctaatgtgccatttgctaagaccattggggaagcacagtatttgggtggcagtgtcctgattttcccagtacagtctctcatggcttcccttgtctagaaaagggaaatcccccaacctcttgtgctttctgggtgaggcgatgccccaccctgttttggcttgccctacatgggctgcacccactgtccaactggtcccaatgagatgaacaagatacctcagttggaattgcaaaaatcagccatcttctgcatcaatcaccctgggagctgcagaccggagctgttcgtatttggccatcttggaatgaggggcctctatttttattattttttatctttagatattaacagtctgattgtaaagtttatatggagaggccaaaaaacccagaacagccaatgttaaggagaacaaaatcaagtgattaaccttgtctgattcaacttcaagacttattatgaagctgcagtaatcaagacaatgtgaaattggtgaagaaacagtcaaatagattaatgcaagtgagtaaagagcctgaaatagataatcagaaatacagccaactgatctttgaaaaaaaagcaaaggcaattcaatggggaataatagtcttttccacaaagactaatggagtaactggagattcacatacagaaaaatgaatctggaaatagaccttacatctttaacgcaagttaactaaaaatatattatagatctaaatactaaatgcaaaactatgaaactctggtaatataaggtaggagaaaataaagatgaccttgatctggcaatggtttttaaaatactacaatgaaggcacaatccatgaaataaagaataactaagctggcctttattaaaatttaaaacttctactccacaaaagatagtatcaagggaataagatgacaagacacagactgggataaatatttttcaaaagatatatctgataaatgatggctatccaaaatttttaaaattcaacaattagaaatcagacaccttgattaaaaaaatgggcaacgggtctgaacagacacctcaccaagaagacatacagataccaaataaatatatgaaaagtactaatcattaaatgtcattagggaactgcaagctaaaaccccgatgacatactattacacacttatacactggctaaaattcaaaacacttatagaaccaaacactggcaaggatatgcagcaaggagaactattagtcattgctggtggaaatgcaaaatggtacagacacttcaggagacagttgggcagtatctaataaaactaaaatatgtttactatattatctagtagttgtgctccttggcatttgccaaatgaattgaaaatatatttccacacaaaaatctgcacatggatgtttatagcagttttattcatcattgtcaaaaattagaaatcaccaagatgttcttcaatagataaatgaatagacaacatggtaaacctatacaatgaatgttatttagtgttaaaagaaatgaactatcaagccatgaaaagacatggagaaattttatacatattagtaagttaaatcttaaaaggctacatactgtatgattccaaacatatgacattctggaaaaggcaaaactatgccaacactgcaaagattatttgttgctagggctcgtgaggaagagagggtgaacaggtagagcacagagggttttaagggcagtaaagctattttatatgatactacaatggtggatacatgtcattatgcattagtcaaatcccatagaatgtacaacacaaagaatgaaccccacagaaactatgagctttggttgttgatgtgtcaatgttggttcattgattgtaacctatgagagttcttgattgtgagaggctgtgtgtgggtgcagggaaagaggcatgtggtaattatatactttccactttccacttagtgttgctggaaaccccaaactgctgttaagaaatacatttttctaaagcctactttaacccaccattctagtcaagctgaggtttgtattacccagtgactgtggagggcttaatgttgatactcccctgatcacttggactgagatgtgaattctatgagacgggatgtgatatgtcactgaactgggagttgaaaaactgtgattctaagtcttatactgaggcattgtgatactttgtctcactgagtcaacaattgctcatttaaaaaaaaaatcaattcctgtttagaatagttgatctcagagatcccttttgtcttcaaattatctataattctttcatagtataaactgaaagatctagggaggagcctcaacttagcagaagagaggaggagcagaactggaacacctagctctcaaggaatgaaatgattattctaaagagagcaaccaagcttatcttacccaaactaaggtagtatatttctgttagagtttaaagttacgtgagtcagggaccaagttattgcttttctttgccctgtataaagggttctccaaggccttggactcacccaagtactaaaggttataaaaccaaactcttctgacccccaatctagtcaacttgggctgtaattattaatgaaattaatatttattttgaaaatcatttactagactgaatcacgaaatactgaaccattgtacacaatcagtaaatatctgtggactcaattgaactgaatgttttgcttgaaatgaaaccttcaagatgcagggcttatgaattctagtctcagctctagcaccagcagacaccatgttcttggctacagtactgaatcttcaaggctcagcctcctcattcctgagatgggtcaattttattgtaagcaaaggcaattgagagattccaaagggatatgaggtgtgagaattctctctaaatggggttagaatccctgttaaaaatgaccagtgaaacattgtgcaattgtgtcttaacataacttactttttcttaataagagaactggaaataacctcattaggaaatttagaacaaatacgatgatatctttaaagaaaatggctttgtgtaagtattgtcgttagtgatctagtaatgtgtatctttctggttgtatttagaccttcaactcaaatgtcagctcccgttaaggtctatacattgtggtggttttgtgctgtgggtccatttagtgatttccctacctcccatcctctattagattcacaactgttgttctgcccataatttcctatgcttgctttgcattgttacatttttttttgaaaatcagaaagcaaaatcaatataaagcagccatgtctggaggagaccaggaggtcaagaagccttagtttctcaagcccttagcaccaaattctctgagatcagctcttccttcagttacactgagcgtttcccctctgcagtgatggagaagggagaactcttattttttctcatgagcatctctggggctgttttccttagataaataagtggttctatttaatgtgaagcctgttttatgaacaggatgaatgtggtatatattcagaataactaatgtttggaagttgttttgttttgctaaaacaaagttttagcaaacgattttttttttcaaatttgtgtcttctgttctcaaagcatctctgatgtaagagataatgcgccacgatgggcatcagaagacctcagctcaaatcccagttctgccagctatgagctgtgtggcaccaacaggtgtcctgttctcccagggtctcccttttcccatttgaaatataaaaaataacaattcctgccttcacgtgtttttttagggggttaaatggtaaaggtgtttatatctgctaaggtaatttacttgatatatgtttggttattgaagatatatgagttatgttagctatttcatgtttaggctgctgtatttttagtaggctatattaaatagaggatttcattataaaggacaaagtctcctaatcttcgatataggattgacatactttttaaatatacaaggcatagaatatggccatttccgttaaatcataaattcccaactggttattaatctaagaattcagaattttaagtaattgtttttgcatcagattgtttacttcagtgctctcaattatgacggtgcattggaaccacttgggttaacatttttttgtttttattaccaatacctaggcttcaacctagtacaatgaaaccagaatgtacagagtgggcactgggacgaaggagaacaagaccaaaggacattttatttttatctctatcagtgggtcaaagtcctttcagaaggagcatatagtgggcctaggtgattggccactttatccatcaaagaggcacacacacttaattagcatggagtgttataaaaagcttggagtgcaagctcacggttgtcttaacaagaggagaaggcttcaatggatccttttgtggtccttgtgctctgtctctcatgtttgcttctcctttcaatctggagacagagctctgggagaggaaaactccctcctggccctactcctctcccagtgattggaaatatcctacagatagatattaaggatgtcagcaaatccttaaccaatgtaagtatgctccttcagtggcttgcaaaaggtaagtaaattcacctgtattttttaaataaagtatatccctagaggtacaatgttacaagagatcattgtaaagtaaaatactttgaaaggcttttgttgccttttccagtctgtcagtgtcagaaatagtggaatgaaataatatattttgttattagagaaagatttaggtctttgcatgttaaattcagaataacaaactgtcaatagtttgaaatgttgtgttccttctttatttcatagccatttgctagaatttttggctgagggtaaacagtaagggaagtgtttgttattagagattttattaaataagtcctctactatattagccatgtgttttattcagaatagccgtgaaaattgaacttctctgaagaaataatttatgcctgttgtaaaggaaryagctgtgggtttaggaccagcaaaagcagataagcggtagataagaagttatagacttcaattattagatccacaaactaatgttttaattaagctatagctacaatatataaaccccaaaatgaccttagggtttagtaatagtagaaagagggttagaagatgtataagcattacggttttttcttgagtaaaagatgttttaacagtgttaatatgatatgtgaatacacctcattgtgtagttattagcatatacagagagtaaagggctgcgattagtatattaagccttataagcatgatggtatgatcagatcaagagaatgaggctgtagttatgaagactactcctactagattgatggtagggggcagggcaagattggtggggctagttaagggtcatcactttcagggagagcagtgtttgaaggccccgtgttattagtatgcttttgtgtctggaactggttctttccagtgggttcttggtctcgctgacttcaagaatgaagccacggaccctcgtggtgagtgctacagttcttaaagatattgtgccagagtttgttccttcagatgttcagatgcatctggagtttcttccttctgctgggttcatggtcttgctgacttcaggagtgaagccgcagaccttcgcaatgagtgttacagctcttaaaggtggcatgtctggagttgttcattcctcctggtgggtttctggtctcgctggcttcaggagtgaagttgcagacctttgcggtgagtgttatagctcataaaggtagtgtggacccaaagagtgagyagcagcaagatttattgtgaagagcaaaagaacaaagcttccacagcatggaaggggacccaagagggttgccgctgctggctcaggtgggcagcttttattcccttatttggccccacccatgtcctgctgattggcccattttacagagtgctgatttgtccattttgcagagtgctgattgatctgtttttacagagtgctgattggtgtgtttacaaacctttagctagacacagagagctgattggtgcatttttacagtgttgattggtgcatctgcaaacctttagctagacacagagcactgattggtgtgtttacaatcctttagctagacagaaaagttctccaagtccctacctgacccagaagcccagccggcttcacctctcaatcccccctttaaacaggacaccccaactgctgttgggaattcggtgatgactgctgtagctacttcctgctggagaggggtgaagaaggggtcctgcagttgtagtgtcctccggaggggaactctttaggccagtgaaagggccagtgggtcagtccaggtgtccttggaaggagttgttagttgagctcatttggggttccatttgtaagaccatctgtagcttgatggcgttgatcctagaggaaacaaatttgacaaggaggttaaaaatacagggcctgaaggtgagtaataacaagatggctgccatgggacctagaaaggggagaagccatgttgcctaactccagaggttggtatgagtttgaaaagcattgtctgatttcagaagccatttcctgtaaacactgggtggcatctcatactattcctgattggttagtgtaaaaattatactcttcccctaagaaggtgcagagtcctcctttctcagcagtgaggaggtctagtcctcrgtggttttggagagtcactgttgccaaagagtctatttgggattgtagagtaaggatagattttgttatttcttgtaaactgtctgagaaattctttgagagtgtgtggtagtaggataatgaagtagataaactggctattctggttcctgtagcagtagccattcctaaccctataagtagggatattagttgtatggctttgcactgatggagttgagttttgaggggtactgatagggtctgatttcctggggcaatgttaatgttgggacttagaaagactaaggtgcaggtgccagtccagttagtgggaaggcagatataggtcgacattccacataagaagaatataccttggctgggtagacacaactggttgtgtatgttaaaaaggtgtgtgtttgttgttttcattttcccatactcctagagtacttgccaaggtagctctggtgagtggctggaaaggggtgttgggagcaaactgagtggctccgtgtgttctattttcccattggagaaaaaaccgttctgtgtctactaggaaccattcaagagagtgattgaaaggggatgagaaaacatttactagtggtgggggagctgctgcaggggatccaggggtgaatggtcatgcagggagtatgtttgccattacaaagcctggactgtttgttaagcagggaggaggtgatgatattttggggccctgagaagcggacaatccatctgaatagagctgtttgagtgactcagaagttactatgatcagttggggcttgaagttgtagggtgtaattacactgatggggtagtaggtgcctcaggggcaggcctgataacaggttgcattgcattcatacaggggcttggaaagttaagatggtatttgtagttacaaggctgtgtatgggcttttcattgcttgtgtaataggtgaggttggaaatgtaagaatgtaaaagttggattgcacgtcctgttagggtattcttggtcctatcagagatggagaagtcagctaatgattgcatatttagaagttggaaagggtcttttccatcataatgaaggtggtaggttaatttggtaaagatccagttttttgtgggaatgggggtggcaacataagcagaggttgatagatacaaagccaacagtcatttgccagggaaggattggactggtttaacaaagagtgggttaatctgagagtcttgtagagataattaggagctagtggaaggggaggggtgattgtatgaggtatccaaggaagcaggagggatagataggcaaagaataaatargaaggtaaagatggtgctctggaagatgagatcattttatccaggccgagtaaaaggtaggagtaaattgctgtcagaaggaaggaagacagaaaaaaggttgatgtgattaggattttcatcccagcaggagctacagtatatagtcctattgcaaagagtatggttaatatgctgcttaataatatgatgaaatagtaaaagggttccattaaaggggcaagaagaggtgttaaagataaagattatgtaggttttcacttatcttttttaaggaggaaggggtttttcttcaggatcggtggtaggagcctttttagtctgggatgtttccttctgaaataagagatgcaagtcctccaacagttcgcaggtgtattgaggctggtctggctgatcttgggactcctgagctgatggtactgcaggttcctcaggggatgtccaaaatttaactcaggtgtggcgaatccaagattccattcctgaaccttaacagcagtggggttagagaggattaccgagtatggtccttcccacaaagaggccatagatagggaggtagaggggagagatttgatcaacactagatctcctggttgaaacaactctgttcccttttctctgtgatatccttcaggtaggtttttaaggtttcattgatattttgccaaagaagttatatctttgaccaagttggccgtttcctgatcaagtaggaggtcatttgtgaaaaaaggccatccatacagcatttcatttggactgagccccattttgtgagaatttcggattctcaacaaggtcatggacaaaagagtaaagagtaggccatgggaaatgagattcttgtgttagtttccttaagtgcctcttgactgttttatttgccttcttgaccttccctgaggattgtggccttcaggtgctgtgaaggtgatattgtatccctagtgccctggaaattccmtaagttattatggctttaaaagccagaccattgtcactctgtaagctttggggaagcccaaatctaggaattatttcatgaattaggactttaatcactttctcagccttctctgtcttgcaggggaaagcttctatccaatttgtaaaggtatcaacacagaccaacaagtattgaaatccctttgacttaggcatatgggtgaaatctaactgccactcctctccaggatagtgacctattctttgttccccmcaaaggggccctatgatggaccaagggattattcttttggcacacctcagaggctttgactacctgtcggattgtccagaggagatttggccctgtaaatagggatttggccatttgatgagtgttttcaatacccatatgaaaagtttggaggagggttttaagtattttccactggctggcttcaggtataagtacctgtccttcttctgtcattaaccacgctgaggggagagaaaactatgcccctgtgaaagttcccattctgtttcagtcagggaatactggggcttaatctcttggagggrtttgttccataccaagtgtccttccataggtatttctaatgggaggttccacctggcagcaattttggcctcagcacctscctgatggtttccttctgccttttctccttcacctttctgatgtctttggaagtgtaagactgccaccaccttgggtttttgcactgagtgcaataactccataattcccttgtggtatttaatgggggtttctccagaggttaggaacttcctttctttccatattgcagcatgggtatgtaggattagataagctacttgctatttgtatacacatttattctttttccctttcccagttctaaggctcgggtaagtgccaccagttctgctaactgggcactggtccctgtgggaagaggcttactttcaagtacagttacaccactaactttgccataacctgcccttcatatcccattctccacaaatgaacttccttcggtatataggttaaggtcaggattagctaaggggacttctaagaggtcatctcaggtggcataaatctggactataatttgttggcagtcatgataccttggttccccatcctctgggagaaaagtggcagggttgggggctatgcctgtatgtatttgaagcaccagtccctcaaggagtagcacctgatatctaagtaggcagttgtctgataaccataaacttcctttggcacctagtatgccatttatatcatgagtagtccagacagtgagatcctttccttgtattattttgatagcctctgacactaagacagccatcaccacaactacccataaacagtgaggccagccttttgctacaacatcaatttccttacttaggtataccactggttgtggggttgtttcacgagtctgagtaaggactccaagaggtatccctgctctctctgtgacgtataaagagttttgtcctgtgggaaggcttaaagctgaagcttgtactagggcctgctttaaggttttgaaggctgtttctgcccctggttcccattctactagatgagtatttkccctctgggtttccttgattagagtacagaggggcctggctatctcactgtatccggggatccatagttggcaaaagtcggtgattccaaggaatgcccacaattgttttaatgtcttagggtgaggataagccagtataggctgtattcattccttgctgagggccctggtccctctggctaagattaggcctagatatttgacctgctgtaggcaaagctgggcctttgacctagacgccttgtacccttgattagctacaaagttcaagagatctagagtaccctgctggcatgaggcttccgaactgatagctaaaagtaaatcatccacgtactgaaggaacagagtgcctggacctgagaagtggcctagatcttgggccagtacctgaccaaagagatgagggctatccctaaacccttggggcaagactgtccacataagttgggacgtgtggtctgagggatcctcaaaggcaaagagaaagtgggagtcagagtgcaggggaatacagaagaaggcatccttgaggtccagaacagtgaactattctgcttcctctggtatttgacagagcagggtttaggggttgggtacaactggatatagaggaattactgcytcattgatgagtataagatcttgcactagtctccacagactgtttggtttttgtactcctagaattggggtgtcgcagggactgctgcatttccttactgaggcttgagtttttaaacgtttaacaatatcctgtaatccttcatgagcttcaggccttaarggatattgcctttgataaggaaaagtggtggggtcttttagcctgatttggactgggtgggcattttttgctcttccaaattgtccttccagtgcccagacttcagggttaattccctcctcaagtaggggacaacaaatgggtaacttgtttctcatattcatgtagataatagctccagctttcactaatatatccctccttaataagggtgtgggactttcagacataacaagaaaggcatgtgaaaagagcaaagtctcccaattacaactgaggaggtgggagaaatacctggttacaggctgtcycaggatttctcagatggtaacggaccttgaggaccgtcatccaggacaggagattaacactgagaaggccacaccagtgtccaggaggaagtcaatttcctggccctcaatggttaaacatacccagggctcagtgagggtgatgacatgggctggcacttaccctgggcaccctgagtcctgttgttggatcatctggttgggggcttctggcccagagaaccattgcactctggggaagtgtgccttccagtgattgccttggcatagcagacatgggtgagggggtggcttgtttctcattggacaatcttttttaaaaatgtccttgtaaaccacactgataacaagccctactgggtgattggcctgctattttctgtcctctctgaaccaccaagctttctttgtctgagggccatgactaaggctgtgacctttctctgatctcagttttccttttgggcctgttcctcttggtacctattatagaacactgaggttgccagttttaataatgcctccagattttgttcagggcccagggctcacttttggagctttctcctgatatctgcagctgattgggtaaaaacttatcttttaggatcaattgaccttctagtcagttgggtgacaggggagtatattttcttaaggcctcctgtagccactcgaggaaagcagaaggattttcttcctttccctgagttatggtggrcatcattgaataattcatgggctttttcctaattctccttactccttctagaacactggtcaacagatgtttatgactacagtccccatgatctgagtcgaggtcccartggggatccatactggggatggcttgctgaccagtagggaatttgtccctttcttcagctgtcattctatcatttacttgactaagatactaggtctctccaaactctcaggctgcagctaaagccacattcttttcattaaaggccagggtttgatctaacaatagcatgacatctctccaagtgagatcgaaggtttgccctagaccctgtaggacatctatgtacctatcaggatcatctggaaacttccccaggtctgccttgatctgctgtaaatcagagagggagaagcggccatgtacccaggttgggccaaatttacctccccctacagcttgaagggggcataactgatagcccggggttttttgtggtcctttggagatttctttgcttatttccttctgggaaggggagattagaggaggcttatcattaataggaagtggaactataggtaggctaggatacgggggtaagctgaaaagtcctcctgtgggatgtaaattgcaagctttgcatagttgtgtattcttcttcaatgaaaagaaagcttggatataaggtatttcactccatttggctttcctcttacagaaatggtcaagttgcaggatagcattgtaatttatacttccctcagttggccatttttccccatcagagagagaatagtggggccaggccatagtgcagaaaaaaatgagccacctctttttcagggtttgtgagtcaaattggtcccaatggcttaggatgcatttcaagggtgagcctgttgatgcctgattgtctctcatcggaaagacaaaactctccatggttttggtttgtttgtttctacctgcccaggaacctgcaacagtccctggaccctgctgatcagaatagttgcactcactgatgcagcagcagaaacacctcttgcccaagaacccaaaacagtccctggaccttgctgatcagaatagttgcactcaccgacacagcagcagaaacactagttttcctcctagaccagaaggaggactgaggaaggtcggatttagtggcccttaccaatgcattcttgaaaacgtgtacccctgcctgtcctcgtagaccacaaagaggactgagaaaaatcagatttagttgcccttaccaatgcattctcaaaaacctgttagagtcctaagtgttctcctgttagtattgggactttacctgtgtcctatgaagatgttatgccccaaaaatgaaatggagggccataccctgagggagggaagggatctccagagttggaagtgtgatgccttttgtcctcatttatatgaacaggaaggatagaatttctgaggatccccatatcctagcttcaggaatagtttttgttaggcctgcttgtctgaggagggattctaaaattccagatagtaccccctaaaatggggctttgggcaaaaattatgtctttctgattggtgagcccgggtgcctaaagaaggtaacagagtcctggagtttatactagaaatcattcatgtaggagaaactagaaaagcaccagagacaggcagtggtttttagaagcgggactagccttggagaagagaggcaagaggaagtttgtctggcaggcattaggacccaggaggcaagggtcaggatagctaggatagataggcaagtctctcttgggtgacatgactttgagagttctgctcatggccacagggtcaaccaacttgttgtcgggaccccggagctgaatggctttcctctctgtcaacccttggcgcagcccagaaatacaggaaaagtggaagctggttccaggcaaaccaacgctcccaactccaaagagttggggattgttagagagccctttcccagaaagcctgacacccctgtctttagtctggtggccacattggtcactttttkttttgagacggagtctcgctctgtcgcccaggccggactgcggactgcagtggcgcaacctyggctcgctgcaagctccgcttcctgggttcatgccattctcctgcctcagcctcccgagtagctgggactacaggcgcccrccaccgcgcccggctaattttttgtatttttagtagagacggggtttcaccttgttagccaggatggtctcgatctgctgacctcatgatccacccgcctcggcctcccaaagtgctgggattacaggcgtgagccaccgcacccggccattggtcacttttaactggctgacaggtgcccagtatttagcccctgaattctaaggaaaaataggacagaacagcaagtgaaagggatccagtggtacttactgcttggcaataggcaaaagtcccttcattgtcaccaaaatgtgtccagaattggttccttccggtgggttcttggtctcactgacttcaagaatgaagctgcggacccwcatggtgagtgttacagttcttaaagatggtgtgtctggagtttgttccttcagatgttcagatgtggccagagtttcttccttctggtgggttcatggtcttgctgacttcaagggtgaagctgcagaccttcacagtgaatattacagctgttaaagatggcacatccagagttgttcattcctcctggtgggttcatggtcttgctgacttcaggagtgaagccacagaccttctcagtgagtgttactgctcttaaaggtggtgtgtcgagttgttcattcctcctggtgggtttgtggtcttgctggcttcaggagtgaagctgcagacctttgcagtgagtgttacagctcttaaaggtggcatatctggagttgttcgttcctcctggtgggtttgtggtcttgctggctttgggagaaaagctacagacctttgcagtgagtgttacagctcataaaggtagtgaagacccaaagagtgagcagcagcaagatttattgtgaagagtgaaagaacaaaacttccacaatatggaaggggacctgagcaggttgccactgctggcttgggtggccagcttttattcccttatttgccccacccatgtcctgctgattggtccattttacagagtgctgattgttccattttacagagtgctgattggtgtgtttacaaacttttagctagacacagagcattgattggtacatttttacagagtgctgattggtgcatttacaaacctttagctagatacagagcactaattggtgtgtttacaaacctttagctagagagaaaagttctccaagtccccacccgacacagaagcccagatggcttcacctctcagtttagttgtgtacttgtttgtagttggaatttgcaaggcagaataatagggatgaggttagtccatgggtaattattagggcagttgcaccggtaaaacttcagggggttttaatgagaatagccatgataataagtgacatgtggcttatggaggaataagtaatgagtgattttagatcagtttggcacagaaaaattgagcttgttatgattattcctcatagggatagtatgagggaggaataagctataaactctgttaaggggttaaggattagggtgattcttataatcccatagccacctaattttaggagtactgctgtggagactattggcccagcaatygggacctctacatgggcttttgggagttctaggtggattccatagagaggtgcttttactataaatgctatgatgcatgctaatcataaaagactgttggaccaggaaattgttagttcttgaagctgggtatttgtcttaaggtagacacaagagtgctgataaatttctcaagcatgagtgtttgaataagtgaagtttcaaatttgggkcttctgtatattagctgtgggacactgaaaatgaatttgtcattctcttagctcagtttgtttgtttaaaatagagcaaatagacctgctgaatatgttggtgtgaggrttaattgtaatctgtgtagcaattgtctgaccattgccttgaacatcataggccatctgagtggcaagtataataatcatcatcatgtttatatataaaattcagaaatatttgagcctgtgtgactgaataaaagcatacaaatacaatgaaaatatgaatctaagtcaggcttagtaaatgracaaaacagtgacttcatttgctgttaactgtatctccttttctagctctcaaaaatctatggccctgtgttcactctgtattttggcctggaacgcatggtggtgctgcatggatatgaagtggtgaaggaagccctgattgatcttggagasgagttttctggaagaggccatttcccactggctgaaagagctaacagaggatttggtaggtgtgcaagtgcctgtttcagcatctgtcttggggatggggaggatggaaaacagactagcagagcttctcgggcagagcttggcccatccacatggctgcccagtgtcagcttcctctttcttgcctgggatctccctcctrgtttcgtttctcttcctgttaggaatcgttttcagcaatggaaagagatggaaggagatccggcgtttctccctcatgacgctgcrgaattttgggatggggaagaggagcattgaggaccrtgttcaagaggaagcccgctgccttgtggaggagttgagaaaaaccaagggtgggtgaacatactctctatcactgacctttctggactgctctcctctctactgacattcttggaaacatttcaggggtggccagatcttttatttggagtcctggttgttagctcatgtgaagcagggtttgaagctgagagccaagggaatttgcacatgtttgtgctgtgtgtgtacaggcatgattgtgcatacagtgtgggtataaaagttcatttaatcctatgttctcctgaactttgcttctttgttttcaaataagaaatgatgaatatagattttgagttcattttttgaaagagttaaagagcagtgtttttcccattatctattccagaacatgtcaccagagaatacttgacaagtggacatggtggaaatggccctatcacacccctagggagcatgaaccaaatggcatgtgcttttatttaattggactrtgtttgtatggtcagcctcactgacttgtctagggtttcttttaggcccatgcttgccattctggccagtaatgacattctacagtttttattgcttaggcatatcttagtgtagttctcatcagcttttatttctctgtaaatacagcattatttaaaaaatagtgttaattatttcttgttactctattgattttgagtaaacatatgctatgacataattctgtgaaatacacaaatgtctatttataaaataatttatttaactagattttaattattagtaataactgtaatttttattccttaagtrtaatttggctctgtttcattttgcttatctctttccaatcatatttatgaaattttggcttagaaatttatggtaattattattttccactgccaactctactcacctatgaagttttacaatgaatcagtttatcagcttggataccaaattacctcatttttaaattcwgttttccaaatgaagtgaaagactgaaaatcagatttatctgtgaatgatacacacacactcaacagacttccagctgttcaatgccttgctattcattcagagtacttttgactaaagtcactatttagggcctataggtgtgaatttggaagctctttaaatataaagtttaatatttcaaaataataagagctatttatgaaaaacccatagccaatatcatatwtaatgggcaaaatctggaagtattccctttgaaaaccagagcaagacaaagatgccctctctcaccactcctattcaacatagctttggaagttctcaccagggcaatcaggcaagagaaagaaataaatggtattgaaataggatgagaggaagtcaaattgtctctgtttacagatgacatgattgtatatttagaaaaccccattgtctcatccccaaaactgttcatgctaataagcaaattcagcaaygtctcaggatacaaattcaatgtgcaaaaatcacaagcattcctatacaccaataatagacaagcagacagtcaaataatgagtgaactcccattcacaattgctacaaagagaataaaatggctagaaatacaacttaaaagggatgtgaaagacctcttcaaggagagctacaaaccactgctcagggaattaagagattacaaaaacaaatggaaaaacgttccatgctcatgaatagtaagaatcaatattgtgaaaatggccatattgccaaaagtaatttataggttcaatgctattcccatcaagctgccattgagtttcttcacagaactagaaaaaactactttaaatttcatatggaaccaaaaaagagcttgtaaagccaagacaatcctaagcaaaaagaacaaagctggaggcatcatgctacctgacttcaaactatactacaaggctacagtagccaaaacagcatggtactgataccaaaacagatatatagaacaatggaacagaacagagacctcagaaataatgccacacatctacaaccatctgatcttcaacaaacctgacaaaaacaagcaatgggaaaaagattccctatttaataaatggtgttggacaaactgtctagccatatgcagaaaacagaaactggatcccttcctttcrtcttataaaaaaattaactcaagatggattgaagacttaaacataaaacctaaaactataaaaaccctagagaaaaacccaggtaataccattcaggacataagcatgggcaaagacttcatgactaaaacaccaaaagcaatggcaacaaaagccaaaattgacaaatggtaaactaaagagcttctgcatagcaaaggaaactatcataagagtgaacaggcaacctacagaatggaagaaaatttttgcaatctgtccatttgactaaggtctaatatccagaatccacaaggaacttaaacaaatttacaagaaaaaaagaaaacaacaacaacaaaaaaaaactgctgggtctgtcctgcagaccctggccaatggatgaaatgagtactcatatacaggtatgaggtgtaagagcagctaggggactgtctggctcaagtggccagagtgtagcctcgagaagctggagctgcatgtttttattcagtgcaggcacaatgctgaaaacctggagcccatgcaatctgtaggtaattaatatttattgttcccctttcagggaacatcaagaatggatgatcaaaggtcagttcctggtcaacataagtaaacaagcctgttcaagatgacttccccttccctcccttgtacatactcctcgtcctctccctcacggtcagagaacagctgcgttcagctattctcacctgaaactatgcagagccttccgacctttcagaaggcctgctcctttccctatactttctcccaccactctgatggatctcctacaaacaaccccatcaaaaagtaggtgaaggatatcaacagacacttctcaaaagaagacatttatgtggccaacaaacatatgaaaaaaagctcatcactggtcattagagaatgcaaatcaaaaccacaatgaggtaaaatctcatgccagttagaatggtgatcattaataagttaggaaacaagagatgctggtgagaatgtggagaaataggaaagcttttacactgttggtggaagtgtaaattatttcaaccactgtggaagacagtgtggcgattcctcaatgctagaaccagaaattccatttgatctagcaatcccattactgggtatatacccaaagggctataaaccattctactataaagatacatacaaacgtatgtttattgcagcactatttacaatagcaaagacttggaaccaacccaaatgcccatcaatgacacactggataaagaaaatgtggcacatatacactgtggactactatgcagccattaaaaagaatgagttcatgtccwttgcagggacatggatgaagctggaaaccaccatcctcagcaaactaacagaggaacagaaaaccaaacactgcatgttctcacttataagtgggagttgaaaaatgagaacacatggacacaggaagggtaacatcacacaccagggcctgttgaggggttggggggcaaggggagggaaagcattaggacaaatacctaatgcatgtggagcttaaaacctagatgacaggttcatagatgcagcaaaccaccatggcacatgtatacctatgtaacaaatctgcacaattctgcacacgtgtcccagaacttaaagtaaaattaaaaattaaaaaatataaagtttaacaatcacttgattacaacaactttatttcagagatcctccaccaaacaagaaaaccttttgtataatttaatttatttagctattaaatgatagacttggtctaatcaatgtcaaatttcaaataagttaaatttgaaggatgattagagatgatgggcatttaattcctagagaagaaaattcatttttaaaaaactaaagaagaaactaaaaactccatttattaatttactttttttcctttttctttttttcttttcttttcttttctttttttttttttgagttggagtctcactcttttgccaggctgaagtgcacttgtgtgatatcagctcactgcaacctctgcctcctggattcaagtgattctcctgcctcagcctcccaagtagctgggattacaggcacccaccaccacactcgactaatttttgcatccttagcagagatggggttcaccatgttggccaggctggtcttgaactcctgacctcaggtgatccacctgccttggcctcccaaagtgctgggattacaggcatgagccagtgtgccctatctaatttacttttccttgtttgccttatctgggatttacatttcaaataacaagtttttgtttaatttttttgacaaactaatctatgttagacattctattcatttatgtttgtatttgttctcataaaacacattctgcttcttacatttattttctcaaatacatgaattcacccctagtctctctagttcctctctactggttcaatacatgattctttgagctatttgttgtaatataaaaagctttgaaatccccaactattctcaccctttctatctcagtgctttgttgtctacagactttgcagactgatgtgattccctctgaaacttgaattatttggtttctaaaaaagtctctttttttctttccaaagtaaaagacaaataggccgggaatgtaaatttagcatttgagcaaccattatttaaccagctaggctgtaattgttaattcgagattaatgtaaaagtgatgtgttgattttatgcatgccaaactcttttttgcttttaagggaattcataggtaagatattacttaaaatttctaaactattattatctgttaacaaatatgaagtgttttatatctaatgtttactcatattttaaaattgtttccaatcatttagcttcaccctgtgatcccactttcatcctgggctgtgctccctgcartgtgatctgctccattattttccagaaacgtttcgattataaagatcagcaatttcttaacttgatggaaaaattgaatgaaaacatcaggattgtaagcaccccctgratccaggtaaggccaagttttttgcttcctgagaaaccacttacagtctttttttctgggaaatccaaaattctatattgaccaagccctgaagtacatttttgaatactacagtcttgcctagacagccatggggtgaatatctggaaaagatggcaaagttctttattttatgcacaggaaatgaatatcccaatatagatcaggcttctaagcccattagctccctgatcagtgttttttccactaaactccaaagccctgtttctataaagtactttggtgacagccccaaagcgtgcttatatcactccatggacatccaggcactttggagtcttccattactcacaaggcttgtccttcaattcacactttgtcatattgtgtgacagaaatatcctaatctaaaagacattatctccttcaaggacagagaatatttggaaccacagaagctgccaagaaacactgaatagggcagaggtgtttgatgtctcagttgggattctagctgatgagacagctggttaggaatgaaaaaattattgtttttttggtgtatgaaccataaacagacatcacacttttaccctgtgctgaattggcatgttttatactctgcctaaataataattgtatgattttacagaagtcatttaactgctctggtgcacagttggaatttgaagtatctttgagcccctcccacttctaaaatactaattcaatttcagaggctgcttgatagaaatcaatatagcagggactatctttgtagtatcaatcaggttgtgcaaactcttttaacctatgctatcatctccaaaatgttaatgtagtaattcataccatcttatatttcaagattgtagagaagaattgttgtaaaaagtaagagaattaatataaagatgcttttatactatcaaaagcaggtataagtctaggaaatgattatcatctttgattctcttgtcagaattttctttctcaaatcttgtataatcagagaattactacacatgtacaataaaaatttccccatcaagatatacaatatattttatttatatttatagttttaaattacaaccagagcttggcatattgtatctatacctttattaaatgcttttaatttaataaattattgttttctcttagatatgcaataattttcccactatcattgattatttcccrggaacccataacaaattacttaaaaaccttgcttttatggaaagtgatattttggagaaagtaaaagaacaccaagaatcgatggacatcaacaaccctcgggactttattgattgcttcctgatcaaaatggagaaggtaaaatgttaacaaaagcttagttatgtgactgcttgcgtatttgtgattcattgactagttttgtgtttactacggatgtttaacaggtcaaggagtaatgcttgagaagcatatttaagtttttattgtatgcatgaatatccagtaagcatcatagaaaatgtaaaattaaattgttaaataattagaatacatagaagaaattgtttagataaatataatctrtctgaacaataaggatgtcaggataggaaaagctctgttctgcagcttccagtgagatcagcacaggaggaacttaaatttaaaagaaaataaaaaacatctccatcaaaaagtgagtgaaggatatgaacagacacttttcaaaagaagtcattggagaaatgcaaataaaaacaacaatgagataccatctcatgccagttagaatggcgatcattaaaaagtcaggatataacagatgctgaagaggatgtggaaaaatagaaatgtttttactctgtttgtgggagcgtaaattagttcaatcattgtggaaggcagtgtggcaattcctcaaggatctagaactagaaataccatttgacccagcaatccaattactggatatatatccaaaggattataaattattctattataaagacacatgtacacatttgtttattgtgccactattcacaatagccaagacttggaatcaacccaaatgtacatcaatgacagactggattaagaaaatgtggcacatatacaccataaaatactatggaggcataaaaaagatgaattcatgtcctctgcagggacatagatgaagctggaagcccccactctcagtaaactaacacaggaacagaaaaccaaacaccgtatgttctcactcataagtggcagttgaacaatgagaacacatagacacaggatgaggaacatcacacactggggcctgtcaaggggtggagggcttggggagggataacattaagagaaatacctaatgtagatgacaagttcataggtgcaggagaccaccatggcacgtgtgtacctatttaacaatcctgcacgttctgcacatgtatcccagaacttaaagtataataataataacaataacaaaaatctacccaaggggaaacaaaatgcaggttttaggtgaaatggaagcaattatgaacaagttagaaaatataaaatattatgtcataggatgaaaatgggcatcattattgcacacagtttattggagaatgggaaagaatggtttaacctaggtgggtttcctgcattcctgcagattgaaataggccttaaaatatttgcagtgagagtcagaagaggggtttcagatgggttggaatgctttacatggaggtgtagaggtgtgtgatggaaaagagtaggtggatggaagagggaaggcttcattgagtgtaaactaaaatgatttgtacagataagaattggaatttggtatctatcagataccgtgtaaacatcacctcttttgtcattgcaccatttttgaagaggctattttttcctcctattgaattgtcttgacaaccttgtcaaaacccaattgactataaatgtgtgaagggttttttttggggggctctcaattctactccattgatctatgtgtctgtcctaatgcctatagtacaccatcttgaagtcttaattactgtacctttgtattaatatcaacttattaaatcaaggagtgtgagtcttttgttgttctttttcaatactgttttcactattctgggtcccttgaatcttcatatgaaatttaggatcaacttgtcaatttcttcaaaggagccaatgggaattttgacaggattgcattaaatctgtagaacagggagttatgccattttaaaaattgaagtaaaattcacacaacatacaattaaccagtttaaagcatacacctaagtggtatttaatgtattcacaatgttgtgcaaccatcagctttctctggtttcaaaatgtttttatcacgccacaaaaacgtattatattcgctaaataatcactccatkcccccactccatcatgtaataacctctaatcttttttctgtctctatgggtttgcgtgttatggatatataaagaattcatagcatatgcaaccttttatttctgggtccttacacttacaatgttttggaggctcatctaagttgtagcatatatctgtacttcattcttttttgtggataaagtatattttattttctatgcacatttatcacaaattgttattcatctgtttgtggacatttgcattgtttccaacttttggctcttatagataatctttctttaaccatttgtgtatgtttctttatgggcatgttttcatcattcttgggtgtattctcaggagttgatttgctgggtcaaatggtaattttatgtttatcttcttgtataagagccaaatttttctacagtgaatgtggcattttatattccttccagcaatgtagaaggatttctgtttctccacatagttgctaatacttgtaattttctgtgtttattaaagccctcctagtgaatgtaaagtggtatctcattatttatttatttatttatttattttgagacagagtctcactctgttgcctaggctcgagtgcagtagcatgatctcattcaagcaattctcctgccccagccttcagagtagctgggattacaggaatgtgccaccatacctgactaatttttatatttttggtagagatagggtttcaccatgttggccaggctggtctcgaactcttgacctcaggtgatctgcccaccttggcatccctaagtgctgggattacaggtgtgagccaccatgcccagctctcattgtggttttaacttgtatttaatgaccagtgattttgaacttcttttaatatactgttacccatttgtatatcttstttggagaaatgttattcaagtccatttcctatttaaattaagttgcctttatttttctttttaagctattagaattgtttatgttttcaaaacattaaactcttacatatacataatatgaaaatatttcctcccattctgttggttgtcatttcacattcctaattatatttttgatgcacaaagtttaattttgatgaagtttggtttatctattttttcttttgctcctctggtatcaaatttatgaacctattgccaaatatgaagtcatgaagatttacccctacattttattctaagagttttatagttttagcccttatatttaagtttttccgtccatttttcagttatatttttcatttggagtgaggtagggtaggtcccagctacattcttttgtattttgtcatccaattgactcatcaccatttgttgaagagattctttcctcggactgaatggtctaggcacccttgatgaaagtaaattggccacagatgtttaggtttatttcttgatttcagttttattccattggtcttgatgtctatctttatgctagtaccacacttttgattattatactttgtagtaagttttgaagtcagaaactgagaactcactgatacagaaattaagaagaaattacttaggcagagagtaagcatttgggaattctcagtaaggtttttctttttaatgaaaagcaaccctaaatcattgtctggcaaagagcatcgcgtaaaatcgagctgcagtcatagacaagcaagctggaagcctgcccggtgaatgctgataggaaagaactacctgtgactaggcatgttcaaaatggcagctctatcttcccttccctttgccagccacatgtacagtaaggagcagacaagatggcgctggtcaagtggaaagtccatttgcataataacattagagtgggttggccagccttccctgcccactatgtaaatgccacacctgattgagccaatctttgggccctatataaatcagacactgccttttccggcctgcctataaaatctgctgtggtccgcctccttccccctctttggatgtctctctctctctctctcacaagaagctgctctttttctcctttcttctgttattaaactacctgctccttaacccactcagatgtgtccatgtcctaaattttcctggggtacgatgacaaacctgagggtatatatcccaggtaatgtagctgcttcatcaccatgtagttgcatatgaattggacaatcaactttcccatttctggaaaaaggtcacgggtattttggtagggattgcatagaatttttagatcactttgaggagtattgccatcttaacaatattaagtcttccaatcctggaacattgaagagttttcaatttatttaggtattagatattcttttttcctcttttgcaagggtctggtttagtttgaaaggcaagtttaccttaaattttgtatttagttatgatcattgcttgcctgattttaaaatgataccatatgaaatactttctttttaaaaaaattttcaacttttattttagattcaggaagtgcatgttcaagtttgttacatgggtttattgtgtgatgctgaagtttagggtacaaataatttcatcacccaggtagtgagaatagtacccaataggtagtttttcagctcttgcctttatatctctctaccatctatagtaattcccagtgtgtattgtttccatctttgtgtcccacttttatatgagaacacgtggcatttgattttctgttgctgcattaattctctcaagacaatggcctccagctgcatctatgttgctgcaaagacatgattttttttatggctgcatagcatttcatagtgtatatataccacattttctttatgccacacaccattggttgcttctgtgtctttgctattgtgaatagtgcagagatggacatatgagcacatgtgtctttttggtataacaatttgttttccactggatatgtacccagtagtggaattgctgcatcaaatgataattttgtttttagttctttgagaaatttccaaactgctttccatagtggctgaactaacttacatttccaccagtagtgtataagttttcccttttttctgcagccttaccaacatctgttattttttggctttttaatcatatccattctgactggtatgagatgatatctcattgtggttttgatttgcatttctctgatgataagtgatgttcagcattttgtcatatgcttgttggccatgtgtatgtcttctttggaaggacatatgttctttgcccactttttaatgaagttatttgttttttaacttgttgaattgtctaagtaccttatagattctcgctattggaccattgttagaatcacagtttgcaaatattttgtccccattctgtaggttgtctgtttattgtgttgatactctgtcttgctgtgcagaagctctttactttaattaggtcccacttgtcaatattcattttggttccaattgcttttgagggattattcataaattctttgcaaaagcctgtatccagaatggtattacatatatttttttctataggattgttagtttgatgttttaaacttagatcattaatccatttcgagttaatttttgtatatggtgcaaggaagtgttccagttttattctgygtatggctagccagttatcctagttcaatttactgaatagagagtcctttcctgattgattatttttgtcaactttgttgaagatcagatggctataggtgtgtggctttatttctggcttctgtattgctttggctacttgggctcttctttggtttcaaacgaattttagaatagtttttccttattctgtgaaaaatgacattggtagtttgataggaatagcattgaatctgtagatagctttgggcagtctagccattttaatgatattgattgttttaatccataagcatgaactgttttttcatttgttagtgtaatctatgattttgttcaacagtgttttgtagctctccttgtagagaccgtttgcccctttgttagctgtattcctaggttccattccacccccaccccccactatggctattttaaatgggatggcattcttgatttggctttcagcatgaacatttttgatgtatacaaatggtactgagttttgtacatttattttgtgtgctgaaatttcactggagttgtatatcacttccaggagctttttggaaggttctttagggttttctaggcctgagatgggtcttctaggtctgagatggagcttctatatctactagtaaaagattagccttgtactcttgaagacagtagaaggatgggtattttttaaaatttttaaattataccttaagttctggggtacatctgcagaacgtgcagttttgctacataggtatatacgcaccatggtggtttgctgcacccatcatcctgtcacctacatgaggtatttctcctaatgctatccctccctgtgtccatgtgttctcattgttcatttcccacttatgagtgagaacacacagtgtttagttttctgttcttgtgttagtttgctgagaatgatggtttccagctacatccatgtccctgcaaagtatgtgaactcatcctttttaatggctacatagtattccatgatgtacatgtgccatattttctctatctgtctatcattgattggcatttgtgttggttccaagtctttgctgttgtgagcagtgctgcaataaatatacatgtgcatgtgtctttatagtagaagggcttataatcctttgggtatatacccagtaatgggattgctgggtcaaatgttatttctagttctagatccttgaggaattgccacactgccttccacaatgattgaactaatttacattcccacaaacagtgtaaaaatattctatttctccatatcctttccaacatctgttgtttcctgacttttaatgttcgccattctaactggcatgtgatggtatctcattgtggttttgatttgcattcttctaatgaccagtgatgacgagctttttttcatatgttttttggccacatagatgtcttcttttgagaagggtctgttgatatccttcacccactttttgatggggttgtttttttttcttttaaatttgtttaagttctttgttgattctggatagttgccctttgtcagatggatagattgcaaaaattttctcccattctctaggtggcctgttcactctgacgatagtttcttttgctctggagaagctctttagtttaatgagatctcattagtcaattttggtttttgttgccattacttttggtattttagtcataaagtccttgcccatgcctatgtcctgaatggtattgcgtaggttttcttctagggtttttatggttttagggcttatgtttaagtctttaatccatcttgaattaatttttgtataacttgtaagaaagggatccagtttcagctttctccatatggttagccagttttcccaacaccatttattaaaaagggaatccttcccctatttctttttttgtcaggtttgtcaaagatcaaatggctgtagatgtgtggtgttatttctgaggcctctgttctgttccattgatctatatatccattttggtaacagtaccatgctgtttttattacttcggccttgtaatatagtttgaagtcaggtagcatgatgcctccagctttgttctttttgctgaggattgtcttggctatactggctcttccttggttccctatgaaaatgaaagtagttattttgaattctgtgaagaaactcaatggtagcttgatggggatggcattgaatctataacttaccttgggcagtatggccagtttcatgatattgtttcttcctatccatgagcatggaatgttcttgcatttgtttgtgtcctcttttatttcgttgagcagtggtttgtagttctccttgaagaggtccttcacatcctttgtaatttggattcctaggtattttattctctttgtagcaattgtgaatgggagttcactcatgatttggctctctgtttatctattattggtgtataggaatgcttatgatttttgcaccttgatttttgtatcctgagactttgctgaagttacttaacaatttaaggggttttgggctgagacaatggggatttcctaaatataaaatcatgtcatctacaaacaggaacaatttgacttcctcttttcctaattgaataccctttatttctttctcttgcctgattgccctgggcagaacttccaatattatattgaataggagtggtgagagagggcatccttgtcttgtgccagtttccaaaggaatttcttccagtttttgcccattcagtatgatattggctgtgggtttgtcataaatagctcttattattttgaaatatgttctatcaatacctaatttattgagagttttagcatgaagagctgttgaattttgtcgaaggccttttctacatctattgagataatcatgtggtttttgtctttggttctgtttatatgatggattacgtttattgatttgcatatgttgaaaaagccttgcatccccgggatgaagccaacttgatcgtggtggatgaagccaacttgatcgtggtggataagcttgttgatgtgctgctggattcagtttgccagtattttattgaggatttttgcatcgatgttcatcagggatattggtctaaaattctctttttttgtgtgtctctgccaggctttggtatcagtatgatactggcctcacaaaatgattagagagaattccctctttttctattgattggaatagtttyagaaggaatggcaccagttcctctttgtacctctggtggaattcagctgtgaatccctctggttctggactttttttggttggtatgctattaattattgcctcaatttcagagcctgttattggtctattcagagattcaacttcttcctggtttagtcttgggagggtgtatgtgtccgggaatttatccatttcttttagattttctagtttatttgcgtagaggtgtttatagtaatctctgatggtagtttgtatttctgtgggatcagtggtgatatcccctttatcattttttattgtrtctatttgattcttctctattttctcctttattatttttgctagcagtctatcaattttgttgatcttttcaaaaaaccagctcctggattcattaactttttgaagggttttctgtgtctatctcctccagttctgctctgatcttagttatttcttgtcttctgctagcttttgaatatatttgctcttgcttctctagttcttttaattgtgatgttagggtgtcaaatttagacctttcctgctttctcctgtkggtatttagtgctataaatttccatctacacactgctttaaatgtgtcccagaaattctggtgtgttgtgtctttgttctcattgatttcaaagaacatctttatttctgacttcatttcattatttacccagtagtcattcaggagcaggttgttcagtttccatgtagttgagcagttttgagtgagtttcttaatcctgagttctagtttgattgcaccgtggtctgagagacagtttgttataatttctattcttttacatttgctgaggagtgctttacttccagctatgtggtcaattttggaataagtgcaatgtggtgctgagaagaatgtatattctgttgatttggggtggagagttctgtagatgtctattaggtccacttggtgcagagctgagttcaattcctggatatccttattaactttctgtctcgatctgtcaaatgttgacagtggggtgttaaagcctcccattattattgtgtgggagtctaagtctctttgtaggtctctaaggacctgttttatgaatctgggtgctcctgtattgggtgcatatatatttaggatagttagctcttcttgttgaattgatccctttaccattatatattggcctagtttgtctcttttgatctttgttggttaaagtctgttttatcagagactaggattgcaacccctgcatttttttgctttccatttacttggtagatcttcctccatccctttattttgagcctatgtgtgtctgcacgtgagataagtcacctcaattcagcacactgatgggtcttgactctatcctattttccagtctgtgccttttaattggagcatttggcccatttacatttaaggttaatattctgtgaatttgatcctgtcattatgatgttagctggttattttgcttgttagttggctcagtttcttcctagcaatgatggtctttacaatttgacacttttttacagtggctcataccagttgttcctttccatgtttagcacctcctgcaggagctcttgtaaggcaggcctggtgktgacaaaattcttcagcattagctcgtctgtaaaggattttatttctccttcgtttatgaagcttaatttggctggatatgaaattctgggttgaaaactcttttctttaagaatgttgaatattggctcccattctcttctggcttgtagagtttctgctgagagatccgctgttagtctgatgggcttccctttgggggtaacccaacctttctctctggctgccctaaatatttattccttcatttcaactttggtgaatctgacaattatgtgtcatggggttgctcttctcgaggagtatctttgtggcattttctgtatttcctgaatgtgaatgttggcctctcttgctaggttggggaagttctcctggataatattctgaagagtgttttccaacttggttccattctccccatcactttcaggtacaccaatcagatgtagatttggtcttttcacatagtcmaatatttcttagaggctttgttcatttctttttactcttttttctctaaacttcccttctagcttcatttcattcatttgatcttcagtctctgataccctttcttccactagattgaatcggctactgaagcttgtgcatgcatcacatagttctcatgacatggttttcagttccatcaggtcatttaaggtcttccctatgctgtttattctagttagccattcgtctaatcttttttcaaggttttaacttctttgtgatgggttcaaacatcttcctttagcttggagaagtttgttattaccgatcatctgaagccttcttctctcaactcgtgaaagtcattctctgtccagctatcttctgttgctggcaaggagctgcttcctttggaggagaagaggtgctctgatttttagaattttcagattttctgctctcgttactcccatctttgtggttttatctaccttttgtctttgataatggtgacatacagatggtgttttggtctgggtttcctttctgtttgttagttttccttctaatagtcaggactctcaggtgcaggcctgttggagtttgctggaggtccactccagaccctgtttgcctggatatcaccagtggaggctgcagaacagcaaatattgcagaacagcaaatgttgctgcctgatccttcctctggaagctttgtctcaaaggagcaccgggctgtatggggtgtcagtcggcccctactaggaggtgtctcccagttaggctactcgggagccaggtacccacttgaggaggcagtctgtccattctcagatttcaaacttcctgttgggagaaacaccactttcttcaaagctgtcagatagggacgtttaagtctgcagaagtttctgctgccttttgttcagctatgccctgcccccaaaggtgtagtctacagaggcaggcaggcctccttgaggtgcggtggtctccacccagttcgagcttcctggctgctttgttaacctactcaagcctcagaagtggtggacgcccatcccccagccttgctgccaccttgcattttgatctcagactgctgtgctagcattgagcgaggttctgtgggcatgggaccctctgagccacgcatgggatataatctcctggtgtgccatttgctaaggccattggaaaagcacagtattagggtgggagtgtcccaattttccaggaaccatctgtcatggctttccttggcttggaaagggaattcccccaccccttgtgcctcccaggtgaggcgatgccctgccctgcttcagctcacactccatgggctgtacccattgtctgacaagccccagtgagatgaacccagtgcctcagttggaaatgcagaaatcacccatcttctacattgctcacactgggagctgtagactggagctcttcctattcggccaccttggaacctcccagtatggccattttctcaatatttattattcctatccawgagcatggaatattttttccatttctttgtgtcctcttttattttgttgagcagtggttggtagttctccttgaagaggtccttcacatctcttgtatgttggattcctaggtattttattctatttgtaacaattttgtatgggagttcactcatgatttggctctctgtttgtctcttttttgtgtatatgaatgcttgtgatttttgcacattgattttgtatcctgagactttgctgaagttgcttatcagcttaaggagattttgggctgagacgatggtttttctaaatacacaatcatgtcatctgcaaacagggacaatttaacttcctcttttcctaattgaataccctttatttctttctcctgcctgcctgattgccctggccagagcttccaacactatgttgaataggagtgatgagagagggcatccttgtcttgtgccagttttctttatatatgtaaatatatatatatttttatactttaagttgtagggtacatgtgcacaatgtgcaggtttgttacatatgtatacatgtgccatgttggtgtgctgcacccattaactcatcatttacattaggtatatctcctaatgttatccctccccccacccccaccccacgacaggccccagtgtgtgatattctccttcctgtgtccaagtgttctcattgttcaattcccacctatgagtgagaacatacggtgtttggttttttctccttgccatagtttgctgagaatgatggtttccagcttcatccatgtccctacaaaggacatgaactcatccttttttaaggctgcatagtattccatggtgtatatgtgccacattttcttaatccagtctatcattgatggacatttgggttggttccaagtctttgctattgtgaatagtgccgcaataaatgtacatgtgcatgtgtctttatagcagcatggtttataatcttttgggtatttacccagtaatgggatggctgggtcaaatggtatttccagttctatatccctgaggaattgccacagtgacttccacaatggttaaactagtttacagtcccaccaacagtgtaaaagtgttcctatttctccatatcctctccagcacctgtcgtttcctgactttttaatgatcactgttctaactggtgtgagatggtatctcattgtggttttgatttgcagttctctgatggccaatgatgatgaacattttttcatgtgtcttttggctgcataaatgtcttcttttgagaagtgtctgttcatatccttcasccacactttgatggggttttttttcttgtaaatttgtttgatttctttgtagattcttgatattaggcctttgtcagatgagtagattgcaaaaattttctcccattctgtaggttgcctattcactctgatggtagtttcttttgctgtgcagaatctctttagtttagttagatcccatttgtcaattttggcttttgttgccattgctttttgtgttttagatgtgaagtccttgcccatgccaatgtcctgaatggtattgcctaggttttcttctagggtttttatggttttaggtctaacatgtaagtctttaatccatcttgaattaatttttgtataaggtgtaaggaagggatccagtttcagctttctccatatggctagccagttttcccagcactatttgttaaacagggaatcctttcccatttcttgtttttgtcaggcttgtcaaagatcagatagttgtagatgtgtggtattatttctgagggctctgttctgttccattggtctatatccatatggtacaagtaccatgctgttttgtttactgtagccttgcagtatagttggaagtgaggtagcatgatgcctccagctttgttcttttggcttaggattgacttggcaatgtgggctcttttttatttccacaagatctttaaagtagctttttccaattctgtgaagaaagtcattggtatcttgatggggatggcattgaatctataaattaccttgggcagtatggccattttcacgatattgattcttcctatccatgagcatggaatgttcttccattagtttgtgtcctgttttatttcattgagcagtggtttgtagttctccttgaagaggtccttaacatcactcctaagttggattcttaggtattttactctctttgaagcagttgtgaatgggagttcactcatgttttggctctctgtctgttattggtgtataagaatgcttgtgaattttgtacattgattttgtatcctgagactttactgaagttgcttatcagcttaaggagattttgggctgtgacaatgtggttttctagttacacaatcatgtcatctgcaaacagggacaatttgacttcctcttttcctaattgattacccttaatttctttctcctacctgattgccccggcgagaacttccaacactgcgttgaataggagtggtgagagagggcatccctgacttgtgccagttttcaaagggaatgcttccagtttttgcccattcagtatgatattggctgtgcatttgtcataaatagctcttattatttttagatacgtcccatcaatacctaatttattgagagtttttagcatgacgggttattgaattttgttgaaggccttttctgtatctattgagataatcatgtggtttttgtctttggttctgtttatatgctggattacgtttattgatttgcatatgttgaaccagccttgcatcccagggatgaagccaacttgatcgtggtggataagctttttgatgtgctgctggattcggtttgccagtatttttttgaagatttttgcatcgatgttcttcaggcatattggcctgaaattttttgtgtgtgtgtctctcctgggctttggtatcaggatgatgctggcctcataaaattagttagggaggattccatctttttctcttggttggtataatttcagaaggagtgtaccatctcctcttggtacctctggtagaatttagctgtgaatccttctggtcctgaactttttttttggttggtaggctattaattattgccttaatttcatagcctgttattaatctattcagagtttcaaattcttcctggtttagtcttgggagggtgtatttgttcaggaatttatgcatttcttctagatattctagtttatttgcatacaggtgtttatagtattctgtgattgtagtttgtatttctctgtgattggtggtgatatcccctttatcattttttattacatctatttgattcttctctcttttcttctttattagtcttcctagtggtctatcagttttgttgatcttttcaaaatatcagctcctggattcattgatttttttaaagggttttttgtgtctctatctctttcagtactgctctgatcttagttatttcttgccttctgctagctttggaatttgtttgctcttgcttctctagttcttttaattgtgagttttggtgtcaattttagatcttttctgctttctcttgtgcatatttagtgctataaatttccgtctacacactgctttaaatgtgtcccagagattctagtatattgcatgtttgttctcattggtttcaaagaacatctttatttcttccttcatttcgttatgtccccagtagtcattcaggagcaggttgttcagtttccaaggggttgtgtggttttgagttagtttcttaatcctgagttataatttgattgcactgtggtctgagagacagtttgttataatttctattcttttacatttgctgaggagtgctttacttccaattatgtgatcaattttagaataagcacgatgtggtgctgagaagaatgtatattctgttgatttggggtggcgagttctgtagatgtctatcaggtccacttggtccagagstgagttcaagatctggatatctttgttaaccttttgtctcattgatctgtttaacattgacagtaggatgttaaagtctgccattattattgtgtgggagcctaagtctttgtaggtctctaaggacctgctttatgaatctgggtgctcctgtattgggtgcatatatatttaggatagttagctcttcttgttgaattgatccctttaccattatgtaatggcctttgtctgttttgttctttgttggtttaaagtctgttttatcaaagggtaggattgcaacccctgatttttttttttttttttttttttgctgtctatttgcttggtagatcttcctccatccctttattttgagcctatttgtgtctctgcatgtgagatgcatctcctgaatacagcacactgatgggtcttgactttttatccgattttacagtgtgtggcttttaattggggcacttagcccatttacatttaaggttaatattgttatatgagaatttgatcctgtcattgtgaagtagcttgttattttgcctgttagttgatgcagtttttttcatagcattgatggtctttacaatttagcatgtttttgtagtggctcgtatggtttgttcctttccatgtttagtgcttccttcaggagctcttgtaaagcaggcctggtggtcacaaaatctctcagcatttgcttgtctataaaggattttatttctccttcatttacgaggcttagtttggctggatatgaaattctgggttgaaaattcttttctttaagaatgtcaaatattggccctcactctcttttggcttgtatggtttctgctgagagaggcactgttagtctgatgggtttccctttgtgggtaacctgagatttctctctgctgcccttaacactttttccttcatttcaactttggtgaatctgacaattatgtgtcttggggttgctcttctcgaggagtatctttgtggctttctctgtgtttcctaaatttgaatgttggcctgccttgctaggttggggaagttcttcacttcctgaagagtgttttccaacttggttccattctccctatcactttctggtacaccaatcaaatgtagatttggtcttttcacatagtccaatatttcttggaggctttgtttgtttctctttactctttttactctaaacttgtcttctcactttatttctttatttaattaatttgatatttgatcactgataccctttcttccacttggttttattgactattgaagcttctgcatgcatcatgaagttctcattccatggtttttggttccatcaggtcatttaaggtcttctctacactgttctagttagccattcatctaacctttttttcaaggtttttagctttcttatgatgcgttagaacatgctcctttagcttggagaagtttgttattaccgacattctgaagcctacttctgtcaactcatcaaagtcatgctccatccagctttgttcctttgctagtgaggagctgtaatcccttgaggaggagaggcactctggtttttagaattttcagcttttctgctctggtctctccccatctttgtggttttatctacctttcgtctttgatgttgctggcctacagttgtggttttggtgtgaatgtcctttttgttgatgttgatgctattcctttctgtttgttagtttttcttctaaccatcatgtccctcagctgcaggtctgttggagtttgttggaggttcactccagacctttttgcctgggtataaccagcggaggctgcagaacagcaaatattgcagaacagcaaatattgctgcctgctcctttctctggaagcttcatcccagagggacacccacgtgtatgaggtgtctgttggcccctactgggagttgtctcccagttaggctacacggggttcaggtacccacttgaggtggcagtctgtctgttctcagagctcaaacgccatggtgggagaagcactgctctcttcagagctgtcagatagggatgtttaagtctgcagaagttgtctgctgcctttttttcagctatgccttgccctggattctatagaggcagtaggccttgctgagctgcagtgggctccacccagttcaagcttcccagcccctttgtttatctactcaagccttagcaatggtggatgccccttcccccacctggctgcagccgcgcaagttgatcttagactgctgtgctagcagtgaacaaggctccatgggcatgggacccactgagccaggcacgggagagaatcttctagtctgcctgttgctaagaccatgggaaaagcacagtatttgagtgagagtgtcctgcttttccaggtatcatctctcacggcttcccttcactaagaaagggaaatcccttaacaccttgcacttcctgggtgaggcagtgccccacccttcttcagctcaccctccatgggctgcacccattgtccaaccagtaccaatgagatgaacaaggtaccgcagttggaagtgcagaaatcacttgtcttctgcctcaatcatgctgggagctgcagaccagagctgttcctatttggccatcttgccactaaatctctagttcttttaaatgtcatgttaggatgctgattttagatctttcatgctttctcttgtggacatttagcggtatcaatttccctctacacaatgctttaaatgtgtctcagagattctgtttcattatttctttgttctcattggtttcaaagaacattattacttttgccttaatttcgttagttactcagtagtcattcaggagcaggttgttcagttaccatgtcatcatgcagttttgagtgagtctcttaatcctgagttctaagttgattgcactgtggtttgagagactgtttgttatgacttccattcttttcatttgctcaggagtgttttacttctagttatgtgatcaattttagactaagtgttatgtggtgctgataagaatgtatattctgttgatttgggatggagagttctgtagatgtcattaggtccacttagtccagagctgtgttcaagtcctgaaaatccttgttaattttctgtgtcattgatctgtctgatattgacagtgggtgataaaatctcccactattattgtgtgggagtctaagtctctttttaggtctgtaagaacttggtttatgaatctggatgcccctgtattgggtgcatataatttaggatagttagctcttcttgttacattgtgtctggattttgttccttctggtgcgttcgtggtyttgttgacttcagaaatgaagctgtggacctttgtggtgagtgttagagcttttaaaggtgttgcagaccaaaaaagtgagtagcagcaagatttattgtggagagcgaaagaacaaagctttgacatcatggaaggagaccttagagggttgcttctgctggctgaggtggccagcttttattcccttatttgtccccacccatgtcctgctgattggtccattttaccgagtgctgattggtccattttacagggcactgattggtccatttttcagagcactgattggtccatttacagtgtgctgattggtccagtttacaaacctctagctagctacagagcactgatttgtgttttttacagagcgctgattggtgcattttacaatccttttgtaaaacagaaaagttttccaagtccccacccaacccagaagtccagctggcttcacctctcacctttaccattaggtagtggccttctttgtctcttttgatatttgttgcttaatgtctgttttatcacagactaggattgcaacccctgctttttattgctttctatctgcttggtaaatcttcctccatccctttattttgagcctatgggtgtctctgcatgtgagatgggtctcctgaatacagcacaccaataggtcttgactttttatccaatttgccagtctgtgtcttttaactagggtatttagcccacttacatttaaggttaatattgttatgtgtgaatttgatcctgtcactatgatgttagccagttattttgcttgttagttgatgcagtttcttcacagagtcaatgatctttacaatttggtgtgtttttgcagtggctggtaccaatttttcctttccatatttagtgcttccttcatggattcttgtaaggcaggcctggtggtgacaaaatctttcagtatttgcttgtctgtaaaggattttatttctccttcacttatgaaacttagtttgtctgggtatgaaattctgggttgaaaattattatttttttaagaatgttgaatattggccctcactctcttctcgcttgtcatgtttctgctgagaaatccactgttactctaatgggttttcctttgtgggtaacccaacctctctggctgctcttaatattttttccttcatatcatattttgaatattttatctgtcatttctgagttgccaatttatttagggttcattgctggggagttagtgtggtcttttggtggttttacaatattcagatatttcatggtgccagaattcttatgctggtttcttcttatttggagaggcaaccccttctgatttttgaatttttgttttctgcagatagaattgttttctctccctatttttttctttcctttttccctctcccttccaatgggggtgtaactataaagtatgttgggtagggtctttgactttaattccatagctgtgtttacttctgtgggtagttttatatcggcctgtgcagtttgacatacatgtcagtagatgggacttgtgagcaaaagccagctgcagctagcacaagtttctctagcacagcttgatccttgttttctgggggatcttctttgtttcctcaggcaatctgttcatctgtggaatgcagagtggtctgggctccctgctcagccccaggggaatcaagatgggtggcactggactgggcagtcttatctagtttccctaatgacaggcactagcaccagcactgagaaataatccagtgggcagacttgaagcccccagggttgtgctagccatggagctaagaaacctctttggctccaagtactctgcaggggtaagggaggggagagttggtggtggcctaaacttctaatccaggtgagtggatgctttgaatgcctcatgatctgtctgagtgtgaaggagagagagctcccctgcggccagatctctgtacaggaaggggagggtggctcaggctgacaatccaggtgagcaggtgctttgaatgccctgagatctgcctggatatggagcagagagggcccccttgcaccatgatctatgcacaggcacaggaagagtggggtggctcagggtgctgatccaggtgagaaatgctctaaatrcttagcagtctgcctgggtgtggagcacagagggtccttctggaccattatctataccaaggaagagtggggtggctaggactgctggtccaggcaagtagatgctctgagtgcctggagctctgctttgaggatggaatggagagggctccactcctcaatcttaggggaaaggctgaggcaccaagcaaggacacatgcagaccatttccaggtcaccaagctagtcctggctgtaaatgtcatcacccaggagaactgctgtagcagctctccttccatcccaggtctgtaatgtgggagggcccaattccagtacccactgctaaggtgctttccacaattatggctgtggaggcccctaccttcctccagaccaactgctccgatttctggcctgagactaaaatatctgcgtggccatgatgccaggctgccaaagaatgattgactttttatgctcccatattaaaagcagcatcttgctcttggtcccaggtatgggaaaatgtgtgcagcttttcctggtgtctttccctctcagcatgttcaagcctctccccaccttagctgcagggcttagaataaacaaagtgctctcccttgacctgggttgctcagatccccagttgaagggtgagtagccaggggaggctctctttcacataacgggtctgtacttacttttatcagctgaatgccatcatgaggctgtttgtccacattttcctccccaggtatcttagatgtctttcacgatttctgtggatttttcttcttgaatttaagcttacaaagttgatctttatgtactktgctatttccaagtggctgaagcatgctaattgcctctaatctgccatcttggaaaatatggtattctttattctttagcaatgtttaatagtttttagtgtcagagtcttttattttcttgattattgttttctttgtgtattgtatgagatttttctatatatagaaacatgttatcttgaactacacatgatctgaatttttcctttcctatttggatgtgttttatttcattttcttgcatggttgctctggctagaacttccaatactatatttaatagtagtaaaagtggacatccttgttttttttcttttctttctgattttaagttataagactttagcctttcaaaatttagtatgccttagctttgcagttttcataaatatgctttattatggtaagggagttttatttatagttttatgagtatttttgttatgataggtgttgaaagttgtcatttttttctgcatctaatgagatgaacatgtttttctcttttattctaatatggtgtagtgcactggttgactttcttgttgaaccacccttgcatttctgggataaatctaacttgtttattgtgtgtaatcttttaaattttgtaaaaaatgttgtggcaaaatacacaaaaaagtttctgtattaatcattttaagtgtatagtgtattggcattgattacattcacattgttgtgcaaacatcactgccatacatctacagaattcttttcatcttacaaaatggaaaccttatacccatttaatagtaactcttggccgggcattgtagatcatgcctgtaatcccagcactttgggaggttgaggtgggcagatttcatgagctcaggagtttgagaccagcctgggcaacatggtgaaaccctgtctctaccaacaaagcagtcaacaaacaaaaccaaagtaatataatttcctcaactatgcaaactaattcatattaataattccatgaagtgtgtccatagtaacacaagatgggccttataaagttggcctatcacattctttgaggtctttgtcagtcttatgtgccagatactgtgcggactagctgcaattaaaattcccattcccttatcacttgctccgaaatttatctgaagtcaaagggaatggcttgcccaaagagaagtgtccagagacgtggatgatgtgacaagaaatgttgtagaaccccacccccacctcaaatgataactgtacatttctcctttccaccrtcccgtggcaaccaacattctactttatgtctctatgaaatcgagtatgctgggtacctcatagaagtggaatcattacatatttgcccttttgtgactggtttatttcactttgcctaatgttatgttctcagggttcattcatgttttcgcatgtgtcagatttttcttcatttccaagggtgaataatattccgttgtatgtataaaccaaatttgcttacccatttttctgttgatgggcacttggattactttcacctctggctttgtgagtaatgttattatgcatatgggtaaataaatatctctttgatgtgctgctttcaattcttttgggtatatacccagaagtggcatttctgggatatgtggtaattctatttctaattctcgaacgtcttaatgtttttcttaacagctgcaccattttacattacattcccatcagtaggacatgagggttccaatttcttcacattctcacttgttgttttcttttgttttcttagcctttatttattagatttacttattatttatttattaataatttataaatattacaaattataataatgcaaatrtataatagtaaaaaatatattataaatacgttaccataaatttatattatataacatatataaaagtatattattattgatatattataaatttataatttattattttagtgggcacaataattgtacatatttatggggtgtactgtaatatttcagtatatgtatacaatgtgtaatgatcaagcaggatgattagcatatctataacctcaagtatttttcattcccttgtgcttgaaacattaaaaatctgctcttctagctatttgaaaatatacaataaagtgttgttaattatagtcaccctacactgctatagaatactataacttttctcttttgtatagctgaagttttgtatctgttaaccaacttctggctatcccccttacttctctacctctactagctaccattctgttctctatttctgtgagattaactttcttagctaccatataagaataagaacrtgcgttatttatctttccatgccaggcttatttcacttaacataatgtcttctaatctcaaccatgttgttgtgaatgatagaattttgggcttttcttattggtaattagttttccatggtgtatgtatacataccacgttttctttacccattcatttgttgatggacacttaggttgattccatatcttggctatggtgaatagtgctttaagtaaatatggaagtataactatctccttgatataacagtatcttttcatctggttatatacccaagaatgggattgctggattatatggtagttctatttttagttcttcgaggattctttatactgttttccatcatggcagtactaatttacattatcaataagtttttgagttctctttctctgcgtcctcaccagcgttggctgtcttttgtctttttgatgatagcaattctaactggagtgagctgatatctcattgtggctttgatttgaatttycttgctgatataatcataagcattttccatatacctattggccacttgtatgtctcttttgggagacgcctgttcagtttatttacccatattttaattgtagtatttgtttttttgtttctgttgaattgtttgagttacttgtatattttggatattaatcctggtcagatgaaaatattgcaaatattttctgtcattcttcaggttgtctttccactttattgaatgttttctttgccctgcagaagtttgctataatctcatttgtctaatttttacttcagttgcctgtgcttttgaagttttatccattgccaagaccaatactctgaagcatttctcctgtttttcttctagtagtttcatagtttcaggtattaatcatttcatttgttttgagtttatttttgtaaataatgagagataaaaatcttgtttcatttttctgcatataaacatccagttttcctgttgctatttaatgaaaagactgttctttcatcagtgaatgttcttggtgccttgtcaataatgtttgctataaaggcatggaataatttctgtgttctctgttctcttccatgggtccatgtgtctgcttttaggccagtataatgttattttagatattatagatttatagtattttttgtgtgtttttaaatgtttctgggtacacagaaggtatatatatttgatgggtacatgagatcttttgatataaaaatgccatgtgtaataatcacattatggaagatggtttatctatcctctcaagcatttatcctttatgttacagacaatcgaattatactctttaagttatttaaaaatgtatgattgactaattattgactatagtcaccctattgtgctatcaaatactaggacttattcattaattataactatttttgtaccaattagaatttccactccccttcacccactcactgtccctcccagcctctggtaaccatctttctaccctgtatctccatgggctcaattgttttgagttttagatcccacaaataagtgagaacatgtgatgtttgtctttctgttcctggtttatttcacttaacataataatctccaattctatctgtgttgttgcaaatgaccgaatctcatttttttaaatggctgtatagtactccgttgtgtatatgtaccacgttttctttatccactcatccattgatgaacacttaggttgcttccatatcttagctattataaacagtgctgaaacaaacatgggagtgtagatatctcttcaatatactgatttcctttcttttggatatacctagcagtgggattgctgggtcatttggtaactttatttttagttttatgaggaacctccaaatcttgctccatagtaattgtatgaatttaaatttccacaaaaaatatatgagggttcctttttcttcacatccttaccagcatatgttattgctcatctcttggatataagccactttaactggggtgagatgatatcttattacagtttttatttgcrcttctcagatgatcagtgatattgagcactttttcatatgtctgttttccatttgtatgtcttctgttgggaaacgtctattcaaatcttttgcccactttaaaactaaattattagatttgttcctagagagttgtttgagctccttatatagtctggttkttaatcccctgttagaggggtagttttcaattattttcttcctatctgtgggttatcttttcactttattgattgtgtcctttgctgtgctgaaactttttaacgtgatataatcccatttgtccatttttactttggttggagttttctaaatctacaatcatgtaatctgcaaacagacaaaatttgattttctctcttcctgtttgaataccttttattttatttctttctcttgcctgattgccctggtcagaacttccaatattatgttaaatagaagtggtgagagagggcatccttgtcttgtgccagttttcaaagggaatgcttccatttttgcccattcagtataattttggctstggtttgtcataaatacctcttactattttgagatwcattccatcaaaatctagtttattgagagtttttagcatgaaggggagttgaattttgtcaaaggccttttctgcatctattcagatagtcatgtggtttttctcattggttatgtttatgtgatggattatgtttgtgtgtgtttgtttatttatttatttattttgagacagagtcttgccctgtcacccaggctggagtgcagtggcattatctcagctcactgcaacttctgcctttcagattcaagtgtttctcctgccttagccccctgaatagctggaattacagaggctgccaccacgcctggctaattttttgtatctttagtagagactgagtttcaccatgttggccaggctggtctcaaactcctgaccctgtgatccacccacctcagcctcccaaagtgctggaattataggcgtgagccacgtcrcccggcctacatttattgatttgcatgtgttgaacgagccttgcatcccagggatgaagccaacttgatcgtggtggataagctttttgaagtgctgctggattcagtttgccagtattttgttgaggattttcgcatggatgttcatcacggatattggcctgaaattttctttttttttgttttatgtctgccaagttttggtatcargatgattcttcccttataaaatgagttaggaaagagtctgtctttttctactgtttggagtactttcagaaggaatggtaccagctcctctttgtacctctggtagaattcggctgtgaatccttcaggtcctgggcttttttttgcttggtgggctattccttgctgcctcaatttcagaacttgttattggtctcttcacggattggacttcttcctggtttggtcttgggagggtgtatgtgtctagaaatttatccatttcttctagattttctagtttatttgcatagaggtgtttatagtattctctgatggtagtttgtatttctgtaggatcagtggtgatatcccctttatcatttttttgttctctctatttgattcttctttcttttcttctttattagtctggctagcagcctattttgttaatcttttcagaaaattaactcctgtattctttgatattttgaagggattttcctgtctctatctccttcaattctgctctgatattagttattttttgtcttctgctaggtttgaatttgtttgctcttggttttctagttcttttaaatgtgatgttagggtgttgattttagatctttcctgctttctcctctggacatttagtgctataattttccctctaaacactgctttagctgtgtcttggagattctggtacactgtgtccttgttctcattggtttcaaagaacatctttattttgccttcattttgttatttacccagtagtcattcagagcaggttgttcagtttccatgtagttgtgcagttttgagtgagtttcttaatcccgagttttaatttgatggcactgtggtctaataggttgtttgctttaatttctgttcttttgtatttgctgatgggtgttttacttccaattatgtggtcaattttagaataagtgtgaagtggtgctgagaagaatgtatattctgttgatttagggtggagagttcyttagatatctattatgcccgcttggtccagagcttagttcaagtcctggagatccttgttaaatttctgtctcattgatctgtctaatattgacagtggggtgttaaagcctccatctattattgtgtgggagcctaagcctctttgtaggtctttaagaacttcctttatgaatctgggtgctcctgtattgggtgtgtatctatttaggatagttagctcttctcgttgcattgatccccttaacattatatgataccacccctttttttaatctttgttggtttaaagtgtgttttatcagagactaggattgcaacccctgctttgttttgctttccatttgcttggtaaatattcctccatccctttattttgagcctatgtgtgtcttttcacgtgagataggtctcctgaatacagcacattgatgggtcttgactctatccaatttgccagtctgtgtcttttaattggggcatttagcctgtttacatttaaggttaatattgtgtgtggatttaatcctgccattatgatgctagctgattattttgccttttagttgatgcagttttttttatagtgttgatggtctttacaaaatttagtatgtttttgcagtggctgttcccagttgatcctttccatatttagtgtttccttcaggagctcttgtaaggcaggcttggtgatgacaaaatccctcagcatttgcttgtctgtaaaggatgttatttctcctttgcctatgaagcttaatttagctggatatgaaattctgggttgaaaattyttttctttaagaatgttgaatattggcccccactctcctctggcttgtcgagcttctccagagagatatgctgttagtctgacaggcttcccttggtggtaacccgacctttctttctggcttcccttaacatttttcctttcttttaaccttggtgaatctgacaattatgtgtcttggggttgcccttcttgaggagtatcattgtgggtgttttctgtatttcctgaatttgaatgttggtctgtcttgctagattgtggaagttctcctggataatatcctgaagaatgttttacaacttggttccattctccccatcactttcaggtacaccaatcaaacgtagatttggtcttttcacatagcaccacatttcttggaggctatgttcatttctttttattcttattttttaacttttttcttcacattttatttcattaagttgatcttgaatctctgatatcctttcttctgctttatcaatttggctattgatatttatttatgcttcacaaagttctcattctgtgttcttcagctccatcaggtcactcatgttcttctctagttagcaattcgtctaacattttttcaaggttcttagcttctttgcaatgggttagaacatgctcctttagctcagtggagtttgttattacacaccttctgaagcctacttctgtcaattcatcaaattctttctctgtccagttttgtccccttgctggcaaggagttgtgatcctttggaggagaagagatgttctggtttttgaaattttcagcctttttgtgctgttttttttttctcatatttgtggatttatctacctcttgtctttgatgttggtgacctttgaatgggttttttgcgtggacatcctttttgttgatgttgatgctattcctttctgtttgctagtttttttcctaacagtcaggcccttctgctgcaggtctgctggagtttgcttgaggtccactccaaaccttgtttgactgggtatcaccagaggaggccacagaacagcaaagattgctgtgtgtttattcctctggaagcttcgtcctagagggacacttgccagatgccagccaaagctcttttgtatgaggtgtctgttgacccctgctgggaggtctgctgttctctttagagccagcaggcaggaacatttaagtctgccgaagctgcacccactgccaccccttcttccaggttctcagtacagtgagatgggagttttatctataagcccctgactgggactgttgcctgtctttcacagatgcaactgctcagagagtaggaatctagaggggcagtatggctacagtggctttgcggagctgaagtggactccacctagtcctagcttcctggaggctttgtttacactgtgaggggaaaaccacctactcaagcctcaacaatggcagactcccctcaacaccccccccaagctcgaacatccccagtcaacttcagactgctgtgctggcaaacagaagttcaagccagtggatcttagcttgctgggctccatgggggtgagatcccctgagctagatctcttggctccctggcttcagtcctctttccaggggactgaatggttctgacttgctggtgttacagcaccactggggcataaaaaaaacccctccagctatcttggtgtctgcccagatgaccacccagttttgtgcttgaaacccagggccctggtggtgtaggctctgaagggaatcttctggtctgtgggttgtgaagaccatggaaaaactgcagtatttgggccagagtgcaccgttcttcacagcacattccctcaaggctttccttggctatgggagggagttcaccaatcccttgggcttccaaggtgagacaacattcctccctgcttcagtttagcctccatgcactgcacctactgtctaaacattcccagtgagatgagccaggtacctcagttggaaatgtagaaatcacctaccttcttcattgatctcgctgggagctgctgactggagcttttcttattcagtcatcttgccagccaccctcctgattgagtttctttaaggtaattattttgaattccttttttgaatatttgtggattttttttcattgaggtctgttatttgagagttattatgtccctttggtggtgccatatttctttatttttcatgttgtgtctctgaatttatgtctatgcatgtgatggaacaattgctattccaaaatctctagagtgaatttcatagagaaagacttttatctgaagttgagtgtttgtgtgcaggtgacgaagagtgggtaactcagtttttgatagatgcattgtgatagtatctgtgtagtttctctagctatggccaatatcagcaataattttgggtgcctcagtggcctaggctgtagaagtttgcagcagtatcaggagcagtgtaggttgttaatgtccttagtgtcaaagtatttgggcgtcctcctatttttattttcctaaaattggggtgacttagcctaagggattccttttggtgtcatctctgacatggcattaactcagcggcattggtgctgggttacaagtacagatccttgaagttgtcatagaagcatcattctagactcagggtcttttaatcatgtattgtgacacctgggtcttgcggtgcaggttcactctctgtggcagtgttgaatgcagattacccacagaaccaaggtctatgactctagcacaccttagcagctgaagcccacagactgagttgtggctgtgaatctgtttctgagggtgaggtgcaggaaaatgccrtggcctgcctctgatgtagaaggggtgctctttagatttgagcccagcaagtagaatatggctactatcattaataagataggatatactaccttattaatgctaagtaaccaagctcaagtcaagagatggaaatgttaatactggtttgtgactgcactgttcttcttacttaagagtaattttcaacatggcaagcttagaaaactgtgtgaagctgatgttaccaagggagaggactgtctttgtctacacatgttgagagaatctagtctatttcagtggtgttaactacasaatgtttaacatgacacaggtcacttggagactctaaaagcataattaatttattgctggcctagggacttgttagaaagtaatatgtttttgtatattgatgatctcttgtactcagtattcaaaactttccccttattgttgtcaattctgcatcacatcaacaccccagycctaattcaaactaagtattcctcatccattgcttccactctctgaacttccaaattttgagaactccagtctctgagtcttggcatatgccttacccttactctctcttttattccctgtgggcaattaatgtccttattctccatcttcatcattctcctttctcttcactttgtatatttttatttattcctgcactacttgcattctagaaaaagttgtctgttgcctcccatatagattacaatactgtgggcccatcttgtcattgtaaactcattctctttctctataatttattctaggttttactgtcatgttgcttttttcatatctgtttttatacaatttcaactttataatgaatctgcaggcaatattgagtccatgtacctttctgacagaagaagataattgcagactcttgtttcaggctcatagtatctaatgatatggccctaattttcctatttttattaatttaagttgtggttgtctacaggtaatagtaactttaacagaaaatgtctttatgtcttctcatttgtgttttgagaatgaaagaggaaatagaagaagtggatctagagatcttctgcttatatattttttttgccaaaaaatatgctgtgtgagtcagctaactgcagagtctgacaaatggaatttttaagcaagcatggaataagggggtaggaaataaagtttgggccagttggtctacagcatccactacaccatacagtattttttctttctttttttttttctttatttttatttttattttttttatttttatggcataagtgggattttatttattgtttatgcaaaacaaagtagccggtataattagacagtcatttgtaacttccaacataaacattttaggaacagtagtatcaaaagtgagtgctaattagagagctgttagagaaaatataagtggtaacagattaacaaactataccaaacagcaggctatttataactccatgctgttttaaattctcttttgtttaacagtctttgtactacttatttatttttttaatttttacaaaaacataaggaaaatgtagtctctttctttttttttttattatactttaagttttagggtacatgtgcacattgtgcaggttagttacatatgtatacatgtgccatcctggtgcgctgcacccactaactcgtcatctagccttaggtatatctcccaatgctatccctcccccctccccccaccccacatcagtccccagagtgtggtattccccttcatgtgtccatgtgatctcattgttcaattcccacctatgagtgagaatatacggtgtttggttttttgttcttgtgatagtttactgagaatgatgatttccaatttcatccatgtccctacaaaggatatgaactcatcattttttatggctgcatagtattccatggtgtatatgtgccacattttcttaatccagtctatcattgttggacatttgggttggttccaagtctttgctattgtgaataatgccgcaataaacatacgtgtgcatgtgtctttatagcagcatgatttatagtcctttgggtatatacccagtaatgggatggctgggtcaaatggtatttctaattctagatccctgaggaatcgccacactgacttccacaatggttgaactagtttacagtcccaccaacagtgtaaaagtgttcccatttctccacatcctctccagcacctgttgtttcctgactttttaatgattgccattctaactggtgtgagatgatatctcattgtggttttgatttgtatttctctgatggccagtgatgatgagcattttttcatgtgttttttggctgcataaatgtcttcttttgagaagtgtctgttcatgtcctttgcccactttttgatggggttgtttgtttttttcttgtaaatttgtttgagttcattgtagattctggatattagccctttgtcagatgagtaggttgcgaaaattttctcccatgttgtaggttgcctgttcactctgatggtagtttcttttgctgtgcagaagctctttagtttaattagatcccatttgtcaattttgtcttttgttgccattgcttttggtgttttggacatgaagttcttgcccatgcctatgtcctgaatggtaatgcctaggttttcttctagggtttttatggttttaggtctaacgtttaaatctttggccgggtgcggtggctcacacctgtaatcccggcactttgggaggccgaggcgggcggatcacgaggtcaggagatcgagaccatcctggctaaaacggtgaaaccccgtctctactaaaaatacaaaaaattagccgggcgtagtggcgggcacctgtagtcccagctacttgggaggctgaggcaggagaatggcgtgaacccgggaggcggagcttgcagtgagccgagatcccgccactgcactccagcctgggcgacagagtgagactccatctcaaaaaaaaaaaaaaaaaaaaaaaatctttaatccatcttgaattgatttttgtataaggtgtaaggaagggatccagtttcagctttctacatatggctagccagttttcccagcaccatttattaaatagggaatcctttccccattgcttgtttttctcaggtttgtcaaagatcagatagttgtaggtatgcggcgttatttctgagggctctgttctgttccattgatctatatctctgttttggtaccagtaccatgctgttttggttactgtagccttgtagtatagtttgaagtcaggtagtgtgatgcctccagctttgttcttttggcttaggattgacttgatgatgcgggctcttttttggttccatatgaactttaaagtagttttctccaattctgtgaagaaagtcattggtagcttgatggagatggcattgaatctgtaaattaccttgggcagtatggccattttcacaatattgattcttcctacccatgagcatggaatgttcttccatttgtttgtatcctcttttatttccttgagcagtggtttgtagttctccttgaagaggtccttcacatcccttgtaagttggattcctaggtattttattctctttgaagcaattgtgaatgggagttcactcatgattcggctctctgtttgtctgttgttggtgtataagaatgcttgtgatttttgtacattgattttgtatcctgagactttgctgaagttgcttatcagcttaaggagattttgggctgagacgatggggttttctagataaacaatcatgtcgtctgcaaacagggacaatttgacttcctcttttcctaattgaatcccctttatttccttctcctgcctgattgccctggccagaacttccaaatcaacagaatatacatttttttcagcaccacaccacacctattccaaaattgaccacatagttggaagtaaagctctcctcagcaaatgtaaaagaacagaaattataacaaactatctctcagaccacagtgcaatcaaactagaactcaggattaagaatctcactcaaaactgctcaactacatggaaactgaacaacctgctcctgaatgactactgggtatataacgaaatgaaggcagaaataaagatgttctttgaaaccaacgagaacaaagacacaacataccagaatctctgggacgcattcaaagcagtgtgtagagggaaatttatagcactaaatgcccacaagagaaagcaggaaagatccaaaattgacaccctaacatcacaattaaaagaactagaaaagcaagagcaaacacattcaaaagctagcagaaggcaagaaataactaaaatcagagcagaactgaaggaaatagagacacaaaaaacccttcaaaaaatcaatgaatccaggagctggttttttgaaaggatcaacaaaattgatagaccactagcaagactaataaagaaaaaaagagagaagaatcaaatagacacaataaaaaatgataaaggggatatcaccactgatcccacagaaatacaaactaccatcagagaatactacaaacacctctacacaaataaactagaaaatctagaagaaatggatacattcctcgacacatacactctcccaagactaaaccaggaagaagttgaatctctgaatagaccaataacaggagctgaaattgtggcaataatcaatagtttaccaaccaaaaagagtccgggaccagatggattcacagccgaattctaccagaggtacaaggaggaactggtaccattccttctgaaactattccaatcaatagaaaaagagggaatcctccctaactcattttatgaggccagcatcattctgataccaaagccgggcagagacacaaccaaaaaagagaattttagaccaatatccttgatgaacattcatgcaaaaatcctcaataaaatactggcaaaccgaatccagcagcacatcaaaaagcttatccaccatgatcaagtgggcttcatccctgggatgcaaggctggttcaatatatgcaaatcaataaatgtaatccagcatataaacagagccaaagacaaaaaccacatcattatctcaatagatgcagaaaaagcccttgacaaaattcaacaacccttcatgctaaaaactctcaataaattaggtattgatgggatgtatttcaaaataataagagctatctatgacaaacccacagccaatatcatactgaatgggcaaaaactggaagcattccctttgaaaactggcacaagacagggatgccctctctcaccgctcctattcaatatttttttctagtactatactttacagtttctatgttggtaagtatacaatgtgagtaattttgaatttactgtcatsaaatatgctgttaaataatttgtcagataattgcatcaaatcattcctaggaaaagcaaaaccaacagtctgaattcactattgaaaacttggtaatcactgcagctgacttacttggagctgggacagagacaacaagcacaaccctgagatatgctctccttctcctgctgaagcacccagaggtcacaggtatgatcacagaggatgagttaattgagttttaggaaagatgttgggaaggtgctgctagtgttctcctttctgtttctcttagagaagttccattatttaaatttctgtgcccgcagctgtaatctgtcccaatttaatggtgtgattaaaatggaatatcctggcctggtgcagtggctcatgattgtaatcccagccctttgggaggcctaggtgggtggaccattgaggctaggagttcaagaccagcctggccaatatggccaagccccatctctactaaaaatacaaaacgtagccgggcattgtggcacaccactgtaatcccagctacttgggggctgaggcatgggaatcgcttgaacccgggtggtggaggttgcagtgagccaagattgtgccattgcactctagcctgggtgacagagtgggaccctgtctcagaaaagaaaaaaaaggaaaagaaaagaaaagaaaaaaaggacatctttgcacagtagaggaagataactgagagaaatgaagacagcatggcagtttcaaaagcaatagagctctggcccagtgtgtctggatttcatcgacagtgacttatggcaggaagagacaacataagttggcctgggattgcatgttggttttattattaaaaggccattttgaacagcaagtgtattgttaaagataatttttctcrttctcaaaacttcaggttcaaatgctggagtagggaaaatggaaactcttcttattgaaggataaatggtaatcctagaaatgtagtgaggctgcctgaaaaaattcctagtctgataagtattctaaaaagttagattcatgagaaagttgattctgtttactaaaagaggtacctaaagaatgttccatttaggcagaagatgtacctgagacagtttctgtgaaattggtgttggataaaataagaatatttttgggggggccaataattttatcttttatgaacaactttactttagaaattttaaagactttcggttatgctgcagataataaatattcttttttcccctgtgtcagtatcccccatttaatgacaataacctaattacaaataagagttaggcctttttttgaacaattactaacctataacgttctagaagattttttcaacttttttttatagattaaagggtaaaaatacagatttgttacatgggtaaattgtgtaacactgagtctcggggtcccaactatttcatcaccctggcagtaagcatagtacccaacagatggttctccaacccacatcccttctctccctcccctatatagtgatcctcagtgtctattgttcccatctttaggttcatgtgtattcaatgtttacttcccatttataagtgagaacatgtggtatttggttttctgttcttgtattagattgcttaggataatggcctcctgcttcatctatagtgctgcaaaagacatgatttttgttcttttttatggctgcatagtattccatggtgtatatactagtctgttctcatgctgctaataaagacatacctgaggctgggtaattcataaaggaaagaggtttaatggactgtcaattccacatgactggaaaggcctcacaataagtctctgatagcaagacttatttactatcacaagaacagcatgggaacaccctgcccccatgattaaattatgtcccattgagtccctcccatgacatgtgggaattatgggagccaaagtccamgatgagatttgagtggggacacagtctaaacatatcagtgtatatttaccacattttccttatacagtctactgttgatgggcacttaagttgattccatttttttgctattgtgaatagcactacagtgaacatattggtgtgtgtgtctttttgatagaatgaatttttttgggggggcatatactcaatagttggattgctgggtcaactaaagttctattttaatttctttcagaaatatccaaactgctttccacagtgactgaactagtttgcatacccaccagcagtgtaaaagcattttcttttgtctgcaacctcaccagcatctcttgtttttggactttttaatattaataattgccattctgactggtgtgagatggtacctccttgtgattttgatttggatttctctgatgattagtgatgttgaacattttttcatatgtttgttggctgcttgtatgtcatcttttgagaagtgtctgttcatgtcctttcaccatttctaattttttttttgttttttgcttgttaatttgttttagttttttatagatttgggatattagctgtttgagccctttaagctatgtagagtacaggcaatagtcaataaagctttaacaaatttctaaaacacagagagcaaatggaggaataataaatcagtacagagaggataaacttgtaaccaaaaagtcagaagaggaaaatttatcaaggagaaaaattaatcagtgtcccttaagtcccctcaatattagtatttggaagtgccaagggtcaaatatggtagagaatgaggttgaaaaacgaggctctctctgcctaggtttcctacacaactcttttcatcaagtaactaattttctcccacaagaaaaaggaggcttactctctagagaaactgagtttaagaagccccatactcagggacaaagggcagtgccagaaaagacatgaggtgtaggctagaaaggcagatttggtaagggtccacaccttcaattcagagacttaaagctcttttattcatcttgcttcctaaaattcagcagctagcgttatcctacagaaagggaactgatctagagaaatgacatttttcttttgccatcttaacagaaaattatcttcaatgtctaacagagtgaatgaaatgaaaacatactctgctagacacagggtcatggaatttcaggacaccagaattaaagggaaaatcacaaaaactttcagagctataccaggtcatattgaaagaattaggattcagaattctcaagaggaactattaatattatttagcatattaatagaaatagtgtgttttcagacttgcacatttgccaaaattttaccttctattgtccctttctcagaaaaatattggagaatgtgcttaattcaaatgcctgaagcctagttatagaaagtcctgagctccagcaatcagacctcayataggacaatgagagtgtcagggaggctgccttgcaccaggcctagaaaacaactacttcagaatgaacctggtggataattcagaagtgagatgagacagcaagaacaagagatgtgacagattttatgagagtttccaataactaaaaaggagtttcaaacatctgcctgaacatttgtaagtatttctaacttgggaaacagaaaattacaaatagaaataaagagatgtggttaagtttaagaaagtgctaaaaataaaatataatcatagctgtcttaccagagaaccatatttatgtagtcagaatgatataagcaatgaatactgatatcataaaaattgtcatctaaatatattctggaaaaagcagtgtggaaaaattagtgtgtctatctgagggtgtgttcaaatatgaggtgaacatggagattaaaattttcatctcataataaaaaattattaaatataatctacaaaaagataagtaagaaatagaaacaaggtctttatttagaaacgtgaatgtattttcagaagaagctgctagaatgttcaaaatggtagatttggaaagtgtgagaatgaagagaataccattgcaaattgcagactctcacacacacaagcacagctgcacaaatacacagttatatatatgcgtaaatctgttagcataacttaatgtttaaacgtgttattttgatgtaaaattaattcctgtttttttccaagacagtaatttcatgactaaatttatgcttactttatgttttcaaacatttcatttttttaattatactttaagttttagggtacatgtgcacattgtgcaggttagttacatatgtacacatgtgccatgctggtgcacggcacccactaactcgtcatctagcattaggtatatctcccgatgctatccctcccccctccccccaccccacatcagtccccagagtgtgatattccccttcctgtgtcaatgtgatctcattgttcaattcccacctatgagtgagaatatgcagtgtttggttttctgttcttgtgatagtttactgagaatgatgatttccaatttcatccatgtccctacaaaggacatgaactcatcattttttatggctgcatagtattccatggtgtatatgtgccacattttcttaatccagtctatcattgttggacatttgggttggttccaagtctttgctattgtgaataatgccgcaataaacatacgtgtgcatgtgtctttatagcagcatgatttatagtcctttgggtatatacycagtaatgggatggctgggtcaaatggtatttccagttctagatccctgaggaatcgccacactgacttccacaatggttgaactagtttacagtcccaccaacagtgtaaaagtgttcctatttctccacatcctctccagcacctgttgtttcctgactttttaatgatcaccattctaactggtgtgagatggtatctcattgtggttttgatttgcatttctctgatggccagtgatgatgagcattttttcatgtgttttttgactgcataaatgtcttcttttgagaagtgtctgttcatgtcctttgcccactttttgatggggttgtttgtttttttcttgtaaatttgtttgagttcattgtagattctggatattagccctttgtcagatgagtaggttgtgaaaattttctcccattttgtaggttgcctgttcactctgatggtagtttcttttgctgtgcagaagctctttagtttaattagatcccatttgtcaattttgtcttttgttgccattgcttttggtgttttagacatgaagtccttgcccatgcctatgtcctgaatggtaatgcctaggttttcttctagggtttttatggttttaggtctaacctttaagtctttaatccatcttgaattgatttttgtataaggtgtaaggaagggatccagtttcagctttctacatatggctagccagctttcccagcaccatttattaaatagggaatcctttctccattgcttgtttttctcaggtttgtcaaagatcagatagttgtagatatgtggcgttatttctgagggctctgttctgttccattgatctatatctctgttttggtaccagtaccatgctgttttggttactgtagccttgtagtatagtttgaagtcaggtagtgtgatgcctccagctttgttcttttggcttaggaatgacttggtgatgcgggctcttttttggttccatatgaactttaaagtagttttttccaattctgtgaagaaagtcattggtagcttgatggggatggcattgaatctgtaaattaccttgggcagtatggccattttcacaatattgattcttccgacccatgagcatggaatgttcttccatttgtttgtatcctcttttatttccttgatcagtggtttgtagttctccttgaagaggtccttcacatcccttgtaagttggattcctaggtattttattctctttgaagcaattgtgaatggtagttcactcatgatttggcactctgtttgtctattgttggtgtataagaatgcttgtgatttttgtacattgattttgtatcctgagactttgctgaagttgtttatcagcttaaggagattttgggctgagatgatggggttttctagatatacaatcatgtcatctgtaaacagagacaatttgacttcctcttttcctaattgaatcccctttatttccttctcctgcctaattgccctggccagaacttccaacactatgttgaataggagtggcaagagaaggcatccctgtcttgtgccagttttcaaagggaatgcttccagtttttgcccattcagtatgatgttggctgtgggtttgtcatagatagctcttattattttgaaatacatcccatcaatacctaatttattgagagtttttagcatgaagggctgttgaattttgtcaaaggccttttctgcatgtagtattgagataatcatgtggtttttgtctttggttctgtttatatgctggattacatttattgatttgcgtatattgaaccagccttgcatcccagggatgaagcccactcgatcatggtggataagctttttgatgtgctgctggattcggtttgccagtattttattgaggatttttgcatgaatgttcatcaaggatattggtctaaaattctcttttttggttgtgtctctgcccggctttggtatcagaatgatgctggcctcataaaatgagttagggaggattccctctttttctattgattggaatagttttagaaggaatggtaccagttcctccttgtacctctggtagaattcggctgtgaatccgtctggtcctggactctttttggttggtaagctattgattattgccacaatttcagctcctgttattggtctattcagagattcaacttcttcctggtttagtcttgggagagtgtatgtgtcgaggaatgtatccatttcttctagattttctagtttatttgcatagaggtgtttgtagtattctctgatggtagtttgtatttctgtgggatcggtggtgatatcccctttatcgttttttattgygtctatttgattcttctctctctttttctttattagtcttgctagtggtctatcaattttgttgatcctttcaaaaaaaccagctcctggattcattaattttttgaagggtcttttgtgtgtctctttccttcagttctgctttgattttagttatttgttgccttctgctagcatttgaatgtgtttgctcttgcttttctagttcttttaattgtgatgttagggtgtctattttggatctttcctgccttctctkgtgggcatttagtgccataaatttccctctacacactgttttgaatgcatcccagagattctggtatgttgtgtctttgttctcgttggtttcaaagaacatctttatttctgccttcatttcgttatgtacccagtagtcattcaggagcaggttgttcagtttccatgtagttgagcggttttgagtgagtttcttaatcccgagttctagtttgattgcactgtggtctgagagacagtttgccataatttctgttcttttacatttgctgaggagagctttacttccaactatgtggtcaattttggaataggtgtggtgtggtgctgaaaaaatgtatattctgttgatttggggtggagagttctgtagatgcctattaggtccgcttggtgcagacctgagttcaattcctgggtatccttgttgactttctgtctcgttgatctgtctaatgttgacagtggggtgttaaagtctcccattattaatgtgtgggagtctaagtctctttgtaggtcactcaggatttgctttatgaatcttggtgctcctgtattgggtgcatatatatttagcatagttagctcttcttgttgaattgatccctttaccattatgtaatggccttctttgtctcttttgatctttgttggtttaaagtctgttttatcagagactaggattgcaacccctgcctttttttgttttccattggcttggtagatcttcctccatccttttattttgagcctatgtgtgtctctgcacgtgagatgggtttcctgaatacagcacactgatgggtcttgactctttatccaatttgcragtctgtgtcttttaattggagcatttagtccatttacatttaaagttaatattgttatgtgtgaatttgatcctgtcattatgatgttagctggttattttgctcgttagttgatgcagtttcttcctagactcgatggtctttacattttggcatgattttgcagcggctggtaccggttgttcctttccatgattagtgcttccttcaggagttcttgtaaggcaggcctggtggtgacaaaatctctcagcatttgcttgtctgtaaaggattttatttctccttcacttatgaagcttagtttggctggatatgaaattctgggttgaaaattcttttctttaagaatgttgaatattggcccccactctcttctggcttgtagagtttctgccgagagatctgctgttagtcagatgggcttccctttgagggtaacccgacctttctctctggctgcccttaacattttttccttcatttcaactttggtgaaactgacaattatgtgtcttggagttgctcttcttgaggagtatctttgtggcgttctctgtatttcctgaatctgaacgttggcctgccgtgctagattggggaagttctcctggataatatcctgcagagtgttttccaacttgtttccattctccccatcactttcaggtacaccaatccgaagtagatttggtcttttcacatagtcccatatttcttggaggctttgctcatttctttttattctttttactctaaacttcccttctcgctacatttcatcttccattgctgataccctttcttccagttgatcgcattggctcctgagacttctgcattcttcacgtagttctcgagccttggttttcagctccataagctcctttaagcacttctctgtattggttattctagttataccttcttctaaatttttttcaaagttttcaacttctttgcctttggtttgaatgtccttccatagctcagagtaatttgatcgtctgaagccttcttctctcagctcatcaaagtcattctccayccagctttgttccgttgctggtgaggaactaygttcctttggaggaggagaggcgctctgctttttagagtttccagtttttctgttctgttttttccccatctttgtggttttatctacttttggtctttgatgatggtgatgtrcagatgggtttttggtgtggatgtcctttctgtttgttagttttccttctaacagacaggaccctcagctgcaggtctgttggaataacctgccgtgtgaggtgtcagtgtgcccctgctggggattgcctcccagttaggctgctcaggggtcaggggtcagggacccacttgaggaggcagtctgcgcattctcagatctccagctgcatgctgggagaaccactgctctcttcaaagctgtcagacagggacatttaagtctgcagaggttactgctgtctttttgtttgtctgtgccctgcccccagaggtggagcctacagaggcaggcaggcctccttgagctgtggtgggctccacccagttccagcttcctggctgctttgtttacgtaatcaagcatgggcaatggcgggcgcccctcccccagccttgctgccaccttgcagtttgatctcagactgctgtgctagcaattagtgagactcygtgggcgtaggaccctccgagccaggtgcgggatataatctcgtggtgcaccgttttttaagcccatcggaaaagcgcagtattcgggtgggagtgacccgattttccaggtgccgtctgtcacccctttctttgactcagaaagggaactccctgaccccttgcacttcccaagtgaggcaatgcctcgccctgcttcggctcccgcagggtgcacgcacccactgacctgcgcccactgtctggcactccctagtgagatgaaccgggtacctcagatggaaatgcagaaatcacccatcttctgcgtcactcatgctgggagctgtagaccagagctgttcctattcagccatctttgctcctccccacatttcattatttttatttatattacttatatatactaacgtatatgtacatacagatttatcttttttccttttttattttttatatttatgggtacagagtaggtatatattaatatgtttgtggggtacaggagatgttttgatacaggcatgcaatgtgaaataagcatgtcatggagaatggggtatctgtgccctcaagcatttattgagttacaaacaattcaattacactctttcagttattttaaaatatacaattaagttattattgaccatagtcacactgttgtgctatcaaatagtaggtcttattcatccctacttcccttctcaccccccacttccctttcaagtatctggtagccatccttctacactttatgtccattagttaaattctttttattttagatcccacaaataagtgagaacatgctatgtttgtttttctgtacctggcttatttcacttaacataatgctctccaatttcattcatgttgttgcaaatgactgaatctcattctttttttatggctgaatagaactccattgtgtatatgtactacattttctttatacatttgtctgttgatggatatttaggttgtttcaaagtcttagccattgtaaacagtgctgcaacaaacacaagagtgcagatgtctctttgatatagttatttcctttcttttgggtatatacccagtagtagggttgttggtagttttatttttagttttttaaaaaacttacaatatatatttttagttttttgaggaacattcaaacagctctccatagtggtcatactaatttacattcccaccaacgttgtacaagggtccacttatctccacatcctcactagcatttgttattgcctgtcttttggatataagccattttaactggagtgaggtgacatctcattgtagttttgatttacatttctctgatgatcagtggtgttgaccacctttttgtatgtctgttaacaattaacatgtcttcttttgagaaatgtctattcaaatcttttgcccacttgtggacttgattattagatttttttctatagagttacttaagttccttatatattctggttattaatctcttgtcagatgagtagtttgcatatatttttctccattctgtaggttatctcttccctttgttgattgtatcttttgctgtgcagaaactttttaacttgatatgatcccatttgtccatgtttgctttgaatgcctgtgcttgtggggtattgctcaagaaatttttgcctagaccaatgtcctggagatgttttctagtattttcctatagtattttcacagtttgaggtctcatacttaagtttttaatccattttgagttgatttttgtatgtggcaagatatatgagtccagattcatccctctgtgtaggatattaaattttcccagcacaatctattgatgagatggtctttcccccagtgtacgttcttggtacctgtgttagtctgttcttatgcttctaataaagccatacacaagaccgggtaatttataaagggaagatgtttaatggactcacagttccacatggctggggatgcctcaaaatcatggtggaaggcaaatgaggagaaaagtcacatcttacatggtggcagacagagatctttgcaggggaagtcccatttataaaaccatcagatcttgtaagacttattcactaccatgacaacagtatgggggaaaccaccccatgtttcaattatccccacatggccttgtacttggggtgtggggattattacaattcaagatgagatttggggtggggacacagccaaaccatgtcagcacctttgtcaagaatgagttcactctaggtgtgtgaaattgtttctggattcactattctgttccattggtctatgtgtctgtttttatgtcagtaccatgctgtttttgttagtatagctgtgtagtataattttaagtgagataatgtgattcctccagttttgttttttttgcttatgatagttttgactattctgggtcttttgtgggtccatgtcaattttaaagattttttttctatttctgtgaagaatgtcatttgtaatttgatggggattttattgaatctgtggattgttttgatagtatggacattttaataatattgatttttccaatccatgaacatgaaatatttttccatttgttgtgatctcttaaaactctttcctcagtgctttatagttttcattacagagatctttcagttctttggttaaattaattcctaggtattttattttatatatggctattttaaatgggattacattttaaatttctttttctcattgttcactgttggcatatatcaacactactgatttttatgttgagtttgtatccttcaactttacagaatttgttcatcagttctaataattatcttgtggaatctttaggtttttcctagtataaggttatatcatctgcacacaaggatattttgacttattcctttctaatgtggatagcctttatatctttctcttgcctgattgctcttgctaggtcatctagtagtatgaagaataacaatggcaatagtggacatccttgtcatgttcatgatcttacagaaaatgctttcagttttccccactcagtatggtactagtagtaggtctgtcatatagctttttttatgttgaggtatgttccttctatctcaagtgtttttttttcttttttttwattatactttaagatttagggtacatgtgcacattgtgcaggttagttacatatgtatacatgtgccatgctggtgcgctgcacccaaatgtccaacgatgatagactggattaagaaaatgtggcacatatacaccatggaatactatgcagccataaaaaatgatgagttcatgtcctttgtaggaacatggatgaaattggaaatcatcattctcaagtgtttttaatgaatttttatcatgaagggatgttgaattttatcaaatactttttcagcatcaactgaaatgatcatatggtttttatccttcattctgttgatatgatgtatcacactgcttgatttccacatgttgaaccatccttgcatcccagaggtaaatcccacttggtcattgtgaatgatctgtctattgtattgttgaatgtggtttcctagtattttgttgaggattgttgcatcagtattcatcaggtgtattggcctgtagttttctttttttgatgtgtcttagtctgattttggtatcagggtaatactggcttcatagaatgagtttggaagtattctcttctcctttattttttggaatagtttgagtagggttggtattagttctttgttaaatgtttggtaaaattcagcagtgaagccatcaagtcttggggttttccttattgggataatttttattacaggtttgatcttggtactggtcattgcatgttcaggttttggatttcttcctggttcaatctcaataggtcatatatgtctaaggatttgtccatttcttctagattttccaatttattggcatatagttgctcatagtaaccactaattattctttgaatttctgcagtatcagttgtattgcttccttttttatttttgtttttatttatttgaaacttcttttttttcttagtctggctaaaaacttgtcaattttgtttaatttctcaaagaaacaactttttgttgcattgacattttgttttgttttcttcatttaaatttcatttatttctgctctgatctttattatttcttttgttctactaattttggttttctttcttttttcttttttttttttgtgcagttgcaagatttaataggctgaaacagagctcccatacaaagggaggggacccaaagggggttgccattgctggctcaaatgcctgggtttatatcccaatcattgtccctcccactgtgctttcaggcagcagatgattggctatttctttacctcctgttttgcctaattagcattttagtgagctctccttactatctgattggtcatgtgtgagctaagttgcaagccccgtgtttaaaggtggaagtggtcaccttcccaggtaggcttagggattcttagtcagctaggaaatccagctagtcctgtctctaagtcccccatctcaacatgaaaacccaagtgctgttggggaggttggccgacgactgctctagctgcttcctgctgaattggggtgtagtaggggtggtgcagttgagatttcctcgggagaggtgccttcaatgtcattaacattggagcatgagctagcaggctggtccaagggtctgcagtagatcttagccatggactgcatctggggctccatttgaagaatgatttgtagttttacagcttcaattctggaagagacacacttaacaaggaggttaaagatacagggattgaaatgtatggcctgcagtgcctttgacacacttcacaggccctgactatctgcttgatagttttgaaaaggcctggtccagtaaataataatttggccatctgatgggtgctatcaatacctaagtgaaaggtttggtgaagggttttaagtaattcccattggttagctgcaggcaaatgtaattttccttttttggtggctagccatcccgaggggagaaaactatgtcttcatgaggttacccattctatttctcctgctgagtattggggcttggtttcccggaggggattaccccatactaggggtccttctataagcatttctaatggagggttctgccttgcagctcttttggcctcaatatctgcttggcggttcccttctattttcctttcctttcctttctgatgaccccagcagtgtaagactgccacctctttaggtttctgtacagccaataataatctcctaacggcttcctgaggtttgatagatgttccctcggaagttaggaatttcctttccctccatattgcttcatggacatggaagactaggtaagcatacttagatctgtatatatatatttaccctttttccttttcctaattctagtgcccgagtgagggctattagttctgccagctgagcactagttcctggtgtgaggagattactttcaagtattccattatcactgaccactgtgtacctcgctttttgaagtcctttttctacaacggaacttccatcagtgtacaagttgaagtcaggatcagtcaagggaacctctaaaagttcccctcgagtggtgtaggtttgagcaattacttgttgacagttatgttctatcttttctttattatttggaagaaatgtggctcagttaagagttgcacaagcacgcagttgcagcactggctcttcaagtaatagagcctgatatttaagtaagtggttgtctgacagccacaagtctcctttagcagtgagtatgccattcacatcatggatgtccacacagtaagatctcttccttgtattcttttaacttcttcagatactaagcctgctactgctgccactacctgtaaaccatgaggccaaccctttgccactacatcagtttccttactcaggtatgccacgggttgcaagctcatcccttggacctgtgtaaggactcctagagctattcctgttttttttctgtgatatataaagaaaagtcttgccctgttggcaagcttaacactgagtcttgggttagagacttctttagggcctggaaagccacttctgtttcaggtgtccatcttactaaatggatattgactttctgagtttccttaattagtgtatataatggtctgtctatttcaccatacctgggaatccacattcagcagaaacctgttatgccaaggaaccctcttagttgctttatggttttgggatgaggataagccagaataagctggatacgttcctcactgagggccctggtgcctttggataattttagccctaagcatttaacctgctgtgagcagagctgagcctttggtttggaaatcttgtagccacaggtagtgaggaaatttaagagcgcttgggtggcttgatggcacaaggtttctgaacaggcagctaaaagtaaatcatccacgtactgaaggacaagagtgtccaggtatgagaattgactcaagtcttgggctaatgcctggccaaatagatgggggctatccttgaacccttggggtaaaacagtccaggtgagttgagatgttgggtttcaaagatcttcaaaggcaaacaagaattgagagtcaggatgtacagggatgcagaaaaagtcatccttaaggtccaggactgtaaaccactctgcttcctctggtatttgggaaagcagagtataagggctgggtacagctgggtatagagggacaacagcctcactgataatcctagatatttcactaacctccactgtccattgggtttctgtactcctaaaattggagtattgcaggggctattgcatggttttactaggccttgggcttttaggtccttaacaatcttttggagtccttgttgggccttgggtctgagggggtgctgcctttggtagggaaaggaggtggagtcctttagtttaacttgaacaggacaggcattctttgctcatccatattgtccttctgttgcctagactttaggattaattccttcctcaagcaggggacaaccaatgggtgttccttctcctatgttcaggtgtataatggcccctggttttgctagaatgtctctccctaacaggggagtggggctttcaggcataattagaaaagcatgtgaaaagagtaaagttcctcagtcacagcttagtgactgggagaagtatctagtgactggctgtcctaggaccccttggatagtgacagatctggaggacagttgtccgagacaggagagtaagactgagaaggttgcaccagtgtccaggagacagttaacctcctggccctcaatggtcaagcatacccggggttctgtgagggtgatggcatgggctggggcttgcccyaggcaccctcagtcctgctgctggatcatctggttagtggcttctgactcagaggaccttcatcccctggggcagtggcccttccagtggattcccttgacataaggggcatggacgagggggcagcttacttctacttggacaatcttttttaaagtgtccttgtagactgcactggaagcaagccctattagacatatamttttcccaacttttcccttttccagagcctccaatgtccacttgcctggtatgcttcctcaatgcctcccttagtctctccagaaaggcagtaggattttcttcctttccctgtgttatagtggacatcattgaataattcatagtcttcctagttttccttagtccttctagcacgtaagttagcaaatgtctgtggcaccaatctccatgttctgattctgtgtcccagtgagggtctacactgggaactgcctgctggcctgtggggaatcattctctttcctctgatgtcatcctatcattgacctgactgagataccagagattgccaaactcttgggctgcagatatggtggcaattctctcatttggggttagtgtctgatttagcagtaacattgcatctctccatgtcagatcaaaggattgccctaacccttataaaacatcaatatagccatcagggttatctgatctaaaatacctaggtctattttaatttgctttaagtctgagagagaaaaaggtacatgcactctggctgggccgaattctcctcctccctctgcttggagggggcataatcagggaatattggcactctttggttcattatttacccctttatctatctctttttggacggtttgtgttgaagggggatccttgttagctggggaaggagtcagggggacactgggatagggaggtagactgagggcttcctgtagggcataaatcacactttttacataattgcgagttgtctcttaatgaaaagaaagttgtacatatggcacttcactccatttgcctttttcctacaaaagaggtctagctgtaagatggtgttataatttatacttccctcaggaggccaggtttctcccccttgaagaggatatcatggccaggcggtactgcagaaaaatataagtcatttctttctttgaccctttcttagagggtcaaattggtcctaattctccagaatacatcttaggggtgtttttgccttgggggaaatgtttcccatctgaaaaaagaacatagggaagccaacacccctagtcattttctgatgagcataagtcctagagcatcctctatggtcctaatgcttattcctttccagggtgcataaccacccatggacctctgcttatcggattacttacactcaccgatgtagcagtcctgcatctgtttttccatctctcttgaccacaaagaaaggggccctggctgctggattctagtggtcctttaccagcttgcccaacattgcctttgcactcagaggtgagttcctttccaggctgtataaccacccatggacctctgctaatcggattacttatgcttaccgatgtagcagtcctgcaactgtttttcctgcctttcttgaccacaaagaaaggggtccgggctgctgggttctagtggtcctttaccagcatgcctaacattgcctttgtactcaggggtgagtcctagagctgggctgggttcctgagtatttcataacaacccagctgccccatcaacatgcattcgcataaacaacagttcttatgcaaatttgtttcagagagggtgtattgaatcttttgagtcaggattgagatagtcttttgattctgtaagtactttaagtcttggctgagtgcaaagagttcgcacttttgaggagaccaattattaggcaatttttctaaatctgcttccacaagagtctctgtatcaattactgaatrtccattgaggttttttcctcagtcacctgggaggaaccatctatcatcctgtcctgaagggagttcctcctatgtctggtcggactgttgtatggtaattaagatttaaatccctgttagggaatctgctgggttaagggaattatcagaggttggagttacrttacctttttctaacmttatagccccatacgttaagatttttgagttagtgagctacctttttgcttttttttatttttttttgactaagaataactctgaactggtgaggtgtgctcacaatgaggtttcctctaaaagttacttttctacttttagttaagtagttgtttctaccgactgaatgcatttggcccatccgcgggttactgggttaaggatttaatacgcctttatttacactgacaacaaagtggcaattaccaattacaggttttaaatttaccctggcttttaaaggaatggggcacactttttttttttttaactatttctatctttttctttctttttctctttgactccctctttgtctctctctctgtctctctctctcttagccattacaaacttggggccctggcaagtgtggtggggaatgggtcccacgtaactgcccatgtcgagagctgtatacctaaatcaggagggataccagggataagactccctgggttatagcctaggtgcctaaggatgcagcgtagagactccttagatccctttagagatacaacttgctagaggaaatgaaagtctgaaacattagtacctaggaggcagggatcagaggaagtagattcagaggtaaggagaattttggggctacactttaaagaaagtcgtggtcaggacccaggaggtatgggtcagaaggaaaggtaggggcgcacgcatgtgtgacaggtgagtagagacttctggctgcgccatgatctcaaccggctactgccaggagttcgggacaacagctttctgcctctagtcagccctcagcttccccaagaaaattggaagtggaagctggctccaggcagaccaacattcccaatagaagggttggttgttagaaagcccttccccagataaccttacacctgagtcttcagtctggtggccacgctaatcatttttaactggcygacaggtgcctggtattttcctccagttctaaggaaggataggacagaacagctagtgaaagtggtccaatattaccgctttggatgtccctttgttgtcaccaaaatgttaccaagggggtccttgctcacagagctcccaagatggtggtgatccacttccaagatggtggtgggccacttccaagatggtggcaagcttcgtgttctctgacctggggttcttggcctcacgaattccaaggaatggaatcttgggccatgcagtgagtgttatagctctactaaaagctgtgggtcatggaagagaaccgtggaacccggcaactagtgttcaggttgattaggacaaacccaggcacttagccatgcaggaacaatggcaagattttagccctatcgggaatggcaatgggaccctcactggatcaggagcacagcagacaccctgccagatctggagggatggaagtctgcagcgggtttgcgatggtggcaaacagcagtggtggacggcgagtgaaagctcagctccagccataacagacacagaccagaagagtgcagttgcaagatttaatagagtgaaaacagagctcccatacaaagggaggggacccaaagggggttgccctttggttttcatttgctcttgcttatctaattctttaggattcatcattagattgtttatttgaaaattttctccatttttgatgtaagctcttagagctataaactttcctcttagtactggttttgcagtagcccctaggttttggtatgttatgtttccattatcatttgtttcaagaaatttctgaatttcctttttaatctcttcatggacccactggccattcatgagcatattgtttaatttccatttacttgtgtagtttccaaaattccttgtgttattgatggctagttttattacttggtggtcagagaagatgcttgatattatttcagtttctttgagtgttttaagacttgttctgtgacctaatatctggtcaattcttgataacaatccatgtgctgtggaaaagaatgtgtatctgtagcagttggatgaaatattctgcaaatatctattagacccatttggtctatagtgcagatgaagttcaatatctccttgttgattttctatctggatgacctgtccaatgctgaagtgggttgttgaagtctccagctattattgtattggggcctatctctctctagttctaattatgtttcttttacatatctgggtgctccatttttggttgcatatatacttaaaattgttccatcctcttgccaagctgactgctttatcatcaattgtcatattctttgtctcttcttacagttttcgtcttgaaatctattttgtctgctttaaatataataactcttcctcttttttttatttcctttggaatgtactgtctcattccattcctttactttcagtctatgtgtgtttttttaagtgaagtttttttttttttttttttaggcaacagattaataggtcttgtttcttcatctagtcagtttgtcttttgattggaaattttagtccatttacattcagtgttattattaagtaaggacttacttctgcctttttgttatttgtttactggttgttttgtgggcttctcttccttctttcatttcttcctgccttcctttattgataataattttctctgcatatatgtgtacagatttttcttaawgcctagcttaaggcacagttacacatttgtgcatctgtagcagtcctctctttaagttacacatacttccagcactataatttaaatttattatgatgtttggataccttcatcatgattcatgtacccctgaattgctagaacaaatgttccatttctctccttttccatcagttcttacttgtgtcttgtcagctaaagtccaggaagagattgaacgtgtygttggcagaaaccggagcccctgcatgcaggacaggggccacatgccctacacagatgctgtggtgcacgaggtccagagatacatcgacctcatccccaccagcctgccccatgcagtgacctgtgacgttaaattcagaaactacctcattcccaaggtaagtttgtttctcctacactgcaactccatgttcttttattcctcaaattcacagtatgattcttaccctctaccatcactgggtgagagaagtgcattactcctatgtatggcagtttaattggactttctgttgattccagtttgggactataaagatttgtaacaggtcttagtgtctcacagtgtgtgtttttcagatttattctttcttcaagattgttctggctactcttaagtggttatatttccagacaaattttgaaggtgttaatttttcaatttcccaaaacattgggctagaatttctgtcagggtgacattaaatttataggtcagtttggaaagaactgacatcttgacaccttgagtctttctgtttgtgaatataattatgcttccaatttatttgcactttctttattttcccaggaatgttgtgattttgttgtcatggcttgcaagtctttggtttttcctagataattaatatttttgttgttgttataaacttacaaaatgccttttgatttctttgtacttggtatgttgaaacataattagtttttatcattctgatgaccttaatctatcaactttgctaaatttactaatcactattcataatttrtctctagattcattggaatttctgtgaacagtacactgtatctgtgttaatattgttttatttcttactttccaattcttgtgggcttaatttctctttattgcattcattattgcattggctagaatttctaggagagtgttgaatagaattgctgatagtgggcatccttgtttctcatttctaatctgcaggaagcagtggaagttttacatttcaatattgaaaatgatgctagaagtagattttggtagaaattctttatcagattagggaagtttgccctcacatatatatagaaataaatataaatagaaataagtatgcacatagagatgaatttatattcttcatattgtttagggcttctgtgtttacattcacaaggatttagtttgtaattttctttctcagaattttcaagatttttgatatcaagattaggccagccttataaaactaagtgagaaatgtttcctaatgtgagtctgtttttactgcctccccgtctccacttttcttcttgtgatcacttagttgtatctttgaaatgcctaataacttttggttaaataccagatgttatgtgtaagaaagtgcagaatttcagaggatgtttatattcttcaaagaaagattcattcctctcccatcggcagtcataatgacataacacatgttgtcatgattcagaattgtacataatgtgaacccagtcgaaaattgactgtcagtgttagcttagctctctgaggttctcctacctctggaatcttgagaccaatttttgtcttggcagctttacaattgccttctatcacatggtttctgtattcatccagacactctagttgccatstcaaacctgctcttttccaatttaaaccaagacatattattagtaaaattaaaaataatataacctaaagttatattttcaaggggaaaaatcaatgagattggtaaggttgaaattactaatgtcactttttgaagaagacagaattgttaatttaccaagagattatggggcttaccctgaggtcactgatttagtacaagagttaagacttcaatgcactctgttttcacaaacacaggagataaccaggagaaggctttcgcttctcaaaattagggtctgagggtaatagtaatgaaacttatttcttctcctataactaattaatgagaaatatactgaagaatcaggatgagtcgccagtctcccaatccactgcatcagctttggtgacctgttgaaggggaatgctgcatctgatgagcttcttcattcacccacctgcagggcagctcatgctatgcctggtgtcttttgagccctgagaacccagagcgcaaggaaatcacccactgaatcccttcttcatggaacagcctatagaaaagtgcagcactgcgtggccaattctaccctctttacaaatcaggcaaatgtgttcttctgctacaggctggatccacttatctaggtggagataatagtctgagagaggagttggcaaactgttcctgtaatgggccagatagtaaatattttagactttttaggccatgatgtttctgttgcaatccttgacatctgctattgtagcatgaaagcagtcatagacaatgtacaaatgaatatcttccaatttttatagaaacaaatgtaaatttcccataaatttttgtttcaaaaatattatttatttgcatttgttcaatgtaaatacttttagctcacatactatacaaaaacaggtggcaggatggacttgtgcagagagtattgtttattgatgcccaatataagactttcctgtccagtagaattttctgcaaagatgctcgattgatttgtgtcctatttaaagaatatttgtcagcacaagattccaaagactgasttttaactttcccataatttttttgttttagctcttatatttacatcaatgacatgtttcaaattaatttttatttgtagtatggagtaataatggtcgtgcttcaatgtctataaatttctatttattcaagtaacatttgttgaaataaatctgctttggtatcttaaaaacattttaatatagtacttatttataaatattcaagggaatattttttaaaacaaaattgtagactatttatatgaaaacttagtgggtagaatttttcatcacctttgtattataaaatttttaagaataaataacattacacacatatatctatatgtacatatggcagtgtgtatatatatctactttgatatctgtctatccatctatctagacctcaatactgcagtatatgtagcccaataacaatggttttctcctatataataataatagcattcatagtatggagttattgatacaataatattatttactgtacagcttatatttaaaatttcccaattcttaaggaacattttaattacttttttctttcaattcactctccagtcaagaaacaggcacataattcgggtatgttgtcatttttatctcctgtaatcaagaacagttcatttcctctgtttcctttcagtatgttgatctctgtgaagagttgaggcctttagtcatttaaattttcttcgggcttgttttgtataattgttttctagatattatattccagttatgactttggcaagaaaactacatagtactttgactattccactgaatcacagtggtgaggcagaggcacataatgttacatatgctattactggttatgctaagatcctgacctaataagttggaatctgccagatctctccattgaaggagttctgcttttatgtgtaaatgatgaaaatctatggcatgacactttaagacagaacaccctgtttccaaagtcacacatccaatagttttatctttcattgatgatccttgcctggcctgatgatcttgacctgaatggttacaaaagatgatttttttctaatttcattattccttctgtattttttaaactattagaatctatttatttatttatttattttattatttttatactttaagttttagggtacatgtgcacaatgtgcaggttagttacatatgtatacatgtgccatgctggtgtgctgcacccattaactcgtcatttagcattaggtatatctcctaatgctatctttctgtatttttaagctatgattaatctgtaatgaatatctctcccgtatctttaaatgataacaaacaaactacatggcaatgacaaacattcaatagttttatacttgtgactatacttgttaccattctagaagacgtcgtttgaagctcaatcatatgtttattcacaaatgccctgtgaatagacactctggccatttcccatgtcaacagagacttcaactttattttatttatttatttatttatttttattattatactgtaagttttagggtacatgtgcacaacgtgcaggttagttacaaatgtatacatgtgccatgtcggtgtgctgcacccattaacttgtcatttagcattaggtatatctcctaatgctaaccctcctccctccctccaccccaaaacagtccctggtgtgtgatgttccccttcctgtgtccatgtgttctcattgttcaattcccacctatgagtgagaatatgcggtgtttggttttttgtccttgtgatagtttgctgagaatgatggtttccagcttcatccatgtccctacaaaggacatgaactcatcattttttatggctgtrtagtattccatggtgtatatgtgccatattttcttaatccagtctatcattgttggatatttgggttgattccaagtcgttgctattgtgagtagtgctgcaataaatatacgtgtgcatgtgtctttatagtagcatgatttataatcctttgggtatatacccagtaatgggatggctgggtcaagcggtatttctagttctagacccctgaggaatcaccacactgacttccacaatggttgaactagtttacagtcccaccaacagtgtaaaactgttcctatttctccacatcctctcctgcacctgttgtttcctgactttttaatgatcgccattctaactggtgtgagatggtatctcattgtggttgtgatttgcatttttgtgatggccagtgatgatgagcattttttcaagtgcttttggctgcataaatgtcttcttttcagaagtgtctgttcatatccttcacccactttttgatgcggttgtttgtttttttcttgtaaatttgttggagttcattgtagattctggatattagcccttcgtcagatgagtagattgcaaaaattttctcccattctgtaggttgcctattcactctgatggtggtttcttttgctgtgcagaagctctttagttttattagatcccatttgtcaattttggcttttgttgccattgcttttggtgttttagacatgaagtccttgcccatgcctatgtcctgagtggtattgcctaggttttcttctaggatttttatggttttaggtctaacatttaagtctttgatccatcttgaattaatttttgtataaggtgtaaagaagggatccagtttcagatttctacatacggctagtcagttttcccagcaccatttattaaatagggaatcctttccccatttcttgtttttgtcaagtttgtcaaagatcagatcattgtagatgtgtggtattatttctgttggctctgttctgttccattggtctacatctctgttttggtaccagtaccatgctgttttggttactgtagccttgtagtatagtttgaagtcaggtagtgtgatgcctccagctttgttcttttggcttaggattgacttggcaatgcaggctcttttttggttccatatgaactttaaagtagtttttccaattctgtgaagaaagtcattggtagcttgatggggatggcattgaatctataaattaccttgggcagtatggccattttcacaatattgattcttcctacctatgagcatggaatgttcttccatttgtttgtatcctcttttatttcattgagcagtggtttgtagttctccttaaagagatccttcacgtcccttgtaagttggattcctaggtattttattctctttgaagcaattgtgaatggaagttcactcatgatttggctctctgtttgtctgttattggtgtataagaatgcttgtgatttttgtccattgattttgtatcctgagactttgctgaagttgtttatcagcttaaggagattttgggctgagacgatggggttgtctagatgtacaatcatgtcatctgcaaacagggacaattagacttcatcttttcctaattgaatgccctttattcccttctcctgcctgatagccctgtccagaacttccaacactatgttgaataggagtggtgagagagaacatccctgtcttgtgcctttaagtcatagtctacacataagatttgtgaaaactgaagtgatgaaatagagcagcaggagtggacaggcactaaagcccaagcttgatgaaaaggacagattcagaaggttgcacccaagtacgcaagtactcagtacttcaaatgtgrttgtgggcattttatttatttatttatttattwttttcatcagcagattttattaagaagaagaaacaggaaattcaaaagcaagttcattttaaattagctggtcagaagagtacaaagagaaaaaaaaagaaaagaatcaagaaatcctataggactttgggattttttttaaattttattatcattatactttaagttttagggtacatgtgcacaatgtgcaggtttgttacatatgtatacatgtgccatattggtgtgctgcacccattaactcatcatttagcattaggtatatctcctaatgctatccctcccccctccccccaccccacaacagtccccgaagtgtgatgttccccttcctgtgtccatgtgttctcattgttcaattcctgattgtgggcattttagcaagattattgtcactggccttaagctcatgcctcttattacttcgtctatctgtctggaaatggtactgctcttctttggaatggygtttcatcatctgtacatcaaaagatttaactgcatgattaccactgtttcttaaaccttcgtgacttctttacagctcagttcacctatgtctcttgtttctagggcacaaccatattaacttccctcacttctgtgctacatgacaacaaagaatttcccaacccagagatgtttgaccctcgtcactttctggatgaaggtggaaattttaagaaaagtaactacttcatgcctttctcagcaggtaatataaatttatttccctttgtgtttcagggtacaagataacttttttgatcagttggaacttacatgtgccttctctgcagtggtacagttactctttgtacatgatcaagagcactgttctgaatgcctgtgttttctccgctggtgatacatcctcattattcggccagattagtgggttttggagaattaatccaattcttccaaattgagaaagctgaagtataggttggttgaattctgcctctagatacaccactgaggtactcaagaactcctcctggaagataaaactaattacattttcctcactagccatgaggaagttatctcactccagaacttcactgagtgtcttccacatggtgtccctcaccccctaggctgggcttgtaggataaaattatcctcaaacacagaatagggtcttaagaggctcacttctgtgtttggaaagcagagtaaacagatcattgtagttcaataggactgaggctgtgatatagaaaagaacaggctgttgtgggttgggaggtagatggaaaagctgtctgcttcttgttatcttataacccaaaatgagacataagtaactaatagcagtaaagacatttaagctacatcaaaggagtcagagaggatgaaaagaagagaaggcagggctattaaaggagataatgagccacaggagcaggayattggctctaaataaaggatattaaaacctttgccaaataaccatggatgggatcagggggacattaagaatgtagcaggatactctgcagtgatgcagagcaccatgctctttccctagtcatggcaatgttttttggatgtttgatctccacacgtgaaatgtgtgtgctgagcatctggtgatagaatctccttcctttttctgtgacctttgatgtctgctttatatgtggcactgtagataccaagataacaaggaaagaaaccttccttcaagcattcacatttagcacatgtatcagtccattctttcattgctataaagaaccacctgagactgggtaatttatgaagaaaagaggttatttgactcacagttccacaggctgtacaggaagaatggctgggaggactcaggaaacttgcagtcatggtagaaggcaaagaggaagcaagcatatattttcatggaagagcaggagagagagagcaaagaggaaaggctacacacttttaaacaaccagatctcatgagaactcactcactatcatgagaacagcaagtgagaaatcatcccctatgatgcaatcaccttctaccaggtatctcccccaacactgggaattagaatttgacatgagatttgggtaaggacacagagacaaagcataccagcacacaaataaataaataaataaataaataaataaataaataaataaataagaaataagaaattatgattctaggtgacacatgctgtctgtttcttctgccatatcaaaatacccaagactaggcaactgataaataacagaaatttatttctcacagttctgaaggctgtgaattccaagattgaggtgtcagcaagttcactgtctggtgagggcctgttccttattgataataccccctctgtatcctcatgtggcagaagcacaaaaaaagcaaaaggggagaaatggctcccttgcatctcttggtgttattattttagcaaggacagagccctcctgacttattcactgcctacaaggcctcatcactttagtaatgttgcactgggtattatgtttcaacatatgaaatggggggaggaayattcagaccatagcacatttttcaatggaagcatgaacatgatgttgaggaatcccagggaaacgaacattttcttgctcagtgagatgagaaagagagtaaaaaaggagataaaatttgacctatgtcctgactgtggtaatagaaaagttcatcttgttcaaaaggagaagcatgatataaaacttgaaacctagtgtgttggrgactgatgatgagtggctatgcctagagttgagagtaggggaggtgaagagtgtaaaatgtgatacggatcatcagactggaaacagaatgtgagggtccaggtcaagctatttggatcttatcccataggacagacagggaagccatttaaagttttaaagtgagggggtaacatgtttagacatgtgattctgaaaatacttarcgggaaaaaaatctttggctgcatactgagccagaaatacaaagggaaatgccgaatgtgagcctcctcccctaagcccttctcagttcaacccactggacaggtaatgtatgtttctcaagaaagattttaatgaattgcttggcatgtagctgacagtcaataaacatttgttgaatacatggtgcttgataagatctgaagataggtgaagagtaagcatgtccattcattgtttagttgcctatccatccattcatccattaatccttccacccatccatcctttcattcatgcattcacccaaccacccatctatctactcatccctcctatgattcaccgaacagttcttgcatattctgtctgtgccagttatagagacagtgtttgtcactctcacagttacacatgaggagtaacttctccctrtgtttgttattttcaggaaaayggatttgtgtgggagagggcctggcccgcatggagctgtttttattcctgaccttcattttacagaactttaacctgaaatctctgattgacccaaaggaccttgacacaactcctgttgtcaatggatttgcttctgtcccgcccttctatcagctgtgcttcattcctgtctgaagaagcacagatggtctggctgctcctgtgctgtccctgcagctctctttcctctggtccaaatttcactatctgtgatgcttcttctgacccgtcatctcacattttcccttcccccaagatctagtgaacattcagcctccattaaaaaagtttcactgtgcaaatatatctgctattccccatactctataatagttacattgagtgccacataatgctgatacttgtctaatgttgagttattaacatattattattaaatagagaaagatgatttgtgtattataattcaaaggcatttcttctctgcatgttctaaacaaaaagcattattatttgctgagtcaggttattagaccttccttcctttgtgcataatgcaggtgacaaattaaagaaaatagagttccaggaggccatgctggttctcaaaacgataaggacagaaaggacaaaggtgaagatggtagggaagctattttggctgagcattaccaaaatttagagttacatgaggattggatttgaaagtgagaaactgtgtccaggagcagctccaacctctagggaaatattcagaggatcaggtattgggaggaatggatattaaatgttccacattggtgttcctttttttttttttttttgagacaatgtctcactctgtctcccaggctggagtgcagtggtgcaatctcggctcactgtaaccttcgcctcccaggctcaagagattctcctgcctcagcctcctgagtagctgggattacagacacgtgccaccatgcctggctaatttttttgtatttttagtacagacagggtttcaccatgttagccaggatgatctcaatctgctgacctcctgatctgcctgcctcagcctcccaaagtgctgggattacaggagtgagacactgtgcctggtctaatgttactttaaagtgtcattactttatctctaaataaagaatcaggttacttttattacttcatgtttccaacttagaatgaagtaatgaagtataaatatatgctttcatattgctgctcatgtgttttgtcatgcttctctcttcaaacatgaacaaaatttcttttcttttttcttttttttttgaaatggagtcccacttttgttccccaggctggagtgcaatggtgcgatctcggctcactgcaatctcctcctggattcaagtggttctcctgcctcagccccccaagtagctgggattacaggtgcctaccaccacaccaggctaatttttgtatttttagtagagacagggtttcactatgtgggccaggctagtcttgaactcctgacctcaagtgatccacccacctcagcctcccaaactgctgggcttacaggcgtgagccactgcacctggctgaacaaaatttctaagaagaattaccagggtttaatctttttcagcttctcctatattgttttagttttaacattagtgggatgataattttatgctattgtcctaatataattagcctcatgtcatctccaaagcatagacaactaagtatcttatgttaaattatgttcaccactcttcctgtcttctacttgaaatgtaagaaataagaagtaacataattgattatgcttttcacagctcatctcctagaacaagctacttacaatttggaatacatttaaagataatatatgggtacagatgtacatgtacatctatgcatgtgtgtgtacattatgtgcattcacacataatatatatatgtataacttatgcacacatacatatagggttaaatgtttatttacaatattgggctcatatcacacatcttgtattaaaacttgctattttcctaccaagtaatatgccagcaaaacctctaaggtgatagaaacataggcaaataattcagagagttaatagaagagaaagtggaaatgggtattacattaatggaaagatacagatggaaattacacattatacattttaaacattcttcattgggaaatgaaaatgtattaatgtagtgttagtagaggtgttgacaaacacccatgggtgagataaataaaaaagttgtctagtctgtttcctcctggagactgtagtggataatctgttttcctgcctatttcagctcctaaaggctgcctgcattccttggctcatgaactcctttttctttcactccaaacacttgcttcttttgttacatctcctactcctactactcttattctctctcccttatgtaaagacccttgtgattacatgaaacccaccagtgtaatctcttcatgtccagacattatttagcctaccatactattattatacccatttgaacaaccaaacaattgcactgatgatctgttaagcatcttgttcaaggtcacacagctttttaagtgtcagagccaacaattggacaagggcaatctgactggaaagtagaagttgctaacaactttgctaattctctgcatttatttttattgtttgtatttcttccctaaaatacatatttcatatgagaagagaactttatttggctcactaatgaataccagccacctgaaacactgtttagaagatactggctcaataaatatttaatgaatgaatgactacttaatgaattaatgaatgaatgtgggcataaaggagcacgtgaatttatttattctcttttaaggccaatgtgacaatattcatagaaatgtatatgaacacctcagtccttcaaacagtttcacttcttgagtattcatggatatcattgagtgtatatattacttactatatataaatgcttattttatgattgttcataatagacttgaaacaaaaattttactggagggtgtgaataaattatggtggatctttttttttattatactttaaattctagagtacatttgtacaacgtgcaggtttgttacttaggtatacatgtgccatgtaggtttgctgcacccattaacttgtcatttacattaggtatttctcctagtgatatccctcccccatcccccaccccatgacaggccccagggtgtgatgttcctcaccctgtgtccaagtgttctcattgttcaattcccacctataagtgagaacatgcaatgtttgcttttctgtccttgtaatagtttgctcagaatgatggtttccagcttcatccatgtccctgcaaagaacatgcactcatccttttttatggctgtacagtattccatggtgtatatgtgccacattttcttaatccagtctatcattgttggacatttgggttggttccaagtctttgctattgtgaatagtgccacaataaacatacgtgtgcatgtgtctttatagtagcatgatttataatcctttgggtatatacccagtaatggatcactgggtcaaacggtatttctagttctagatccttgaggaatcaccacactgtcttccacaatggtggaactagtttacactcccaccaacagtgtaaaagcatacctatttcttgacatcctctccagcatctgttgtttcctgactttttaatgatcgccattctaactggtgtgagatggtatcccattgtggttttgacttgcatttctctgatgaccagtgatgatgagcattttttcatgtgtcttttggctgcataaatgtcttcttttgagaagtgtctgttcatatcctttgcccaatttttggtgaggttgtttgtttttttcttgtaaatttgtttaagttatttgtagatttttgatattagccctttgtcagatgggtagattgcaaaaattttctcccattctataggttgcctgttcactctcatggtagtttcttttgctgtgcagaagttctttagtttaattagatcccgttattcaattttggctttgttgccattgcttttggtgttttagtcatgcaatttttgcccatgcctatgtcctgaatggtattgcctaggttttcttttgggtttttatagttttaggtctaacatttaagtctttaatccatcttgaattaatttttgtataagctgtaaggaagggatccagtttcagctttctccttatggctaggagttttcctagcaccatctgaatgttggcctgccttgctaggttgtggaagttctcctggataatatcctgaagagtgttttccaagttggttccattctccccgtccctttcaggtacaccaatcaaacatatatttggtcttttcacatagttccatattttttggaggctttgttcatttctttttgctctttttttcctctaaacctctcttctcactttatttcattcatttgatcttcaatcactgataccctttcttccacttgatcgaatcagctattgaagcttgtacatgcatcaggtagttcttgtgccatggttttcagctccatcaggtcatttgaggtcttctctatactgtttattctagttatccattcatctaatcttttttcaatgtctttagcttccttgccatgggttcaagcatccttgtttagcttggagaagtttgttattaccaaccttctgaagtctacttctgtcagctcatcaaagtcattctccatccagctttgttccattgttggcgaggagctgcaattctttggagaagaagaggcgctctggtttttacaattttcagcttttctgctctggtttctcttatctttgtggttttatctacctttggtctttgatttttgtgacctacagatggggttttggtgtggatgtcctttttgctgatgttgatgctattcctttctgtttgttagttttcctcctaacagtcaagtccctaagctgcaggtctgttggagtttactggaggtccacttcagaccctgtttgcctgggtatcaccagcggaggctgcagaacagcaaatattgctgcctgatccttcctctggaagcttcatcccgaggggcacccacctttatgaggtgtcagtcggcccctactgggaagtgtctcccagttaggctacatagggatcagggacccacttgaggcagcagtctgttcattctcagacctcaaacactgttctttgagaaccactgctctcttcagagctgtcagacagagacgtttaagtctgcagaagtttctgctgccttttattcagctatgccctgccctgagaggtggagactacagagacagcaggccatgctgagctgcagtgggctccacccagttcaagctttcccagctgctttgtttacctactcacgccttagcaatggcagacacccctcccccagcaaggctgctgcctcacaggtcgatctcagactgctgagctagcagtgatcaaggctttgtgggtgtgggtcctgctgagccaggcataggatataacctcctggcatgccgcttgctaagaccataggaaaagtgcagtatttgggagggagtgtcctgtatttccaggtacaatgtcatggcttcccttggctaggaaagggaaatcccccaacctcttgtgcttcccaggtgaggcaatgacctgccctgctttggctcaccctccatgggctgcatccactgtccaacaagtcccaatgagatgaaccaggtagttcagttggaaatgcagaaatcacccatcttctggatcgatcatgctgggagctgcagaccatagctgttccattttggccatcttggaatggaatccccccaatttttttctattgtggatctaaaaaatggaaaagtaagctgtagtttcaaatgattttcatcatcatataataataaattatttattgtatggcagacactataatcatatgaaaacattaattaatttagttcctataacaatacaatgagtttagtacaattgtaattcatctccatttaacagataaagtcatggaggaacagagatgtttattaatgtgtccaatatcataaggccaataagtgacacagctggagtaaacagaaagtctaattccaaagtctgttctcctaaactctacagtgtgctgggtttatttctggggagtctcatctgtacagttcttctaggctctggctgttagagacttggtctctcttcctccacctaaaactatcctgatatctatattctcctttctattattcttcaatgctattccagatctgggtaggaaagccttagcttcacagtcccccaataataatgaaatgggtgtgttccctta

SEQ ID NO: 93616 - DNA, 17363 bp, Homo sapiens
  misc_feature (1)...(17363): n = A,T,C or G
gtctcagcctttgacgccaagtgcttccatagtctccaagtgttcagattgtgcctttctcatctaaacatgcagagaaacaagcagccactgcaggaacaaccattcactacaactgctttcagccacctccaaaactgtgaggcagccctcgccagtgacctgccggccatcacacacactcaggtcatgcactgtctcacagtgcaacgtaatccctggtacccccaaagccaaagagatccagtgacacagtgccaaagacagccaagctttagacccgagaggaagctacccacgactcctcaggccccataaggaagacaaaagcggggcgcgtggcacctttctttgcgttccccaaggggtctctaagtcatcagaagtcccttgtagatcccttcattaggtaccaaagatggcaaagaggatggaggagcacggaggggtagaagtaaatgggactgcaatccttagaggagccaatttggaaaaatgttaaggttctaaaaggccaatacaattttacatttttctcatcaaaattataccaacaaaggaaccaaacagaaggaccaaacacacaatttaaaggggtttcagtcacctgaaaaaaaaattcccagaaacagggtccaaaagcagaaaaggctgtagatacatggcttgaagatcagctcacctgtttttaattaagccaacttctgaccacagagctcttttttaaaatcctttcaaatatcttattatcagattttagctgagaccaacagctgatagccatggctttgagacctttttttttaaaaccaaaggtacctcccaagtgactcaccaaaaccaataagccttaactaaagctatggacttaaccaaggacacataagccatctccaaagaggcgcaaagcagtcctgatgacatccagagccaccccaaagagctcaaagaaaggaaatcaaaagctgccagtggagggggaaagggtcaacaacaaatgagttccgcacaaagtcaaaagttggctgggtgcgtggctcacgctggtaatcccagcactttgggaggccgaggcagccggatcacaaggtcaggagttcgagaccagcctggccaacacggtgaaaccccatgtctactaaaaatacaaaaaaaaaaaagaaaaaaaaagaaaattagctgggcgtggtggctcacacctgtaatcccagcactctgggaggccaaggcgggaggatcacgaggtcaggagttcgagaccagcctggccaacatggtgaaaccccatctctactaaaaatacacacacacaaaaaaatcagccgggcgtggtggctcacacctgtaatcccagctactccagaggctgaggcaggagaattgcttaaacccaggaggcagagggtgcagtgagccaagatcatgccactgcactccagcctgggcgacagagcaagactccgtctccaaaaaaaaaacaaaagaaagaattcaaaagtcacacaaatatcaaaccaaaagggactggttcctctattgggaattgaacccaggccatggtagtgaaagtacagaattttaagtagtttccaagatgcagcagtcttcattgtgaatcctgcagggatccaaagcaatggtttgcgcgcacaaaggattttaacttgttacaggtcagatttttgctctttaattttgtgaagaggatttctaaggctagccacaacattattatgtgtctttcctttaatctccccacaaatacaaataaggcaattgtttagaatgagagacctctaaaatctttttttttttttaatttagggatctttctaatgtaaaggattcatcttttggctattgacaatcagaatttccaatgatgtatttattccaatagcaactcaatccaagaagccccttcatggaaagcccaaaagattattttccaggtttagagagggcatagaagaggaggttccaatgatgcccccaaaattcactcccaggaataggcaaagacagcaaaagactcttgttcccagagacagttaaggaacgtgtttgtacatacagtgcctccagtaacacacaatctgtcaggggctgccagtcacagacccattaacctgtaacacagggtaggcctgttgggattgggctttctgaggactgaccaggcaacaarcattgggatgacaaaagccccttatggatgggcctgaggagagcaaaaaccacctggcgaccatcaaacatcaaacaggccctccgaggcaaaactccttatctggggaaaatcagaagtaactaaacctccctattatctaaagcaggcatctggttccagatttcttcccccaaaaaacgtgtaagtaactataatttctatgtgtctccagaataccatgacgaaactcactgtacaaccgtcgctgacattaaggcaccaaaattactataaatgtaatcatttatcatgacttacgtggctaatatggtccaaattactgttaagcctccactttaaggcctataaatgcccttaaggagaaatccacccggcgtactcagtcctcttgctgaggcacctcattgcactcttctgcagcattctaataaactttctttcttttctttttttttcttttttttttttttgagatggagtttcactcttgttgcccaggctggagtgcaatggtatgatctcagctcaccacaacctccatctcccaggttcaagcgattctcctgcctcagcctcccaagtagctgggaatacaggctcccgacaccatgcccagctaattttttgtatttttagtagagatggggtttcatcatgttggccaggctggtcttgaactcctgccctcaggtgatccacctgcctcagcatcccaaagtgctgggattacaggcgtgagccaccgtgcccggcaaactttcttttttctttttttttttgagacagtcttgctctgtctcagctcactgcaacctccgcctcccaggttcaagcaattctcctgcctcagccttccaagtagctgggattacagccacgcaccaccacacctggctaagttttatactttcagtagagacagggtttctccatgttggccaggctggtctcaaactcctgacctcaggtgatccacccaccttggacttccaaagtgctgagagtacaagcatgagccactatgcccggccaaactttcctttttcaaacctattgtcggtaaactctttttaccaacccgcaagttgaccaccactcccagtgccggggctctgacagctcgcctggcagggacttcttaagacaaactaaaagcttgacacattcagaacaaaaacggtgctgcttaaaatattaaatgtcttgggttcccaaccattttcagactgaccacaaaatgtgacctgcgagtcactacctcggattggcagaggccaagagagtgctcctgaggtaggaggtgggacttagttgacccagttgaggattggctaaaacagggttggggcaatagcagctttcagtcagatatgcccgccactgtgccatgtcagtttaccattgccatggcaacacccaggagttgccacccctttccatggcaatgacccaatgatgactactccttccctagaaacttctgcataaaccatcctttaatctacatgcaatcaaaagtgcgtataaatgtgactgcaaaactgccctgagctgctactctcagcctacggggtggccctgctctgcaggagcagtcacagagctctaacgccacctgttcaataaagctgttttcttctacctctggcttgtctttgaattctttcctgggcaaagccaaaaccctcactggctaagctccactctggggtctgcctggcctgcatcattcccactcgctcacaactcaagctttcaaggacatcaaaagagaggagaatctcatccagttttcagttcagggacccacagcaaagtctgtctaactagacgcatccgatcagagctgcaaaactgactagcctgcaggacggccccaagacggggtttacaggggttttaggcctgtgttctaccctctttatgacagaaaaacacagaaagacaagaatgaaagacgactatttctggggaaaaaaagcaatcaaacaatatgaatacaaaactaatcacataaatacatttctctcattaaaactttgaagaggaaaacaaggtaaacagacatttttaccgtcggcttgacaagattccagagaggccgggagcctggctgctaagaccttcttacccttctttctgccagcttgtcggctcctgggttcccctgacggaggctcccaggagagtgactttagttatcctaccgactgcaccaaaactgtaggagcctagagaaaaacttttctgcattctgagttcacagaaaatcaactgacaaaagccaggttagtaagaaaaaaggcatacagatttattcatgcacacagggagaaccagagtgatgaccccaacctcccaatggggttcggaagcttatayaccatcttgaggttacagaaagaacatgggctcaaagtatggccacagtttatggtggaaaatcaggtgaccagtggcaagaccggttacaggagggagagcagaggaggcctggctagcaaaggtggccttgttctacagatgaaacctcacaggtagcagccctgagagagaacagatggtgaatgttcccttcaggcctttaaaggcgtcagactgttactcttcccagatcaggcaaggagggcctcagaggaggcctggccgcatcagtgtagattctctccacagatgcaaatctcccccacaaaagacagcttttcagctattcttctatttccagtccttctgagtaactgtcttgaaccgtgtcaaggaaatatatttggaggtgacatattgtgttttccttcaagatcaaaaaggttaagtccaaggctgcccaacgagggagcgaggacccaatcacgttgtcctcagatgagtttttccccagcagcgtaaccctgcaacaggccagactggaccccagacacacattccacaccacaccacgcctccaccaccacacgcacacaacagacacaccctaaacaccagacacacacacacacctcaaccaccgcaaacacacatacgccacacctctaacaccacacacacccaacaccacacacatacgtgcctcaaacactacacacacctcaaccaccatacacctcaaccacacacacccctcaaacaccaaacacacccctcaaccacacacacacacccctcaaacaccacacacccacctcaaacaccacacacacatatccctcaaacactacaaaaacacacacacacacctcaaacaccacacatgcacacacacctgaaacaccacacacctgcctcaaacactccacacacaccacacacagacacgtacacagccccccgcacccagccacagcttacacgcacacagacacgcgtacgcaggagaaagggtgtcaaagcttttgctagtcgtgaaggaagagcccgcagtccatggggctgcacggttttccctgccatttgctcattcaccgggtgcccataacgctycgcgctcaggtctcttacaggagggcccgagtctcccagtaccggaggtctgggggcgcacgagccgctcctcctctggagaagctccggaccgagaggacaccggacactgcgcagcgccgagccccgcgcgcagcccgggacgcctcagccagggccgaccgcgcagaggaagctcccagagcccgtttcaagaccgcagccaacagcctcaggcgcacacggcggcctcggagcgagcacgcgcagcaacgcccctcgccccggcccgcccccggccccgcccccggccccgcccccggccccgccccgcaagggtcacaggtcacggggcggggccgaggcggaagcgcccgcagcccggtaccggctcctcctgggctccctctagcgccttccccccggcccgactscgctggtcagcgccaagtgacttacgcccccgaccctgagcccggaccgctaggcgaggaggatcagatctccgctcgagaatctgaaggtgccctggtcctggaggagttccgtcccagcccgcggtctcccggtactgtcgggccccggccctctggagcttcaggaggcggccgtcagggtcggggagtatttgggtccggggtctcagggaagggcggcgcctgggtctgcggtatcggaaagagcctgctggagccaagtagccctccctctcttgggacagacccctcggtcccatgtccatgggggcaccgcggtccctcctcctggccctggctgctggcctggccgttgcccgtccgcccaacatcgtgctgatctttgccgacgacctcrgctatggggacctgggctgctatgggcaccccagctctaccactcccaacctggaccagctggcggcgggagggctgcggttcacagacttctacgtgcctgtgtctcygtgcacaccctctaggtaaagagggggccgcgcctcttccccgccccgaccctccatccctttcctcccaatggattgcaggggggcgggaaaaacgtctgtctctctctctagggaaggccacatttctgtctgtctcagggactctgtgacttgtcccgcagggccgccctcctgaccggccggctcccggttcggatgggcatgtaccctggcgtcctggtgsccarctyccggggggdcctgcccctggaggaggtgaccgtggccgaagtcctggctgcccgaggctacctcacargaatggccrgcaagtggcaccttggggtggggcctgagggggccttccygyycccccatcagggcttccatcgatttctaggcatccygtactcccackaccasgtaggaaccacccgggccctcagccaccctcccacctcccaaagtcccccagcccttgatgctcccgcagccccacctgccagcccagccctcacggcagctgcccgcctcaggrccsctgccagaacctgacctgcttcccgccggccactcsttgcracggtggctrtgaccagggcctggtccccakcccactgttggccaacctgtccgtggaggcgcasmccccctgdctgccyggactagaggcccgctrcatggctttcrcccatgacctcatggccgacgyccagcgccaggatcgccccttcttcctgtactatgyctctcacgtaagtgatcttggcccaaccccctggctgccygtgacccctacccagtgctaactccagtctttgcccccagyacacccactacmctcagttcagtgggcagagctttgcagagcgttcaggcyrcrggccatttggggactmcctgatggagctgsatgcagctgtggggaccctgatgacagccataggggacctggggctgcttgaagagacgctggtcatcttcactgcakacaatgggtatgccagcagggcagctgggtgctccggccctgtcacgggccagggccctggaggccttgcagttcagctgcttgccaagaacatagtgggtgagggggtgycaggagatgctggccaygttgcaggggcccaaggtgtagtcaggagacacagtgcacagagagctggtcttggtaggcctgggaggtgccgggctcrtgctgggcacctccgggcaagctttgtgasttagaggtgtggggccactggtcaccctcggtggctcagaggctgtggctccatggctcatgagcgcctcctgtgtcccagacctgagmccatgyrtatgtcccgaggcggctgctccggtctctygcggtktggaaagggaacgacctacgaggdcrgtgtccragagcctgccttggccttctgrccaggtcatatcgctcccggtcagtccrcaggccctctccttggaaccctggccccrccaccccaaccttgatggcgaactgagtgactgaccagcctcctgcccccaggcgtgayccacgagctggccagctccctggacctgctgcctaccctggcagccctggctggggccccactgcccantgtcaccttggatggctttgacctcagccccctgctgctgggcacaggcaasgtagggccggtgacccctgatcccagatccttggcccctgtcctggccttcccctggggtgagtgtgggcagtgcctgagagtctgtgcctcagtgcctcctgcactgagtggcatccaagtggcgccacctctcaggttcctgggtgggcaagaagcggtgcacgtccagggcctcccaccagggctggcagcyccaggtatgtgcagtgcttggggcctgycccgccccgtgacccctgactctgcccccagagccctyrgcagtctctcttcttctacccgtcctacccagacraggtcygtggggtttttgctgtgcggastggaaagtacaaggctyacttcttcacccagggtaacccctccccgtggatscctccccccgacctgctgacccctccccggagccctagatccctggcccctcctctcgcccttgccctgtgcacagaattggccccctccccaggctctgcccacagtgataycaytgcagaccctgcctgccacgcctccagctctctgactgctcatgagmcccygctgcyctatgacctgtccaaggaccctggtgagaactacaacctgctggggggtgtggccggggccaccccagaggtgctgcaagccctgaaacagcttcagctgctcaaggyccagttagacgcagctgtgaccttcggccccagccaggtggcccggggcgaggaccccgccctgyagatctgctgtcatcctggctgcaccccccgcccagcttgctgccattgcccagatccccatgcctgagggcccctcggctggcctgggcatgtgatggctcctcactgggagcctgtgggggaggctcaggtgtctggagggggtttgtgcctgataacgtaataacaccagtggagacttgcagatgtgacaattcgtccaatcctggggtaatgctgtgtgctggtgccggtcccctgtggtacgaatgaggaaactgaggtgcagagaggttcaggacttgtacaagatcacccagccagaaagaggttgggctgggatttgaaccctggtgtcgtggctctggaagctgccctggcgccttggtgatctgcgtgggtcagtgcacacaggcacacgtcagcctcaaggacatgggcacatctgttcacaggagcagcgccacgtgcctttgagtgccaggaacggggtgggagggtgggagggtgtgagggccagaagactcagaagatgcaaagtgcctgagagagacgggatattcccccagaagaagcattcttagagacacaggcactggacctccttggttcttataagaaacctgtctgaagctgggtgatgagttgcacactccaggtggggctaaggggcctggagcccctgctggctcctaggaaggcacagcagcaggccctgagacggctcctctggggcccctccaccctcccaggcctctgcatttcacctgtgcccacacttctgtctcctgccttcaccttttgacccactactaacgattctccacccagcagacaaagtgatctcttaaaaatatctgttggctgggcacggtggctcacgcctgtaatcccagcactttaggaagccgaggcgggtggatcacctgaggtcgggagttcgagaccagcctgaccaacatggagaaaccccatctctactaaaaatacaaaattagccaggtgtagtggtgcatccctgtaatcccagctacttgggagtctgaggctggagaatcacttgaacctgggaggcggtggttgcagtgagccgagatcgcaccattgcactccagcctgggcaacaagagaaaaactctgtctcaaaaaacaaaaaatctgttaggctgcacacggcgattcactcctgtattcccagtgctttgggaggctgaggtgagaggatgcctgaggccaggaattcagaccagcctgggcaacatagtgagaccccagctctaaagatttgtttttgttttttttttttttttttttttttttttttttttttttttgagacggagtctcgctctgtcgcccaggctagagtgcagtggtaccatytccgctcactgcaacctccgcctcccgggttccagggattctcctgcctcagcctccctagtagctggaactacaggkgkgkgctgccatgcccagctaatttttttttatttaatagagacaagatttcaccatgttggccaggctggtctcaaactcctgacctcaggtgatccacccgcctcagcctcccaaagtgctgggattacaggkgtgaaccaccacamctggccaacaatatttgttttaattagccaggcgtggtagcatttgtcctagcaatttgggaggttgaggtgggagaatcacttcagcccactaggtcgaggctgtagtgagctataattgtaccactgcactccagcctcggggacagagtgagaccctgtctgcaaataaacaaataaaacatcaggctgggcttgagcatctattcctgctcaaaatttcgcaggcttctcagaagaaaatccaaaccccttacagtgacccagtttgcccttgaggcctccacccacacccccttccccccagtcttagggggtggcctggctgttcccttcaacggcaacgctctgcctccattgttggcctcctctgcagggagggactgtctgagcacctgcccgtgtctgtgcagcatggcacactgacgtcaggcccacgtgcatgcccaggtggccagtcacacgccaggtgctccctcagtgttggccaagtgagaggagcacaccttccgggcgttcagacacctccccgtggcagacaccgttcgttgctaccaaacagccacctccttcctaatgggctcccatttttcagtgctgggcaaaggtcccttgatcttggagttgcagcctctttctctccaaggagggcggtgaccagcctgagccagtcaatccagtgattggttcaggagtagcctgtgaccaggagtcctggtagtgaacgactggggcagccctgggggtgaggaccttgcgcagccgtcacaggccctgattggacactgggcagctgctaacccagtgtctccagctgcctacctggagagctccaagcgtaagaaaataaaccctgcctgttgaagccactgctagtgagggttctgttatttgcagccaaaagccttgctggaatgtggcctatgaatggttgtgtggcgggcacatgtgcctgcgtgagcctgtggtgtcagacagtgtgctgaggactctccacgcaaccgtttcatcccttttcatctggtttgagggctgcattgaccacaccccaaatcctgctgtgtttggaatcacccccataaggtggtggtttccttggggtgcccagcagcccctgatgctggcataaggggggcccttgtgcacttgtggtccgagtggaggtgctggccccaggtggcgctgtagaaagtgaagcagaggttcctcttcagactttcctccccatctaggagtaaatagtaacttctcttaaaagcaaaatttattcaaagacctgtactaacattcttaaataactgctagccgaataaagaactcaatgtcctttatgttcttagctcccacaatttagcctaaatatctgccctggcatgcttaaactggcccaagcaagcattacgtcacagcctgttcctcttccttatttgaaggtgtttttacctttctcatcattccacaagttacttcctccttcctttgttctcctctctcttttcctcttttaaaaagtgctaagttgctagccaatcgggacaaatacagaacgtgaggtcccgttccagccgatggaaaccggacacggcagtaaggtggacgcatcaggttacaaatgaccctgtccccttttgttcggtgtactctcacggcaaaactgctggcgagtgtaccctttctgcagaaagtataaaagaaaattaaatttatgttcaagtgctgtttctttacggcaccgaggaacaagcatttcaaacagcgctgtggttcaagatgagggcagagaggaactgaactggaggcatgattccagtatcacacgaaagaccaaaccctctagcaagaactaaatgaatactaacacccaaccacagtcttcaggcacctcctccagctctgctgctccacttcctctcacttgggtagtgtgcataactgagttaatcccacccgtgtttatgcatcagcaccgtgcagtgctgggcatggggttgtcagaggagacccactctgcactcaccgggcttacagtctagcaaaggagatgagcttaatcccgggatgtcagatgcacctgaaattttcagtgtgattgaagtcactgcctctggtagggtggggtgtgtggagttgcctgaccagggacaccagagaacctgtgggtgctacaaatcttccaaatcttaaggggtcataacatgatgcatgcatatgtataaagcgatcaacccacactcgcaagctgtgcacactttatgacgtcattgcgtattttctatttcagtaacaatctaaccataataaacgctacaaacgaagggtacctggtcttacaagaacataaccaagaggtgggggtggaaagataaatgagctctgaggagggtgttcaaatgcactctgcacccaaggatttttccactcccccattccgcttttggttttgctctgatttgtttgtgttcagaaatgcttttcaccagttagctgtttgagccggatgcaccctcctcacacaggcatgtacacgtatgcgtatgtgcacatgtgtatgcatacagaaatacgcacgcatgcacactcacattcacgtgcacggaggcacatacacatgcatccggggatacgtgccccccggggacgtgcgcacgtgaacacacaaggactcacccgtgcacacaagcatgcatatacgtgcatatttgcagtgacatacacactgttactgttgatttacaaaacagcccctttcctgtgagcctaagataatctattcaccaggctggcagccatccattcccacagagcagcttcctcagggagctcagtgtcctctcgaaggggctaagagtgttttgaaatggacagaacaaacaaacaagttgattctgtggtttcccctcaggtgcgttaggaaggaagaggggatatccggagcccaagtgattgcgtgaacgacagggtaagagggggctcctgcagggaaactcccctcccctccctgtggcccctccttggctgtgtgctcgtctgtcccccaagtgaccagaagggggagcccagggaacgtttcaatggaacaatgtttaaattcacctctgaattttttttttttttttttgagacggagtttcgctcttgttgcccaggctgcagtgcaatggcgcgatctcagctcaccgcaacctccgcctcccaggttcaagtgattctcctgcctcagcctcccgagcagctgggatgacaggcatgtgccgccacacccggctaattttgtattttttagtggagacggggtttctccatgttggtcaggctgatctcaaactcccgacctcaggtgatccgcctgcctcggcctcccaaagtgctgcgattacaggcgtgagccactgtgcctggcacctctgaatatttttaattacgaaagtaatgcatattcattagagaaactcaagtaatgcccgctcatctcagtcccaggtagccaatgctatcagtttagggtttggggggcgggcacacaccacattgttctccacattcatgcaaattatgtattttggccccaggcgttgattcaactctaacctcaccccctgctgcaccctggacactgcctctcagctgtctgatgtgtcccctcccttttgcagccctgagcctggtgcagggggtcagtagtaatgaaggggggagtgcatttatttatgccccctccagcctccttggctcctttgtgtgaaggccgagagccttccttgtggatgcagcaacatggtgaaacccagtctctactggaatacaaaaaattggccaagtgtggtggtgtgcgcctgtaatgccaggtactcaggaggctaagacaggagagtcacttgaaccctggaggcggaggttgcagtgagccacgattgtgccactgcactccagcctgggcgacagagcaagactctgtctcaaaaaaaaagaaagaaaagaaaaaaagaaaaacaaagaaagaaactgtggcagccttattgctgtttaaggagaaagtttaagtggtctgcatagaagatcaaacaagccaaaacatttccttaacccaaagtctaatccagagcaaggccctaattccctctgattctatgaaagctgggagagatgcggaagctgcaggagaaaagctggaaggtagcagaggttggttcatatggtttaaggaaagaagctgtctccatgatgtaaaagtgcaaggtggggcagcaagtgctgatggagaagctgcagcaagctctccagaagatccagctaaggtaagtgatgagggtggctacagtaaacaatagatcttcagtgtacgcaattttttttttttttttggagacggagttttgctcttgttgcccaggctggagtgcagtggcgcaatctcggctcactgcaacctccgcctcccgggttcaagtgattctcctgtctcagcctcctgagtagctaggattacaggcatgcgccaccaggcctggctaattttgtattttttgtagagatggggtttcaccatgttggccaggcaggacttgaactcctgacctcaggtgatctgcctgcctcggcctctcaaagtgctgggattacaggtgtgagccaccgcactcggcaccatctgtgactttcatagctagagagaagtcaatgcctggttttaaagcttcaaaggacagtctgactctcttgttaggggctaatgcagctggtggctttaagttgaatgctcatttaccattctgaaaatcccagggcccttaagaaagatgctaggctgggcatggtggctcacgcctataatcccagcacttggggaggccgaggcgggtggatcacgagggcaggagatggagaccatcctggctaacacggtgaaaccccatctctactaaaattacaaaaaatcagctgggcgcggtggcgggcacctgtagtcccagctactcgggaggctgaggcaggagaatggcgtgaacctgggaggcggagcttgcagtgagccgagatcgcgccactgcaccccagtctgggcaaccgagtgagactctgtctcaaaaaaaaaaaaaaaaagaatactcatgattcacaggaagaggtcaaaatatcatcatcattaacagggcttgaaagaagttgattccaactctcatggatgactttgaggtgacaagtccagtggaggaagtaactgcaaatgtgttgaaagtatcataatagcaagagaattagagttaaacgtgggcctgaagatgtgactgaattgctgccatctcacgataaaacttgaacagatgaagaattgattcttatggacaaagaaagttttttttaaattttcttgtttatttatttatttatttatttaggtagagatgggggtctcaccatgttgcacaggctggtcttgaactcctgggctcaagtgattctcctgccttggcctcccaaattgctgggattacaggcatgagccaccgtgcctggctgaaagtggtttcttgagatagaatctactcttggtgaagatgctacggacattgttgaaatgacaacaagggattagaatattgcacaggaccgagtgtagtagctcaggcctgtaatcccaacactttgggaggctgaagtgggaggatcgcttgagaccaggaatttgagacctgcctggacaacatagtgagacctcatctctccaaaaaaacgttggctaggcaccgtggcacttgctttaggtcctggctacccgggaggctaaggtgggaggatcacttgaacccaggatatcgaggctgcagtgagccattattgtaccactgcactccagcctaagtgacagaacaagaccctgtctcttaaaaaaaaaaaaaaagaatattacataaacttagttgataaagcagcagcagtgtttgagagggttgacttcaattttgaaagaagttctactatgaataaaatgctatcaaacagtgtcacatgctatagagaaatatttcatgaaagagtcagtgtggcaaacttcattgtcttaataaattgccacagctgctccaaccttcagcaacgaccaccccgatcagtcaacagccatcaacactgacgcagtaccttctaccggcaaaaagattatgactcactgaaggtggagatgatcactggcatttttttagcaataaggtgttttctttttttttcaaaacagagtctcgctctgatgcccaggctggagtgcagtggcatgatcttggctcactgcagcctccgcctcccgggttcaagcgattctcctgccttagcctccagagtaggtgggactacaggtgcgtgccaccacgcctggctaatttttttttttttaagacggagtcttgctctgtcacccagactggagtgcagtggcgtgatctcggctccccaagtagctgggactacaggtgcccgccaccaggcccggctcattttttgtatttttagtagagacggggtttgaccgtgttagccaggatggtctcgatctcctgacctcatgatccgcctgcctcagcctcccaaagtgctgggattacaggtgtgagccactgagcctggccacgcctggctaattttttatatttttagtacagatggagcttcatcatgttggccaggatggtctcaatctcctgacctcatgatccgcctgcctcagcctcccaaagtgctgggattacaggtgtgagccactgagcctggccacgcctggctaattttttatatttttagtacagatggagcttcatcatgttggccaggatg

SEQ ID NO: 93617 - DNA, 86899 bp, Homo sapiens
  misc_feature (1)...(86899): n = A,T,C or G
ttttgtgttcctataaatattcttgacctttgttctgggatgaggttcaattacttggaaacagtttgattctgataggtcttgcatttcagctttgttaggtggaaccctagtaatttttagtctagggctagttttgctctgccactgaggcaaacgtcttctgagcattacgtccaaagccttgtgaattacaaggttttccactgcaactggcaggaataggctctgcgtgagctttgaggattgttccctctcatcttttttttttttttttttaaatggagtctcgctctgtcacctaggctggagtgcagtggtgcaatcccagctcactgcagcctccgggttcaagcagttctccttcctcagcctccccagtagctgggattacaggtgcccgccaccatgcccagctaatttttgtatttttagtagagatggagtttcaccgtgttggccaggctggtctcgaactcctgacctcaggtgatccaccggcctcggcctcccaaagtgctgggattacaggtgtgagccaccgcacccggcccctctcatctttttgagtgatgctttccctggcttgaataccttccttacacacatgcactgatcagtgcttggctggagactggagtgggaggtgtcctgtgtggatcttcagcatttgctgtgagctctgccctctggtgttctgcctgtgaactcgagctaccttggactgcctgaactcctagttttgatttttcaagtcagagactgccagccagcctccactgcttcttcttccttgggctgtggcctggcttttccagcagaagctggacaactacagggctccctcctgtcttttgtttccttttttcagggacccttcactgcctggcgtccagtgtctagtgtcttgaaaaccattgcttccctatgttttcttttttttttttagttgttgcagatgggaagtaaatctggtctgttccgtcttggccagaaacaaaagcataaaaaatggaggctttttaatgaaagcttaagttagtgtagaaatactcacgggcacctagaagaatgctgacccactttctggttgagatgtgggagcggaggatgcctggacaggggagcagaggatgcctggacaggggagcgggggacgcctggataggagggcagaggtggctttctcccgggtaggcatcaaagcacttggagtatgtagcgaagatgatgggagtagggcttggaagaagtttccctagaaaaatcaagggctacagaatgagatgctgagggaatgataagaaagcgattgaagtctgccctcctgagacagaatcttaggtggagggcacaggcaaaagaaggcttatatcctgcagtgggagagtgtaggaggctgtgatgttgccgggggagcagtgggcagaggatgaggggtggatgcttaggatgtacctgttaaggagtgggcctggagctgcccgtctctcctatgctgtcacagttgccattcaaggcacatagttaagtagaaaatgaaaaagggagggaaggacctttgcttccagtattattagatgctgttaccagactgtcccattacagtccaattagatgctggataaattacaataaatataattgctttattttttgttttgtgttgttttttgagacagtgtagggtccagccctacagggcctgtgggtttttctctttgtgtgcggagacgagagatcgtagaaataaagacataaagcaaagagatagaagaaaagacagttgggcctgggggaccactactaccaagacacggagacccgtagtggccccgaatgcctggctgcgctgttatttattggatacaggcaagggggcagggtaaggagtgtgagtggcctccaatgatagataaggtcatgcgagtcacgtgtccactggacagggggccggcccttccctgtttggtagccgaggcggacagagagagaagagcttacgtcattatttcttctatgcatttcaaagacgttagtactttcactaattctgctactgctatctagaaggcggagccaggtgtacagggcgaaacatgaaaatggaccaggagcgtgaccgctgaagcacagcatcacagagacgtttacgcctccagatggctgcgggcgggcctgactgatgtcaggccttccacaggaggtggtggagcagagtcttctgtcgctcgcccaggaaagggagacagactccctttcccagtctgctaagtaacgggtgccttctcaggcactggcgctaccactagaccaaggagtcctctagtggccctgtctgggcgtgacagaaggctcacactcttgtcttctggtcacttctcaccatgtcccttcagctcctatctctgtatggcctggtttttcctaggttataattgtagaacaaagattattataatattggaataaagagtaatgctacaaactaatgattaataatattcacatatatctataatctatttctagtataactattcttactttatatattttatttattatactggaacagctcgtgccctcagtctcttgccttggcacctgggtagcttgccgcccacaatacaaggtctcactttgtcacccaggctggagtgcagtggtgtgatcatagctcaccacaaccatgcacacttaggccgaagggatcctcccacttcaatcctgagtagctgggactgcaggcgtgcaccaccacacctggctaatgctggtgctgtttagggacacacacattcttcctccagctcacactgagtagaatttgttaagaagatgcatgctacaaaatcattgactcaagattagaataaacaggcccaagatcaaaaacatttcttggccgggtgcagtggctcacgcctgtaatcccagcactttgggagnnnnnnnnnnnnnnnnnnnnnnnnnnnnnnnnnnnnnnnnnnnnnnnnnnnnnnnnnnnnnnnnnnnnnnnnnnnnnnnnnnnnnnnnnnnnnnnnnnnnnnnnnnnnnnnnnnnnnnnnnnnnnnnnnnnnnnnnnnnnnnnnnnnnnnnnnnnnnnnnnnnnnnnnnnnnnnnnnnnnnnnnnnnnnnnnnnnnnnnnnnnnnnnnnnnnnnnnnnnnnnnnnnnnnnnnnnnnnnnncctgggcaacaagagtgaaattccatctaaaaaaaaaaaaagaaaacacatttctttattttgaaaactgtataaagttttagaaaagtgggctgaaaagcctattttgagttatttagcttaattttaatcatgaagtgttaggtataaaaagtattacctgttttagaaggtggtaacactgacttatccctgggctactggcaccactttgagtatcttttttgtttgatttttattttttatttttttagagatggggtctcactctgttacccaagctgcagtacagtagtgtgattgtggctcactgcagccttttattttattttattttttgagacagagtctcactctgttgcccaggctggagtggctctctgcaacctctgcctccagggttcaagcaattctcttgcctcagcctcctgagtatctgggattagaggcgtacgcccggctaattttttgtgtttttagtagaggcagggtttcaccatgttggccaggctggtcttgaactcctgacctcaagtgatcacccacctcggcctcccaaagtgctgggattacaggtgtgagccaccgcgcctgacctttcactgcagcctcgaactcctgtgctcaagcagtcctcccactcagcctcccaagtatctgggaccacaggtgtgtgccaccacacccagctaagtaattttttttttttttttttttttaagtagaggcaaggtctcgctgtgttgctcaggctggtcttaaactccagcacttaagtgatcctcctgccttggcttcccaaagtgctgggattacagatgtgagccaccacatcccacctttttgatttgtatataaaatgtaaaaatatgcaaaagtagagaaaacataattaacatctatgtacccatcacctaacttcgacagtgatcgacactttttttttattttgaaagatctgattttattttctgaatcaaaagtaagtgtattcatgttaaatttagaatgttttagctttccattgatctttcaagatgctttccaaatactaacagtgcacagaactatgtgccacgtcttgtttgtttgtttttgagatggagtcttgcactgtcaccagggctggagtgcaatggcgcgatctcggctcactgcaacctctgcctcccaggttcaagcaattctcctgcctcagcctcccgaggagatgggattacaggcgcctgccaccacgcccagctaattttttgtgtttttagtagagatggggtttcactatgttggccaggctggtctcgaatgcctgacctcgtgatccacccgccttggcctcccaaagtgctgggattacaggcgtgagccaccacgcctggccacgctatgttttaaagaaaaaagtttaaaagtaggacctatttctttttttcttttcatttttttgagacggagtctcactctgttgcccaggctggagtgcagtggcgtgatctcggctcactgcaacctctgcctcccgggttcaagtgattctcctgcctcagcctcccgagtagctgggattacaggcgcctgccattgtgcctcgctagtttttgtatttttagtagagacggggtttcaccatgttggccaggctaatcttgaactcctgacctcatgatccacccgcctcggcctcccaaagtgttgggattataggcgtgagccactgcccccagccacaaatgtaggacctatttctaagaaaccctttgtagaggtcagggtattgggaatcctaatttaaaaatatttttaatcattattggaaatttaagtgacagtgggttcaagagctaaacgtcagaccttttttaaaacaaattttattttctgaaggacttcatacctgacaacgccaattaaacataatactccacccatcctacaaattattaaatacattatttcacctgggactaggataattataaaatggaattttaaagttgtaatatagccaggcacagtggtttgtgcttgtaattcctgctactcagcaggctgtggcaggaggatcacttgagggctgtaatgtgctgtgtgaactgggtgtctgcactaagttcggcatcagtatggtgacctcccagaaaaggaagactgccaggttgcctaaggaggtgtgaaccagctgaggttggaaatggagcacatcagaaactcccatgctggttagtagtgggactggagctgtgaatagctactgctctccaccctgggcagcatagtgagaccccatctctttaaaaaagaaaaaaaaaagaaaactatcttaaaatatcattttaactgtcatgtttgctagttgaattatgaaatcaaagacaaattttatatttaagggacagataataaatgctgttccattgctttatttttaaaattttgtaattgcttttttttgagatggggtcagtctctggtcacccaggctggagtgcagtggcatgatctcagctcactgcaacctctgcctcccaggctccagtgatcccgcctcagcctcccgagtagctgggactacaggcatgcgccaccacacccggctaatttttgtattttttggtagaaatgaggtttttccatgtcacccaagctagtcttaaactcttggactcaagtgatctgccgccttggcctcccattctgtggggattaaaggtgtgagccaccgcaccctgcctccttttcctgttgtctgccattttgataagttaactttaccgaggaagaacttaaagcaagatttttcctcttatttttcaggtaaagagattataaatcttccactgaatgaaaaaaattttcttaaagctgcatatactccaagaaaaaaaccacaaatgtttttctgttttgcctgaatacatgatttaaacaagagatttccacagaaggtaagataagtttctttttcaatttgattctgttttattgtgtaatttatgtaaaagttctgtacaggtggaagttcaaagatgggtcacagcgaaaaacgtagtttagaagatatgctggctgggcactgtggctcacacctgtaatctcagcactttgggaggccgaggtgggtggatcatgagatcaggagttcgagaccagcctgaccaacatgatgaaacccgtctctactgaaaatacaaaaattagctgggcrtagtggtgtgtacctgtaatcccagctactcaggaggctgaggcaggagaatcgcttgaatccaggagatggaggttgcagtgagccgagatcgtgtcactgtactccagtctgggcgacagagcaagactctgnnnnnnnnnnnnnnnnnnnnnnnnnnnnnnnnnnnnnnnnnnnnnnnnnnnnnnnnnnnnnnnnnnnnnnnnnnnnnnnnnnnnnnnnnnnnnnnnnnnnnnnnnnnnnnnnnnnnnnnnnnnnnnnnnnnnnnnnnnnnnnnnnnnnnnnnnnnnnnnnnnnnnnnnnnnnnnnnnnnnnnnnnnnnnnnnnnnnnnnnnnnnnnnnnnnnnnnnnnnnnnnnnnnnnnnnnnnnnnnnnnnnnnnnnnnnnnnnnnnnnnnnnnnnnnnnnnnnnnnnnnnnnnnnnnnnnnnnnnnnnnnnnnnnnnnnnnatcaagtgattacttcttcatcagcctcccaagtagctgggactacaggcacgcaccaccacacctggctaatttttgtatttgtagtagagacggggtttcaccatattgaccagggtggtctcgaactcctgaccttgtgatccgcccgcctcggcctcccaaagtgctgggatagcaggcgtgagccaccgcgccctgtccaaagtttaattctgacaaaacaggaacagttttgcacatatttaatgaggtatatgttccgtctcacttgcagggaacatgtgagatacagcatatacactgtcacagttgccattcaaaccacacagttacgcagaaaatgaaaaggggagggaaggacctctgcttccagcaatataagatactcttacgaggctcttccattgcagttcagtgagatgctggataaattagaataaatataatttctttctttttttttttttttttttgagacagagtcttgctcagtcgcccaggctggagtgcagtggcgcgatctcggctcactgcaagctccacctcctgggttcatgccattctcctgcctcagcctcccgagtagctgggactacaggcacccgccagcacgcccggctaattttttttgtatttgtagtagagacggcatttcaccatgttagccaggatggtctcgatctcctgacctcgtgatccgcccgcctcggcctcccaaagtgctgggattacaggcgtgagccaccgcgcccagcctaatttctttattctttattttttttcaagacaaggtctcactttgtcacccaggctggagtgcagtggtgtgatcatagctcaccacaaccatgtacacctaggctgaaaggaacctctcacttaagtctcctcagtagctgggactataggaatgcaccactacggctaatttatttatttatatatttttatgtgtttttttttgtgagacagagtcttgctctgttgcccatgctggagtgcaatggcatgaccttgactcactgcaacctccgcctcctgggttcaagcgaatttcctgcgtcagcctcccgaatagctgggattacaggcaccagccaccatgcctggctgatttttgtgtttttagtagtgacggggtttcaccacgttggtcaggctggtcttgaattcctgacctcaagcaatccacccacctcagcctcccaaattactgggattattataggcgtgagccaccgcacccagcccaccatggctaatttaaaaacaatttttttagagatggggtctcactgtgttgtccagactggtcttgaactcctgggccgaagtgatcctcctgccttggcctcccaaagtgccgagattataggtgtgagttaccacgcttggccaaatataatttctgtgagcactctgatgcgttaaaaattaagatgacccagctgggcggatggatggcttgagtctgaaaggtggaggttgcagcgagacaagatcgtgccgctgccctccagcctgggtgacagagccagaccctgtctcaaaaaaaagaaacccaccaaaattcaacatatggattaaacagattaaacacagatgcagatggaattggtaaagtgaaacacagtgaaagacattatccaaagtgcagccctgagagatcagtgatggtagtaaatatgtagctggaattcctagaatgaaaaaatcaggaatattgaagagatgtattattcgaagtattaatagctttgaacttcagaaactaataaaagacctaaatcccataggtttaggaatcacaatatgtacccaatcaatatttttagaaaaaaacaaacnnnnnnnnnnnnnnnnnnnnnnnnnnnnnnnnnnnnnnnnnnnnnnnnnnnnnnnnnnnnnnnnnnnnnnnnnnnnnnnnnnnnnnnnnnnnnnnnnnnnnnnnnnccaaggtgggcggatcataaggtcaggagattgagaccatctttgctaatacggtgaaaccccgtgtctactaaaaatacaaaaattagccgggcgtggtggtgcgcgcctgtattcccagctactcaggaggctgaggcaggagaattgcttgaacgtgggagatggatgttgcagtgagccaagatcacgctactgcgctccagcctgggcgagagcgagactctgtctcaaaaaaaaaaaaaaaaaaaagagaaaaagaaaaaaacaaacccacacccatacactgaaatcgtatagcaccaaagacaaaaagaaggtgttaaggtaaagttaaaagatagattacctaaaatggaacattagctaggttgacaacagatgtctcagcagcatgaatggaagccagtagagagtagaataattcctcaaagcgacgagagcatgtatgttttattatagaatcgtgttatcaaataaattttgcaagaaaaatggcaaggttttatgtttctgagaatgttaggctaggttagactaccttctactcccccaccctccaccccagaaaaacagccacaattgttagatgaaaaaacataaataaaagaactgacaaaaaagcaggaaacttttggatcaaaatctaactgaaaataacgcagaaaggtaatttaaacaccatagaatggggtctgcttttgtcctgagggcatttgctcatgtggacaaagtggggctttgagtttagaggatttgtgaaaagaacagtagttaagctcgattcctctcaaggtaaatagcctaaaggagaccctccccacaccgatggaactctgaagggctctatcctcaaggtgtgagggcagactagaggcacatgtgcctcacaccgttccttgccctcatctggttgtctttttactaaatgtagcacaaaaagatgaaaagggaaaaaaacctgttcctgagaattgtagctctgtattggcctttgtgaggatttttagcccagttacattgcctggtagttcagggaaatcgggcatgaatttaattcaaggtgtttctagcttgtcatctgacaggaacaaagataaaacctctctggaagaagttaccttcatcctaagatacaaagaatccctgcagattttttttttttttttttttttttttgagatggagtcttgctttgtatcccaggctgaagtgcagtagcacaatctcggttcactgcaacctctgcctcccaggttgaagcgattctcctacctcagccttgcaagtagctgggactataggcgtgtgtccggctaatttttgtatttttagtaaggacggggtttcactgtgttggccaggctggtcttgaactcctgacctcaggtgatccgcctgcagatattttttaargacagtgattaatagtacacagacaaaaatgactaagcacacaagcaaataagccactctgagttaaaaccagtacagttcaggtgtggtggctcatgcctgtaaccccagcatattgggaggctgaggcaggaggatggcttgagtccatgagtttgaggctgctgtgagctatgattgcaccgctgcactccagcctgggtgacaaagtgaaaccttgtctcaaaaaaacccccagaaaatgaaaacaggaaaaccagtagaaacacttcctcaaagacttcaggtattggaattgttagaaacagactataaaaaaagtgtactttttgtatgtgtgtgagaaggtcttactctgtcgcctaggctggagttggagtacagtggcgtgatcttggctcactgcaacttccgcctcctgggctcaagtgatccttctgtctcagccttctgagtggctgggactacaggcacacaccaccacacctggctaattctttgtattttttgtaaaaacaggtttttgccgtgttgcccaggctggtcttgaattcctggctttaagcaatctgcccacctcggcctcctaaagtactggaattacaggcgtgatctagcatgctggctgagtgtgcttcttatttttaaagaaataaatatttggctgggtgcagtggctcacgcctgtaatcccagcagtttgggaggccgaggcgggcagatcacaaggtcaggagatggagaccatggtgaaaccccgtgtctactaaaaatacaaaaaattagccgggcgcggtggcaggcgcctgtagtcccagctactcgggaggctgagacaggagaatggcgtgaacccaggaggcggagcttgcagtgagccaagatcacaccactgccctccagcctgggcaacagagcgagactccgtctcaaaaaaataaaaaataaaaagaaataaatatttaacaacataaaaatatttgtaagaaacagtaaaaggtgatatagaatatttgaaaaaggaccatgtagaacttctagaaataaagaataaaatattcagtatcacaaattcaggccaggtgaggtggctcatgcttgtaatcccagtactttgggaggtagaggtagggagatcacttgagcccagaagttcaagaccagcctgggcaacatggtgaaaacctgtctctacaaagaatttttaaaattagccaggcgtggtggtgcacacctgtagtcccagctacttgggaggctgaggtgggaagatcactcgagcccaggaggtcaagccatcattgtgcaagtgcactgcagcctgggtgacagaacaagaccctctctcaataataataataataattcagtgtgtacaggtttaataacaaaatatatacagtgaagtgaaaatcagtgaaccagaaaacaggtcagaaggaattacccagaatgaagcacagagaaaatgatgggaaacataggccagaacatgggacatcgagggcaaatgtctaatggatgtttacttaatgttctgtaaagagaaaagagagaatgaggcagatttattattagaaaagataaagactaaaatttctcagaattggtgaaagaagtctacagatttaggccaggcgcggtggctgacgcctgtaatcccagtactttgggaggctgaggcgggaggatcacaaggtcaagagttccagaccagcctggccagcatggtgaaaccctgtctctactaaaaacacaaaaagtagctcagcgtggtggcrcgcacctgtaatcccagctactcacgaggctgaggtaggagaattgcttgaccccagaaggcggaggttgcagtgagctgagcttgagcgctccagcctgggtgacagagcaagactccgtctcaaaataaaagaagtctacagatttgagaagacaaatgaatggtaagcaggataaataaaaataaaatttatagctagccaaaggagagtaaaactacaaagcaccaaagagtgttcttaaaataaacgaaaaacacagatcaactttatctgagcagcagtaagaatgatggctgacttcttaagtgccrcaatggaaaccagaagccagtggagtaatattttcattgtgctgaaagtaaaacaattcctgacttctaactttatatcaggaaaaattatctttcaaaaaaattatctgctgtaggctgggtgcggtgggtcaccctgtaatcccagcactttgggaggctgaggcaggtggatcacctgaggtggggagttcgagaccagcctgaccagcgtggagaaaccccatctctactaaaaatacaaaattagccagacgtggtggtgcatgcctgtaatcccagctacttgggaggctgaggcaggagaactgcttgaacctgggaggtggaggttgtggtgagctgagatggcgccattgcactccagcctgggcaacaagagcaaaactctgaaaaaaaaaaattatctactgtagttgaatgtttatgtccctccagaattcatattgaaacttaatccccaatgcaatagttttaagaggtggggcttaccagcctgagcaacatggtgaaaccccatctctacaaaaaaaaaaaaaattagctgggcctggtggggcatgcctgtagacccacctacttgggtggctgaggcaggaggatcactcgagcccaggagattgagactgcagtgagccatgattgcactgctgcactcctgcctgagcaacagaattaaaccctgtcccaattaaaaaaaaaaaaaaaaaggtgaggcctagaatatgatgaggccgtgagggctccactctcatgaatgggattagtgccttgtagaagggcttgagggagtctgttagtcccttttgccatgtgaggacacagtggaggcaccatctgtgaaaattaggtcctcatcacacactgaatctgctgctgccttggttttggatttcccatctcccagagctgtgagaaataattttctgttgtttataaattacccagtctaagatattttgttatagcagcagaaacaggctaagacacagtcctttactaaatacaattctcaagaataggggccaggcacagtgattcatgcctgtaatcccagcactttgagaggctaagaagggtggattgcttgagtccagaagcttgagaccagcctgggtgatgtggtgaaaccccgtctctacaaaaaaataaaaaaattagccgggagcggtggtgcatgcctgtagttccagctacttgggaggctgaggtgggagtatcacttgagcctggaggtggaggctgtagtaagttaagatcacaccactgcactctagcctgggtgacagagtgagaccccgtatcaaagtaaaataaaagatagaatggactttaggcagaaaacagtgatcctaaatggaagaactgagattcaaaaaagaatgcaaagcaaatatgtgagcaaattcaaattagcattggaggggtgcagtggctcctgcctgtaattccagcactttgggagggtcacttgagcccaggagtttgagaccagcctgggccacatagggagaccttgtctctacaaataataaaaaaattagctgggcatggtggcacattcctgtagtcccagatacttaggaggctgagatgggaggatcacgtgagccttggaagttgacattgccgtgatcacaccaccatactccagcctgggtggcagaccgaaaccctgtcccctccaaaaaaccccactaattgtttagtaatataataatatctatggggtaaaatcaaggtagaatttcataatacatgaaaatagtaacaaataagtcatgaaggagagtaaatgaagttaaaacattccagtctttgtagtagctgtgtcttagtccatttgtgttgctataaaggaataccagagggtgggtaatttataaggaaaagaggtttgacacagttctggttctggtaagagtttcaggctgcttccgctcatggcaaaagttcaaggggagccaaagggaagctagcttgtagagaccccgtggtgatagagaggaagagagagaaagagaaggtgccagtctttttcttttttttttttggtatttttagtagagatgggggttttaccgtgttagccaggacggtctcgatctcctgacctcgtgatccacccgcctcagcctcccaaagtgctgggttacaggcgtgagccaccacgcctgatgtttttttttttgagnnnnnnnnnnnnnnnnnnnnnnnnnnnnnnnnnnnnnnnnnnnnnnnnnnnnnnnnnnnnnnnnnnnnnnnnnnnnnnnnnnnnnnnnnnnnnnnnnnnnnnnnnnnnnnnnnnnnnnnnnnnnnnnnnnnnnnnnnnnnnnnnnnnnnnnnnnnnnnnnnnnnnnnnnnnnnnnnnnnnnnnnnnnnnnnnnnnnnnnnnnnnnnnnnnnnnnnnnnnnnnnnnnnnnnnnnnnnnnnnnnnnnnnnnnnnnnnnnnnnnnnnnnnnnnnnnnnnnnnnnnnnnnnnnnnnnnnnnnnnnnnnnnnnnnnnnnnnnnnnnnnnnnnnnnnnnnnnnnnnnnnnnnnnnnnnnnnnnnnnnnnnnnnnnnnnnnnnnnnnnnnnnnnnnnnnnnnnnnnnnnnnnnnnnnnnnnnnnnnnnnnnnnnnnnnnnnnnnnnnnnnnnnnnnnnnnnnnnnnnnnnnnnnnnnnnnnnnnnnnnnnnnnnnnnnnnnnnnnnnnnnnnnnnnnnnnnnnnnnnnnnnnnnnnnnnnnnnnnnnnnnnnnnnnnnnnnnnnnnnnnnnnnnnnnnnnnnnnnnnnnnnnnnnnnnnnnnnnnnnnnnnnnnnnnnnnnnaaaaaaaaaaaaaaaattagctgggcgaggcaggagaatcacttgaacctgggaggtggatgttgcagtgagccaagatcacgccattgcactccagcctgggtgacaggaatgaaactttgtctcaaaaaaaaaaaaaaaaagagaactcagttactccctcaagaatggcaccaaaccatttacgagggatcttccccgacaaccagaacccctcctaccaggctccacctcagcatggggcaccacacgggccccacctcagcatcacacgggcctcacctcagcaccacacgggccccacctcagcaccacacgggccccacctcagcatcacacgggcctcacctcagcaycacacgggccccacctcagcaccacacgggccccacctcagcatcacacgggccccacctcagcaccacacgggccccacctcagcatcacacgggccccacctcagcaccacacgggccccacttcagcaccacacgggccccacctcagcatgaggcatcccagtttaacatcaggcttggtggggccaaagaaaccatatccaaattacagcaaactaggatagggattaactgtagattttaataagtgcagtttacaagttctaaggaattattgtaggaatagaaactggccaggcgtggtggctcacgcctgtaatcccagcactttgggaggccgaggcgggtggatcacgagatcaggagattgagaccacggtgaaaccccgtctctactaaaaatacaaaaaattagccgggcacggtggcgggctcccgtagtcccagctactcaggaggctgagacaggagaatggcgtgaacccgggaggcggagcttgcagtgtgctgagatcacaccactgcactccagcccgggtgacagagcgagactccgtctcaaaaaaaaaaaaaagaaaaaaaaggaatagaaactgtacaatttccaaattagtgaagagaaagtagtggaccttcctttattcttgtaaggaaaagctgcaacaatttttttagcaaccattaactaaatgataatatatattgaaaacttaacctgtgaaaatggaaagaagacagggtgcatgcttttaccacttgagaatagtgatggaagtcttagcccaataaatcagaaaaaggataaaaagataaaagaatttaaaaggaagaaacaatctattattcgttggtgatactattatgtatgtagaaaatccaaaatgatccaaagctataatacagtcaattctttacccaaacagctttaaagtcaataatcttttagcaattgtctggataaaaaagtcaaacagggcacggtggctcatgcctgtaatcccagcactttgggaggctaaggcgggcggatcacaaggtcaggagttcgagaccagcctgactaacatggtgaaaccccgtctctactaaaaatacaaaaactaagccaggcatggtggctcacgcctgtaatcccaggcctgggctaggcaaaagggtgaaaatccgtctccaaaaaaaaaaaaaaattcaaacaaaaataaattacagtgtaccaccaacaaacacactgaagttaaaaagtagaattataaataaaaaatacctgggaataaaataaaagatgtgtaaaacctttatggagagcactatacaattttgaaagcaattaaagacttgaataaatgggcagaggtaccctggttttggattggaaaacttactgttataccagttcttctccaactgatcgagaaattgagtgcaatcccaataaaaaacccgagattgtcagtgagggtgtgggaaaagggtgaaatttacaagcaaatttttttttttttttttttgagatagggtctcactctgtcacccaggctggagtgcaatggcacagtctcagctcactgcaacctctgcctcccagactcaagcgattctcctgcctcagtctcccgagtagctgtgattacagggatatgccatcacgcctggctaatttttgtgtttttagtagaaatggggttttaccatattggccagggtggtctcaaactcctgacctcatgtgatctgtctgccttggcctcccaaagttctgggattacaggcataagccagcacacccggcctgatttagaaatkatatgaaaatgaaggggtccatgaatactcaaggtgtgattgaagaattccaattcattccatgtgtcaaagatcttgttttaagatgttggtgtttttatattggtagggtgcccatcagccctggtttgcccaagtgtcctggtttttcctgtggtcctggtctcattaagaaagtgttttcatttcgagtccttttggaagtcttattctgctgtttgggtaaagaattgactgtattttttagtttttaatttttgtttttagggttgcccgtgttttcccaaatacagaattctaaaccagagaatagcaccttacatagtagagagattgcttctcttttggtaggcggtggccaggaargaacgccaggtagcattaagccttggcccccaagtatgtcttgttccctgtctctttgctttcagtgggttccttgggccttcttgtttatgatggagaatacataggaattagcctcctcagcttccttctttcttgctgtgcttaagacaagcagccatatggggctgttatctttctgccactgggaaatgagagggtgggtgctaaaaaattaacttaaaaaggaaaaggatgaggccaggcgcagtggctcatgactgtaattgcagcactttgggaggctgaggtgggcggatcacctgaggtcaggagttcaagactagcctggccaacatggtgaaatcctgtttctactaaaatacaaaaattagccaggcatgatggtggatgcctgtaatccaagctacttgggaggctgagacgggagaatcgcttcaacccgggagatggtggttgcggtgagccaagatcacaccactgcactccagcctgggcggctgagcgagactccatctcaaaaaaaaaaaaaaaaaaagaaggatgaacacctttgagctcgtgtgttagtgacatcacatcccttctttcattcatttagtaaattcaagtatgatttgttgggcacttataatatgccaggtgcattacataactcctgtggccttttgaagaaaatattattttatatgaagctcagtgtcttaatctgttttctgctgtttagaatacctgagactgggtaatttataaagaaaagaaattttagtggctcacgcctgtaatcccaccagtctgggaggctgaggtgggcagatcacgaggtcagtagaccgagaccatcctggctaacacagtgaaaccccgtctctactaaaaatacaaaaaattagccgggcgtcgtggcgggtgcctgtagtcccagctactcaggaggctgaggcaggagaatcgcttgaacttgggaggtggaggttgcagtgagccaagatcgcgccactgcactccagtctgggcgacagagcgagactccgtctcaaaaaaagaaaagaaaagaaatttatttcatatggttatggaggctgagaagttcaaggttgagaggcatatctggtgggggccttcttgctgctggggacactgtggtggcccaaggtggcgtgggacatcacgtggcaagggagctgagtagtgtactagctcaggtctttcttccttttttttttgttttgtttttttaagagatggggtgtcactctgttgcctaagctggaagtgcaggggcacaatcatggctcactgcagcttcaacctcctgggctcaagcgatcctcccacctcagcctcctgagtagcagggactataggcgcacagcaccatgctcagctaatcttgttttgttttgttttccatagagacagggtcttgccatgtctagcaggctggtctcaaactcctggcctcaagtgagcctcctgcctttagccttccatagttctgggatcacaggcctgagctactgtacctaacctcttctttttataaagccaccagttccactcccatgataactcattaattcacaaatggattaatccattcttgagggcagagctctcatgatccaattacctcttaaaggccctacctttcaatactgccacactgggattaagttttgttttgttttgttttggagacagaatctcacgccgtcacccaggctggagtgcaatggtgcgatttagactcactgcagcctctkcctcccaggttcaagcgattcttgtgcctcagcctcccgagtagctgggattacagacacgcactgccatcacgtccggctaatttttgtatttttagtagagacagagtttcaccatgttggccaggctggtctcaaactcctgacctcaggtgatccacctgccttggcttcccaaaatgccgggattacagcatgagccaccacccccagccagggattaagtttttttttttttttttccttttttgagacgaagtcttgctctcatcccctaggctggagtgcaatggcgctatctcggctcactgcaacctctccctcccgggttcaagcgattctcctgcctcagcctcctgagtagctgggattataggcacctgccactatgcctggctaatatttttatttttagtagagacagggtttcaccatgttggccaggctggtcttgaactcctgacctcaggtgatccacctgcctcggcctcccaaagtgctgggattacaggcatgagccaccgcgcccagctttttttttttttttttttttttttttgagacggagtcttgctctgtctcccaggctggagtgcagtgactcgatctaggctcactgcaagctccacctccccagttcatgccattctcctgcctcagcctcccgagtagctgggactacaggcgctcgccaccacgccaggctaattttttgtatttttagtagagacggggtttcactgtgttagccaggatggtctcgatctcctgacctcaggtgatccgcccgcctcagcctcccaaagtgctgggattacagacgtgaaccactgcgcccggacaaggttttttttgttttgttttgttttgttttttttgagatggagtcttgctctgtctcccaggctggagtgcagtggtgcaatctctgctcactgcaacctctgcctgctgggttcaagcgattctcctgcctcagcctccaagtagctgggattacaggtgcccgccaccatacccagctaattttgtatttttagtagagatggggttttgccatgttggccaggctggtctcaaactcctgacctcaggtgatccacctgcctcgaccacccaaagtgctgggattacaggtgtgagccactacgcccggccttaagttttaacatgagttttggagtggttatatattcaagccatagactcagggaagtaaagaaccttgctcaaattgtagtaaggtacaaaccgagcttctgcagcaaggaggtcccaaagaacagtggcttgagcaaggtgcaagcacatttctttctcctctaacagtctggtctgccaggtggccttcctcagcttgtggcttccactcgtggatctagaagggtctttatggtttttggtttcccaccaggcggtaaaatcagaacgaaggaagctcacaacagtaagaggttgaggttccagtgttagttacttctactcrcaacccatttacccagagtttagtcacatgatgatagctggctgtaaggagggttggaaaagttaggctgaaggagggtggccatgtacccagctgacctctattctgttgaagaaagggaaactggaaactggggacaagtagaatgtcccccacacctgcctgcagtcacacaggtggagggtgtggatccaggccctctcttcctatctgtcctgctcttccgcggtaccttactactgtttttgggaagaagcagcctttgcgaactttatgtatgtattaaattaaaatcatttatttattttttgagacagggtcttgctctatcaccgaggctggagtgaaggggtacgatcatagctcagggcagcctcaacctcctgggctcaagcgatccccctgcctcaggctcccggagtagctgagatgatagtcccacaccaccatgcccagctagtttttaaaactttttttgtagagctggggtcttgctgtgttgcccaggcttgtcttgaactctgggctcaagtgaccctcagcctcagcctcggcctcccgaattgttgggattacaagcatgagccatgtgcctcttttcacttctgattttggatttttacttaacttgtttgtcccactccaccccctttttaaagttagactctttttcctggtcttttttccccggtggactatgctcaggatcgacatagtcttgtttgttccttggttgtacaaatagtcattgtgcttcatgtgctcacgttgccatttttttccgggccaaatggaaatcaagcattcagcctatccagtggtatgttggtaaatgtttaacaacgggctttctggggaggaaaaaacctcctggtttgtaacacttgctgatttccatggcgttaatactcccaccacgttggagttgagctgccagggtgatgtcctgaaggtggaagagggaagagaggtatgagggctcaggttgggccaccgcggcgcacgccctctgtgggcacagtgactttatctctgtttccgtctctttacgctgagggtctttgagaatgaaacgtgctgggaactgttctagagcctttatgtggaataacttagtaatcctccccacaggggatgtcgatgctgcattttacgggtgaggaaatcaaggcatgagagatcatgtgagtggcctcagctcacaccgcagagctaggactttgatcataaatctttaaaagaacaaaacagtggctgggcgccagtggctcatgctgtaatcccagtgctcatgctgtaatcccagcaccttgggaggctgaggcaggtggctcgcttgagcccaggtgttcaagaccagcctgggcaacatggcaagatgtggtctctataaaaaatttttttaggattwaaaaaaaaaaacagtcagcttgggtaacatggcaaaaccttgtctctacaaaaaaagtacaaaaattagctgggtgtggtggcgcatgcctgtagtcccagctacttgggaggctgaggagggaggatcacttaagcctgggaggttgaggctgcagtgtgccaaaatcccaccactacactccagccttggcaacagagcaagaccctatctcaaaaaaaaaaaaaaataagcctaaatcctggacaaggtggctcatgtctgtaattttagcactttgggaggctgatgtgggagggttgcttaagcccaggagttcaagactgcagtggctgtgttcaggtctctgcactccagtctggctcacagagcaggaccctgtctcaaaaatacacataaattttttaaaaagggccaggcacggtggctcacgcctataatcccagcattttgggaggccgaggcgggcagatcacaaggtcaggagttcaagaccagcctggccaatatggtgaaacccagtccttaataaaaatacaaaagttagctgggtatggtggcaggcacctgtagtcccagctactcaggaggctgaggcaggaaaatggcttgaacccaggaggcggaagttgcggtgacctgagattgtgccactgcactccagcgtggggacagagtgagactccatctcaaaaaaaaaaaagaaaagaaaaaaaaatgatttgtggccagacaggtaatagggcatttcagattctaattttctcttagcaacagtctctatcacagaatgttgttttttaaagggcgctttcatggaactatatgatcatatgggcaacattctgttgcagtctaccttctgtctgacggatatgccatcctgaaaaaggaaagaagctgaacttcaagttcctttcatttagccttgggtaagaatctagaagatgttggtcatactgtgcttgacatcccagatggaccactgaggatgggagtcaggatgtgagaggagtccttaagctctgttgagacttccgatgtaaccagaaattccttaaaccaacaagccaggccatgaccacttgtttgttctgaagatgctgccagtgctgaccttgaggtcatgtagggaaggaaatggaaggccttccctgtaggtgagggccaaccaggaagatgctagcatctgtttggaggatagggtgtagttgtgcagataggagaaaacttggaaaaaagaagtatgtaatattatgttagtaaatgttctggagtcagtttataccagtttctttgacagtgaaattagctgtaactaaaccagtgccattgcagtgaactcttaaaggatgtctctgatgtgatctttttttgtttttttttttttttgagatggagtctcgcgctgtcgcccaggctggagtgtagtggcgtgatctcggctctcgctctgtcgcccaggctggagtgtagtggcgtgatttcagctcactgcaacctccacttcctgggttccagtgattctcctgcctcagcctcccgactagctgggatttcagatgtgcaccaccatgcctggctaatttttgtatttgtggtagagatggggttggccaggctggtctcgaactcctgacctcaagtgatctgcccgccttggccccgcaaaatgctgggattacaggcatgagccacagtgcccagcctgatgtgatcatttttgagtgtttcttagaatgtggggagagctgatagaaacatagaaatgttcttgttatgcggagatttttttcttttttctttttctttttttttctttttttttttgagatggagtctctcactgtcacctaggccagagtgcagtggtgtgatatcggcttactacaacctctgcttctcgggttcaggcgattctcctgcctcagcctcccaagtagctgggattacaggcacccaccaccacgcccatctgatttttgtgtttttattagagatggggtttcaccatgttggtcaggctggtctcaaactcctgacctcaggtgatccacccgcttcatcctcccaaagtgctgagattacaggcgggagccaccgcgcccagcccatatnnnnnnnnnnnnnnnnnnnnnnnnnnnnnnnnnnnnnnnnnnnnnnnnnnnnnnnnnnnnnnnnnnnnnnnnnnnnnnnnnnnnnnnnnnnnnnnnnnnnnnnnnnnnnnnnnnnnnnnnnnnnnnnnnnnnnnnnnnnnnnnnnnnnnnnnnnnnnnnnnnnnnnnnnnnnnnnnnnnnnnnnnnnnnnnnnnnnnnnnnnnnnnnnnnnnnnnnnnnnnnnnnnnnnnnnnnnnnnnnnnnnnnnnnnnnnnnnnnnnnnnnnnnnnnnnnnnnnnnnnnnnnnnnnnnnnnnnnnnnnnnnnnnnnnnnnnnnnnnnnnnnnnnnnnnnnnnnnnnnnncgtggtggttcacacctgtattcccagcattttgggaggctgaggcaggagaatcgcttgaactcaggaggcagaggttgcagtgagccaaagttgcaccattgcactccatcctgggcaatgagagtgaaactccgtctcaaaaaaaagagaagacataacaatcctaaatatgtgtcaacataataaaagaaattcagggccgggcgcggtcgttcacacctgtaatcccagcactttgggaggccgaggcggacagatcacgaggtcaggagttcaagaccagcctgactaacatggtaaaaccccatctctactaaaaatacaaaaattagctgggcgtggtggcacacgcctgtaatcccagctactcaggagggtgaggcaggagaatcgcttgaccccaggaggcggagattgcagtgagccgaggtcgtgccactgcactccagcctgggtgagagagcaaaactccgtctcaaaaaaaaaaaaaagaaaagaaattcaggccggatgcagtggctcacatctgtaatcccgacattttgggaggccaaggcgcttgaggcctagagttcaagaccagcctgggcaacatagtgagaccccatctctataaaaaatttaaacatagtccaggcgcggtggctcacacctgtaatcccagcactgtggggggcctaggtgggcggatcacgaggtcaggagttcgagaccagcctgaccagtatggtgaaaccccatctctactaaaaatacaaaaaatcagctgggcatggtggtgcatgcctgtaatcccaactactcaggagactgaggcaggagaatcacttgaacctgggaggcggaggttgcagtgagccaagatcgtgccactgcactccagcctgggctacagagtgagactccgtctcaaaaaaaaaaaaaaaaaaaaaaaaaatgtaaacattagctggtcatggtatttcttggttgtattcctagctgcttggaaggctgagatgggaggactgcttgagcctgcagtgagctatgattgtggcactgcactccagcctggacracatggcgaarcaccatctttaaaaataaaatccaatctgacaatgtttgtctttaattgaaatgactatttgcatttaatgcatttattgaaatggttgaatttatgtctggtatcttgctgtttttttttttttattttgtctcctctgtttttgttgcttatctccttgtatttttattattagttttggtcttttggattaatccagttgttttaaattatactactagaaaaattcttctagcaggatcctatttcgtcgatggtcttttgtaatccacccaggcttccaccttctctgtggctagaaacaggaccgtccagaagtcacctgtaactgccctatcttgcaagttctgattttggcaaaaaaaaaaaaaaaagccttgacaaggttggattcacttctttccctggattgtgtgtcatccaagtacgtgagacatctggtagtgcatttcagagagaggagtatctgatatgtgtgtggaggcagccatcttttcctgaaagtccttttaggaatcattatttctggtcctctgaagtttgccgctaccactcataaatatctatccacaccccttacaagaagaataaggaagatcttaagacctagaaggaaaactgattgcagaccaggcttggtggctcagtgcctgtaatcccagcactttgggaggccraggagggcagattgcttgagctcagcagttcgaggccaacctgggcaacatagtgaatccctgtctctacagaaaaaaaaaaaaaaaaamcccaccccaaaatcaaaactgaaggtagtgtcagtgtatatatggagtcccttgtgctgaaagtcaaagcagcttcattttggggcctcaagagctccagctctgggctcttcacctctaagcccatgggcagtgcccgcccagtggtgtgtatagatcggaggctgcagggcctcacccttagctgcagctgtcgcgtgctggggagcctgtgcaggagggtacaagtaggaaagtgccatctgcatgggaagaaaaatgcagcatccttgtagtgcggatggggtccaggagacccaggagctgcccagaggacctggtggcatgctgtagaaagcagccaggtaggtatactggggccaggagaggttttggagctgagatgagatgtgtagacatcaagtgagtttgaattagccaaagccagaggctgtgggagtgtggctggacgatggaggctcccgtgtcaggggtcctagggcatcaccggctttacagtcagacaaacctgggcatttacatctgtggtcagccttttgtttttctaagtaaaaaattagataagataaattccatctactattactataatttttaaaatgtttcatgtaacattgaaaagatttgtaatctcacagtaaagttttaactttgtgaaagatgtaggctttatgttttcactttctatcagaatagtgaaaactttgttgctaaccagccctggcctgcagaatgacatgtgagacactaggaaggactgtccagacaaagacagcaagagctgggatgtttgggaagcagaggaggggctggatcagtggtgattcctcaggtgcctatggcaagacctagtgcccagttggtgtatgtgtgaggaggtgcctgcttcagagagaaccctgggtgtgattcagcaagatggggacgatgagtggatgggccgggtggctgggggaggcagaggagtgagcgcagggtcaggcagcatcagctgtcttgattttgacttgctgagtttgctcacaaatgtgagactttcagaggggagatgtccagtgttcactcaggacagaagacatccctgacacatgggagagacacctgggcgcattcgcctaacagaactacagagcaagcaagagcattgaggggcatgtcgagcacgctggtgggtgggggacagtgtggggaaggagggcaaaggagggggttagcccagaggagaacctggggaggcaggtcctggagctgggggtgcagcctcagagctgttgagcagctgggaagtctgctaactttgtgagcccaacctggagaggtctgatgggaatggttactggggagggcccccaccatcctgagctctgggaatcttgtgtgttcatgctgcagatggacttccaggacttgggtctagtgttgctgagggtggatctgcagargtgagagaaatgacccctttggacttgggtctagtgttgctgaaggtggatttgcaagggtgagagacgtgacccctttgccctcgtttgcagctctgcggccgtcacgatgttctggaagtttgacttgaacaccacgtcccatgttgacaagctgctggacaaggagcatgtgacgctgcaggagttaatggatgaagatgacatcttgcaggagtgtaaggctcagaaccagaagctgctggacttcctgtgcaggcagcagtgcatggaggagctggtgagcctcatcacacaggatccgcccctggacatggaggagaaggtccgcttcaagtatgtaccaaagctgtgacgggccagtacgccaggcagtgctgcaggcaggccgcaggcagtgtctgaggatggccatagttggggatttctgatgaagaagcgagccgtaaaaatccaccccatgtgagaagtgaggagggcactcccatggggtctgaggttgaagagtttggagattgggtgcagtggctcacgcctgtaatcccagcactttgggaggctgaggaggttggattaattgagcccagaaatttgagaccagcctgggcaacatagtgcgaccctgtctctattaaatttttttttttaaattagccagatgtggtgttgtagacctctggttccagctactcgggaggccgaggtaggaggatcacttgaacttgggaggttgaggctgcagtgagccatgattgtgccactgcactccagcctgggtgacaagagtgaaaccctgtctttaaaaaaaaaaaaaaaaaaaaaaaggccgggcacagtggctcatgtctgtaatcccagcactttgggaggccgaagcaggcagatcgctaggtcaggagattgagaccatcctggctaatacggtgaaaccccgtctctactaaaaatacaaaaaattagccgggcatggtggcgggcgcccgtagtcccagaggctactgtactcaggaggctgaggcaggaggttggtgtgaacccgggaggtggagcttgcagtgagctgagatcacaccactgcactgcatcctgggtgacagagtgtgactctgtctcaaaaaaaaaaaaaaaaaaaagagttttgactgtcttgtgccggcattttttcattctaagtaaagttaattttaggttggtacacgtcagagtgttttgagtggcaatatgttgggaaaaaaagactgatcccatgctagagatgcaggtgttattgcagcataaggctgtactgtcagcagggttggctccaggccacaaaatggctaggcaggagagatatgcagtatctgacctacagtcctgggacatgcttcattttagggtcttcagctcgaaggaaatagatcattgtcattcgtggtaccgtccgttctcagagtttttcctgaaacgcccattcagccctggccaggatgctaggagatgacacagagggagggggcagtgtggcgagatggctggagcctcagggccttgagtcaggacagaagggtgagcaaggatggggctggggcgagagggagaacagggcggagctggcctccagctcctcatggtgcagatctgcgaggcacacatgacccgcagtgtccccaggtgacgcctcattaggaagtgggagatacatacaggttagcaaacctcggcctgcaggtcatgtccttttccgtgtgtcctgtgagtgaagaatggttttacattattttttattttagttttttgagacaaggtctcactccatcgcccaggctggggtgcagtggcatgatctcggctcactagagtctctgcctcctggtcccaagtgatcctcccgccttagcctccctagtagctggcactacaggtgcgtgccaccatgcccggctaatttatttttgtattttttttgtaagaagacggggtttcaccacgttgcacaggctggtttcagactcctgggctcaagcaatccacccacctcggcctcccaaagtgctgggnnnnnnnnnnnnnnnnnnnnnnnnnnnnnnnnnnnnnnnnnnnnnnnnnnnnnnnnnnnnnnnnnnnnnnnnnnnnnnnnnnnnnnnnnnnnnnnnnnnnnnnnnnnnnnnnnnnnnnnnnnnnnnnnnnnnnnnnnnnnnnnnnnnnnnnnnnnnnnnnnnnnnnnnnnnnnnnnnnnnnnnnnnnnnnnnnnnnnnnnnnnnnnnnnnnnnnnnnnnnnnnnnnnnnnnnnnnnnnnnnnnnnnnnnnnnnnnnnnnnnnnnnnnnnnnnnnnnnnnnnnnnnnnnnnnnnnnnnnnnnnnnnnnnnnnnnnnnnnnnnnnnnnnnnnnnnnnnnnnnnnnnnnnnnnnnnnnnnnnnnnnnnnnnnnnnnnnnnnnnnnnnnnnnnnnnnnnnnnnnnnnnnnnnnnnnnnnnnnnnnnnnnnnnnnnnnnnnnnnnnnnnnnnnnnnnnnnnnnnnnnnnnnnnnnnnnnnnnnnnnnnnnnnnnnnnnnnnnnnnnnnnnnnnnnnnnnnnnnnnnnnnnnnnnnnnnnnnnnnnnnnnnnnnnnnnnnnnnnnnnnnnnnnnnnnnnnnnnnnnnnnnnnnnnnnnnnnnnnnnnnnnnnnnnnnnnnnnnnnnnnnnnnnaaaatcaaaggaagaatattttgtcacacacatgaaaacgatatgaaacacgtttcagtatccaccaataaagtcttgttagacacagccacactcatccacgtctcatagcgttgagcagctccagcaggggccacggcaaataattcctccctggccatttatagaaactctttgctggcctttgtcttagaaggaagataaagcaggatagtgagccagggtgtccctgtggcagggggtggtcagtacttcatttagggtggtcaggcgtcctcttaggtaaggggagcagtgctgggttggggaggagagttctagcctgagcagggccttgctgtaaggaactgagggttagggtggggcagctgcagccagaagctgctgtggcttctggtcacacctgctgtgtcagcatcactgttgacagtccccatccctcccactttcaaatgtggcccagtctggtgacaaattagagttgagagacaggtatggggcaaggagagtggggaggggtcttctggatcaggacaggaatcccagagtagcatcagtgagccgggagagtctcatagagtttgggagaaatcagtagtagataagtacagaaccaagcaaacagagcaagaggactatgaacctggggggagacttccgtaagtaagcaaagatgccctgagtaaacaacccaggtcaggatatccatttaaattaccctgtgacttcggagggagagcaagaggactaggggaagacttccctaagtaagcagagatgccctgagtaaacaatccaggtcaggatatccatctaaattaccctgtgactcggagggagggaaagggagagggaagtcgggtggtgggaaagctttgccttccattgtaggaagttaattcataatgtctaaaattggtgaacaaagaagaaatgtatgtgtgtattatttagaaacatggaggttaacgttggagaaaactgctgaaagagtccagtgattgcctctgaggagcatgacttgggatgctggggggcagggggcctgtcctcaccagccctgtcatctctgagtttttctctgaggagtgtgacttgggatgggggcaggggggcctgtcctcaccagccttgtcatctctgagcttttctctgaggagtgtgacttgggatgggggcaggggggcctgtcctcaccagccttgtcatctctgagcttttctctgaggagcatgacttgggatgctggggggcrggggggcctgtcctcaccagccctgtcatctctgagcttttctctgaggagtgtgacttgggatgggggcrggggggcctgtcctcaccagccctgtcatctctgagtttttctctgaggagtgtgacttgggatgggggcgggggggcctgtcctcaccagccttgtcatctctgagcttttctctgaggagtgtgacttgggatgggggcaggggggcctgtcctcaccagccttgtcatctctgagcttttctctgaggagtgtgacttgggatgggggcgggggggcctgtcctcaccagccttgtcatctctgagcttttctctgaggagtgtgacttgggatgggggcaggggggcctgtcctcaccagccctgtcatctgaggttttaaagcacgtgcacatatcacttgtataaaaaacatgaaagtcaggtgtggtggctcacgctggtaatcccagcactttgggaggctgaggtgggaggatcacttacgcccaggagttgaagaccagcctgggcaatatagcgagactccatctcttttttttttttttttatggtctgagatggagtctcactctgtcgcccaggctggagtacggtggtgcgatctcggttcactacaacgtccgcgtacccaggttnnnnnnnnnnnnnnnnnnnnnnnnnnnnnnnnnnnnnnnnnnnnnnnnnnnnnnnnnnnnnnnnnnnnnnnnnnnnnnnnnnnnnnnnnnnnnnnnnnnnnnnnnnnnnnnnnnnnnnnnnnnnnnnnnnnnnnnnnnnnnnnnnnnnnnnnnnnnnnnnnnnnnnnnnnnnnnnnnnnnnnnnnnnnnnnnnnnnnnnnnnnnnnnnnnnnnnnnnnnnnnnnnnnnnnnnnnnnnnnnnnnnnnnnnnnnnnnnnnnnnnnnnnnnnnnnnnnnnnnnnnnnnnnnnnnnnnnnnnnnnnnnnnnnnnnnnnnnnnnnnnnnnnnnnnnnnnnnnnnnnnnnnnnnnnnnnnnnnnnnnnnnnnnnnnnnnnnnnnnnnnnnnnnnnnnnnnnnnnnnnnnnnnnnnnnnnnnnnnnnnnnnnnnnnnnnnnnnttcaagtgattctcctgcctcaggctcccgagttgctgggattacagacatgcatcaccacacccagctaattttttgtatttttagtagagacagggtttcaccatgttggccaggctggtctcgaattcccgacctcaggtgatccatctgcctcagcctcccaaagtgctgggattacaggcatgagccactgcacccggcccccatctctatttctttatttaaaaaaaaaaacatattaagacttttttttttttttttttggaaacacagtcctttctgtcaaccaggctggagtgcagtggcgcgatcttggctcactgcaacctccgcctcctgggttcaagcagttctcctacctcggtctccttagtagctgggactacaggcgcacaccagcatgcctggctaattttttgtatttttagaagagacggggttaccatgttggccaggctggtcttgaactcttgagctcaggcaatctgcctgcctcggcctcccaaagtgctaggatagtgctargattacagaagacactttttttgaggctagtcaaagtgcagcagtgtttacacctaattggtcacaagcagttaagatttctttcttccttcttcagtctgtctgcgtcacatgactagccttgtaaataaagtgaaacaaaaaacactttttttgagaaatagaataggggccgggcgtggtggctcacgcctgtaatcctagcactttgggaggctgaggcgggcggatcatgaggtcagaagatggagaccatcctgactaacacggtgaaaccccgtctgtactaaaaatacaaagaattagccaggcgtggtggccggtgcctgtagtcccagctacttgggaagctgagagagtaagtgcactccagcctgcatgacacagcaagactgtcatctctttaaaaaataaaaaaagatggagaagatataaatatatatgtagaccaggagttggcagactgtatctatgaaaagtcagagagtaaatactttaggctttgcaggttgtaaggtctctgttgcaacggctcaactctgaagttgtagcatgaaagcagctacagaaaatagtaaacaaatggatgkggctacattccaagaaggcttcatttatacagagcagcacctgtgcttcgcgactctgctatccttgcctagtggcactgccaggttaaacaccgcctcccgcaacctgttagccttggaggtcagggttctcctgcagacctggcagaacacctccatgaccacaggctcaattatgggaggactcttcttgaaagtggagaatttgcctgagctgtctgtgctcaagagaagctgcacttggtttgggtggattgggatcaggtagcagccactgaccctgcttaattaaagccaggggctgctccagggaggtgaggcccacacgctgcctcttcctaaggcctcacatgcagctagccctgcttctgcggagcagcccttggctgaaaagccactgtgactgtaagatggctggtcaccttctggagtcagagcactgcctgcccaggccacagcagagggcgccaccccagggctggaggcagcagcagtcacatggtcagccctagagcctggggatgctcctggtcttttcgtgagctcttgtctagtttgcttgccaagatctggattatttgagaaataagacagaagagtcagtaagagacaccaagctgtcgctttcattactcataaagcagtgtcatttataactctgagctgtgggcttcctcattcctgattgcagaattagaactgctcacccagtgggaagcagcagtgggtcacagcgggcccccaggaagcaccccctgccgcagagagacttgctgcactcagggcagaactgaaagaaagacagcgtctccaccaagggaaacactgggaggaagggaactttgccataacagttcctgggccactgaccatccactccacatccaytgtccatctcctgtcatggcttcttcctcttcttcggttgacttcctgtggtaaattacactctgttaaaacagcttcytgagatggagttcgtgggtggtgatgtttagggcatcgggcctgcgtgtttgagaccctctgattagaagttcagactgggcattaccccctgggctttgggagcctccgtgttgtcctctagtctcacaagtctgatgtagcaagctcctggctcacgtgtgtcacctgttttctctcctctctgagggcatttaggttcttttctaagccctattgtttctcaatttcccrgtaatgtggaattattccatgggtcaggacaggggatccccaaagagcatcattgagccaagagagtttcatagtcagagcttgggcgaatttagtaataggtaagtacaaaatcaagcaaacagaaaaatattgactctaagggaaaagttgtataagtaagcaaagatatcccgagtagacaaatgaggtcaacagtggatatccatttctttcatttgttgttctgggctccctgaacccttttagtctgtacatttgtgacattagctgagggaaatttctcatattgtttctttgatattttccctcttttctctttctgggacttctaatgaggtgttagattactcaaattaatgctttccttatttttgcttttaatgttttgtactttgcctttttggcctacatctgagagacttcttcatcttttaagttctcatccttttattgacttttcaaagttctaccattattttttgtttgttttttagatgtgaggtcttgctatgttgcccagtctggactcaaactcctgggctcaagtgatcctcccatctcagcctcccaagcagttggaaccacaggtgccaccatgcttaacatctgtcatattttaaaattttattttttttttgagatggagtctggctctgtcgcccaggctggagtgaagtggcacgatctcrgctcactgcaaccttcacctccgggttcacgccattctcctgcctcagcctcccgtgtagctggaactacagacgcccaccaccacgcccrgctaattttttatattttttagtagagacgggatttcaccgtgttagccaggatggtctcgatctcctgacctcgtgatccgcccgcctcggcctcccaaagtgctggattacaggcgtgagccaccgcgccaggccaattttttttttttttttctgagacagagtctgtctcgctctgtcgcccaggctggagtacagtgatgcgatcttggctcactgcaagctctgcctcctgggttcacaccattctcccgcctcagcctccctttttcttttttctttttttttttgagacggagtctcactctgtcgcccaggctggaatgcagtggcacaatctcggctcactgtaagcttcgcctcctgggttcacgccattctcctgcctcagcctcttgagtacaggcgcctgccaccacgcccggctaatttttttgtattttttagtagagacagggtttcaccgtgttagccaggatggtcttgatctcctgacctagtgatccgcccgccttgttctcccagagtgctggggttacaggcgtgagccaccacgcctggcccatatttttaatttctaagagcagtttcttattctcatatattttaataaaagcttcaagttctcattcatggatacacagtcttaatgtgtcatctctgagaacattgtagtttaaaagagtttccttctgttctctacacttgctctcctccgtgtgccttgttttctgcttggtcagcaccacgcttctttcataagtggggccctaratcctgcacagagtttgggatctgcatggggcttactcaccacagcttagaggccactagttgacttttctctttgtcccrttatttttcccagaaaagaatccttctagctctcccctgtggggaatggacctgtcagtatcaggagctgagttgggaagagggctgggggcaccccagtttcttttttttttttttttttaccaagtyccctatttctggatggtgtctggtcaccctgtggctgtgcctggtgtccctggccccaggagccataaggragggacatgtcccactgccctggcctgtaagttctcagcccaccctgcccttactggccgccaaatcagtgtccaggcctctctggagttctgtggcctgaattctcatctctagttgatgccccttctgtgggctcctgaaactcagccttccctgtgccaagtcagtcttcacgtggcyggctgcttcagtcctccaggctggttcgtcgtttctgcctctccattcttgtctttttaattctttgtgttatttgagatggagtttgagagggaatatgaacaagcctgtgtgctccatctgctgtgtttgactggaatttctataccttgtatacatttttaaaactactagagcagcacctgtcatttgaagaataactgtaaaatgttgataaaggaaaaaagaaaatcttagtccctccatctagagaatcagtgtcttctagcttggtttgtgccatgtgtgcacacgtttgtccgtgtgtagacaagatgagtttggagctgggtgtggtggctcacgcctgtaatcccagcactttgggaggccaaggcaggcagatcacttgaagtcaggagttygagaccagcctggccatcatggtaaaaccccgtctctaccaaaaatacaaaagttagccgagcatggtggtgcatgcctgtaatcccagctacacaggaggctgagacaggacgtgaacccgggaggcggaggttgcagtgagctgagatagcaccactgcactccagcctgggcaacagagcaagactctgtctcaagaaaaaaaaaaatcagtttgttccctgtggtattgagacacttcttcaaggaatgatttggatgtttctctgcttccttacgtttgatcttcctcctcaccccatgggatgtgacttcctccccctgcccagctcaccggtcttagtgttagagatctggtagacctggggcctcactgtggcctttgaggctgccaacctggccctcctctcctgctctctggtcctcctgccctgagggaccatgtgttgtccacttgctggccagcccctctgacatcccacagggtgggtactgcctgccccaattaacagacaaggacactaaaggccagaaagttcggctagtgaggtcggctagtgaggggatgagcttgggcctgccccagccccctgcgccagctctcaggccccctctctgcccacacatccagcttgcagtgcccctgtgccctgaccctactccatcgggccccagccaggtcctctctcccaaacccaagcctgctgggccactctttgaccctctacactccacctgcccttcacaggcgctgttcctcagagctctaaaagtggcactttcttgtctgggctgatgaggcacacccaccccccagccagccgagatcattgcgtttcttccccttccacacttggtcggctgccaggcctggccagctgtttcctatagagtctctcaaaccctggcccctccagccggtcgcgtggaccaccttggcttaggtccagtgctagggctgcctctctacctggcggtggccacatgttggcaagagaaggaaggtcatagcagctgaccttgagcacacatttgctgtgtgacaggcatgggcaggcactgtcacctgcacattctatttttttttttttttttttctggaaacaagagtctcgctctgtcacccagactggagtgcagtggcttgatctcatctcactgcaacctctgcctcccaggttcaagtgattctcctgcctcagcctccccagtagctggcattacaggcgcccaccaccacacctggctaatttttgtatttttagtagagatggggtttcaccatgttggccagaatggtgtcaatctcctgacctcaggtgatccacctgcctcggcctctcaaagtgctgggattacaggtgtgagccactgcacccggcatatattctttttttaagtcagagtcttactctgccacccaggctggagtgcagtggtgtgatcttggctcacggcaacctctgcctcccgggctcaagccatcctgcgcctcccgggctcaagccatcctgccacctcagcctcccatgtagctgagaccacaggcatgtgccacctcgcctggctaatttttctttctttcttgttttttttttttttttttggagagacggagtttcaccatgttgcccaggctagtctcccactcctgagctcaagagtgatccacctgcccaccctcccaaagtgctggggttataggtgtaagccaccgtgcccgtccttacctgcacgttcagatgagaaaacccagacacagagaggacaggtcacttgctggtgtcaggacaggcctgttctgagacagccattcctacaggacgctcccactgggtgggccctgggctcctccccagcattcccagaggcagggtcatgcaccaggccttgctatgggggctgctgttgagggctgcgtcctgggctgtggggtgtacctctcctggggcgatggctgtcacccacctctgtctaccagttacaaaagagggagcaaagtaccttattcacaggtgttggtatttcttagtcataacgttcttgcgtagtgcctcatccctcacatggttcctgagcggctgatgggtgtttctcccgtctagggatggagtggtctgtgtttgttgatggaaggggcatggcttagaaggaaaggagaggctcagtggaggggaagatggaaatggccacagatgtggcctcgcggaaacagtgtggttagactggaggtgagaggcctggagggaggcaagaggcctggcaggcgagtgcgaaggcctggagggaggtgagaggcctggagagaggtgagaggcctggcaggcgagtgtgaaggcctggagagaggtgagaggcctggagagaggcgagaggcctggcagacgagtgtgaaggcctggagagaggcgagaggcctggcagacgagtgtgaaggcctggagagaggtgagaggcctggcaggcaagtgtgaaggcctggagagaggtgagaggcctggagagaggcgagaggcctggcagtacgagtgtgaaggcctggagagaggtgagaggcctggagagaggtaagaggcctggagagaggtgagaggcctggcaggcgagtgtgaaggcctggagagaggtgagaggcctggagagaagtgagaggcctggcaggcgagtgtgaaggcctggagagaggtgagaggcctggagagaagtgagaggcctggcaggcgagtgtgaaggcctggagagaggtgagaggcctggagagaggtaagaggcctggcaggtgagtgtgaaggcctggagagaggtgagaggcctggagagaggtgagaggcctggagagaggcgagaggcctggcaggtgagtgtgaaggcctggagggaggtgagaggcctggagagaggtgagaggcctggagagaggtgagaggcctggcaggcgagtgtgaaggcctggagagaggtgagaggcctggagagaggtgagaggcctggagagaggcgagaggcctggagagaagtgagagacctgcagagaggtgagaggcctggagagaggtgagagacctggcaggcgagtgtgaaggcctggagagaggtgagaggcctggcaggcgagtgtgaaggcctggagggaggtgagagacctggcaggcgagtgtgaaggcctggagagaggcgagaggcctggagagaggcgagaggcctggagagaggtgagaggcctggagagaggtgagagacctggagagaggcgagaggcctggagagaggtgagagacctggcaggcgagtgtgaaggcctagagggaggtgagaggcctggagagaggtgagaggcctggagagaggtgagaggcctggcaggcgagtgtgaaggcctagagggaggtgagagacctggcaggcgagtgtgaaggcctggagagaggaaaagccggaagactgagaaaggttatttaaagaatgggagtagggtcagaaaatgtcagatatcagcgtatagggcatgaggagcatagaaggtatgttaaaaaactgaacttctagtagtcagaaataccagctggtcacaggtagtcacgtttttgttctgttctgaggtctgtagtgtttgtttgatcacgtgggtctgcttcctaagaagcagactatgtaagcagcttcctaagagttggagaagtctaatttcacctccagtgcttggactgtgcccttttagatatccaaacacagcctgtgagcttctgacttgtgatgtgccgcagatcagcgaccgcctcggtggggacgagagcctgctgagcctcctgtacgacttcttggaccatgagccgcctctcaatcctctgctcgccagttttttcagcaagaccattggcaatctcattgcaagaaaaaccgaacaggtaaatcacgtgcaaagcctccgtgacttggggcaccgtcatggtggatgctgacgtgtcctgctgtgagcctggcggtgcgactcatcctccggccgcgggaacagcatctgtgactcttctgcgcaacacgtggagcagtgtgtgggttttgccagtctgggagctggaatttgaaagagtgtttctggctgggtgcggtggctcaagcctgtaatcccagcactttgggaggccgagctgggcagatcacttgaggtcaggagttcaagaccagcctggccaacatgacaaaaccctgtctctactaaaagtacaaaaattagctgagcgtggtggtgcgcacctgtcatcccagctacttgggaggctgaggcaggagaatcgcttgaacctgggaggcagaggttgcagtgagctgagatcgtaccactgcactccagcctgggcaacagagtgagactgtctcaaaaaaaagaaggagtgtttcttatagctggctctggaataagcagcacttcccaccatccctgggagctgcacagtgccccaaagtaggccatcttgtgctgtcactgaccaggtggaggtgtgaggtcctggggcatcatggcaggaccttggacatccactttctcaggtctgcagcttcatctgtctgggtggcgtgtctgtctgtccagagcatttattctttcaaaacaaaggtcacttctagcattagacttctgcaaaagcagttagtgaattcatctcagccagctgtaacggggtcttcctggagtccatccttgctcctgccttacatgtgacctgacctgggcttctgcccctccaggctgtggacacacaggtagagaggcgtggtggtccctgtgcctgcaccctgcagtccgccttggccagtcttctttcctgtgtcatgccccacccgcccatccctgatgggagtattttaaaacaaatcccagacaccagattatttctcatgtaaatatttcagtatgtatgtacatttatttatttttgagacagggtctcactacgcccaggctagagtccactggctccaacacagcccactgcagtctcaacctcctcaagctcaggtgatcctcccacctcggcctcctgagtagctgggactacaggcacataacaccacacctggctagtttttaaaatattttttgtagagatggggtttccccatgttacccaggctggtttcgaactcttgggctcaagtgatctgcctgcccaggcctcccaaagtcctgggactacaggtgtgagccacgatgcccagctatgtatctctaaaataaagacttttttcttttaaatataatcagaatttcatgatcacactccaaaaatattaaccgtaattgtttcataccatcaaacattcagtcagggcacaaaccagtatcttacatctgctttgagctctgagaaagcgcagctccacgaaggccgcggttccccttgacgacattcagcatgcatgtgagtgttcagtggaatgccgtcttcccttgcgctgtaaatctgagagttgcaagggccgccaggggackgcctcacctcagctccttctgaagctgagtgtgagtgaaggtcgccagcagcagtgggtcgtgctgggtgtgaggctgctggcagaatgggagtgggagtggaggcagcggggagctgtggtgtgggccgggggattgtcgtggctgtgaggtggtagtagatgttgtaaaaacctttactacctggcccttgcagcccagtgactagatgcatgtatctcataatttgccataacctgatcttattcccctgccactttcggatattttcwttataattttactgcttcatataatatttttcttccattctctcacccagtacttaaggcattaaagtaatatgaactgaactgttaaacatttcttctgttggctgggtgcggtggctcacgcctgtaatcccagcactttgggaggccgaggcgagtggatcacctgaggtcaggagttcgagaccagcctgaccaacgtggagaaaccccgtctctactaaaaatacaaaattagccgggcgtggtagcacatgcctgtaatcccagctactcaggaggctgaggcaggagaatcacttgaacccaggaggcagaggttgcagtgagctgagattgcgccattgcactccagcctgggcaacaagagcgaaactttccatcacccagcagctggcttgttctcacggccagctgtgaggcagggatgccttgagccttcctcctgtgtttcctgaaactgtgggagtagcctaaaggtggggcttcagtgaaatgaccgtccgcattttccccgcccttcattatgaattctttcaaacgtctacaaatgagagaaaatatttcatgaacccccatgtctctgtcactcagattccacatcatctgttcatggctaatcacatttcttctatatctctttatttgtttttcttcaagattatttttatgattctttgccttttgatcatgatgatgatgatgatgatttttttgaggcagagtcttgctctgtcgccaggctgaagtgcagtggcgcaatctcagctcaccacaacctccgcctcccgggttccagcgattcttctgcttcagcctccccagtagccgggtctgcaggcgtgcacccccacgcccaactaatttttgtatttttagtagagacagggtttcaccatgttggccaggatggtctcaatctcttgacctcgtgatccgcccaccttggcctcccaaagtgttgggattacaggcgtaagccaccgcgcccggccgacgatgatgatgatttttgagatggagttttgctttgttgccaaggctggagtgcagtggcgtgaccttggctcattgcaacctctgcctccagggttcaagcaattctcctgcctcagtctcccaagtagctgggattacaggcgcctgccaccacactggggtaatttttatattttttagtggagacagagtttcaccatgttggccaggcttgtcccaaactcctgacctcaggtgatctgcctgcttcagcttcccaaagtgctgggattacaggtgtgagccactgcacacggcctattttgttttttgtttttattttttttcttttctattttttaatttttgctttctcttttttattgttttagaataagcaaattttagaatgagtttgtcactttctacattctccctctccataccctgccccccaaaaataaacctactgaaattttgatgaggtttgcattggctgtagttgggtctgacaaactgtggtccacaggccaaaagcagccatcactgattgtgtgagtgaggtcttagtgtagcacagccacttccattcctgtgcacgctgcccggggctcctttcacaccacagcagcacagctggtagctcaggctactttgatttctcagaaatacactgcagttctctgtatggcagtcttaagcatctttcactagatttattcttaggtatttgatatctttgtatyattttgagtggtgtctttttttttttttttttttttttttgagacggagtcttgctctgtcgtccaggctggagtgcagtggcgcaatcttggctcactgcaacctccacctcctgggttcaagcgattctcatggattctcgtgcctcagcctcccgtctgggggatagagtgagattctgtctccaaaaaaaagaaaaaagaacctcttatttttttcaagcccataatgatcaatgtatcatattcacatacatcagtattctagttgtgatattatactggtgttttagaaaatgtcacaattggaggaaacatgtcaaagcatacaaggattttgtttttgttttcgtttgagacaaagtctcccttttgtctcccaggctggagtgcaggggcacaatctcggctcactgcaacctccgccccctggttcaagtgatctcctgcctcannnnnnnnnnnnnnnnnnnnttggccaggagcagtggctcactccacccaacactttgggaggccgaggtgagtggatcacttgagcccatgagtttgagagcagcctggccaacatgccgaaaccccgtctctactaaaaatataaaaattagctgggtgtggtggcacacgcctgtaatcccagctccttggtggggctgagacaggagaatcacttgaacctgaaggcggaggttgcagtgagccaagattgggccactgcactccagcctaggtaacagagcgagactctgtctccaaaaaaaaagaaaaaaggccaggcgtgctggctcacacctgtaatcccagcattttgggaggccaaggcaagcggattatctgaggtcaggagtttgagaccagcctggcccaacatggtgaaaccctgtctctactaaaaatacaaaaattagctgggcgtggtggccggcacctgtaatcacagctactcatgaggctgaggcaggataatcacttgaacccgagggtggaggttgcagtgagccgagattgtgactctgcactccagcctgggcgacaaaggggagactgtctcaaacaaaaacaaggcctggcgcagtggctcacgcctgtaatcccagcactttgggaggccgaggcgggcggatcacaaggtcaggagatcgagaccgtcctggctaacacggtgaaactctgtctctactaaaaatacaaaaaattggctggacgtagtgatgggtgcctgtagtcccagctactcgggagcctgaggcaggagaatggcatgaacccaggaggcggagcttgcagtgagccgagattgcgccactgcactccagcctgggccagagtgagactgcatctcaaaaaaacaaacaaaatccttgtatgctttgacatgtttcctccaatggtgacattttctaaaacactagtagaatatcacaactagaatattgatgtgaatgtgtgaatatgatccatcgatcattatgggctcaaaaaaaatagaggttattttttctttttttggagatagactctcactctatcccccaggctggagtgcagtggtgtgatctcggctcactgcaacctctgcctcctgggttcaagcaattctcatgcctcaacattccgagtagctgggattacagccacccaccaccacgtcttgctaatttttatatttttagtagagaccatgttggccaggctggccttgaactcctgagatcaagtgatccgcctgccttgacctccctcaagtgccaggattacaggcatgagccaccatgcccagcctggggttattttttcttaaatgtttggaagaatttattaggccattaaaccttctctgtatagagagcctattaattatagattttgtggagttttagtatgttctggaactattctgattttgtttcttgtcagtttaaataagtccttttttttttttttttttttttttttttgagacggagtcttgctctgtcacccaggctggagtgcagtggcgtgatactcggctcactgcaagctnnnnnnnnnnnnnnnnnnnnnnnnnnnnnnnnnnnnnnnnnnnnnnnnnnnnnnnnnnnnnnnnnnnnnnnnnnnnnnnnnnnnnnnnnnnnnnnnnnnnnnnnnnnnnnnnnnnnnnnnnnnnnnnnnnnnnnnnnnnnnnnnnnnnnnnnnnnnnnnnnnnnnnnnnnnnnnnnnnnnnnnnnnnnnnnnnnnnnnnnnnnnnnnnnnnnnnnnnnnnnnnnnnnnnnnnnnnnnnnnnnnnnnnnnnnnnnnnnnnnnnnnnnnnnnnnnnnnnnnnnnnnnnnnnnnnnnnnnnnnnnnnnnnnnnnnnnnnnnnnnnnnnnnnnnnnnnnnnnnnnnnnnnnnnnnnnnnnnnnnnnnnnnnnnnnnnnnnnnnnnnnnnnnnnnnnnnnnnnnnnnnnnnnnnnnnnnnnnnnnnnnnnnnnnnnnnnnnnnnnnnnnnnnnnnnnnnnnnnnnnnnnnnnnnnnnnnnnnnnnnnnnnnnnnnnnnnnnnnnnnnnnnnnnnnnnnnnnnnnnnnnnnnnnnnnnnnnnnnnnnnnnnnnnnnnnnnnnnnnnnnnnnnnnnnnnnnnnnnnnnnnnnnnnnnnnnnnnnnnttctcctgcctcagcctcccgagtagctgggattacacgtgcccaccaccatgcccggctaattttttttgtatttttagtagagacggggtttcaccatgttagccaggatggtcttgatctcctgacctcaggtgatccacctgcctcgtcctcccaaagtgttgggattacaggtgtgagccactgcgcctggcctagataagtccttttttttttgtttttttttttgagacagagttttgctcttgttgcccaggctggagtgcaatggtgcgatcttggcttaccgcaatctccgcctcccaggttcaagcaattctgcctcagcctcccgagtagctgggattacaggcatgcaccaccacgcttggctaattttgtatttttagtagagacggggtttcctccatgttgaggctggtctcgacctcagtctggtctgacctcaggtgatccacccacctcggcctcccaaagtgctgggattacaggcgtgagccaccgcacctggccagataagtattttttttcaaggaaatttcttttctaaatttacaaaaactggcataaaattgtttctattaatttctcataatatagcaggtgtggtggctcctgcttattattacagcattttgggaggctgaggtgggagaatcacttgagctcagaaggtggaggctgcagtgagttatgatcgcaccactgcactccagcctgggggacagagtaagaccttgtctcaaaaacataaaaacaaaactacaaacctctcataatagtttttatttctgtaggatctttggcgatgccccttgtttcattcttaatattgttatttgtaccttctgttttgtccttcgtctttctagaagtttaatcatccttttcaaagagccatcctcctctcctcctcccctaccccctcctcttccttcttccccttctcttttcccaccactccttttcctactgtccctcctcattgcagcactggggagtgaggctgaggccctgcagccaggtgggccttctctgtgttcccattgtttccagtggagggctgggtctaccccagcccccagcccagtagcctggacatagcagacacttatttctgtaggctgagttgagctgaatttgcagcgagcccagccttcacttctccactgttacctyggatccgccgtctgagcagcccactgcgtctgtgatgggtgctgtgcccccccatggcctcacgcttagctgtctacaccttgttggcactggtcatcagccagctgcaggatgcctctttttcttttctaaaacctcagtcttctttccccttcaaccgctcatgggttttggtcagcagctggcgtcttgtgcactctgtgctccctggatgtgtgttctaggcctggggctgccagtgatggccatcagctcagctcagctctgtctataccattcgtttctgttggaaaaacccgaaccagtaggtattggatggcagctgctcacggcagcctgtgctgccccacctgggacagctgtgtcctgtcggtgcagagccacaggggtccctgtgcagtggccccccnnnnnnnnnnnnnnnnnnnnnnnnnnnnnnnnnnnnnnnnnnnnnnnnnnnnnnnnnnnnnnnnnnnnnnnnnnnnnnnnnnnnnnnnnnnnnnnnnnnnnnnnnnnnnnnnnnnnnnnnnnnnnnnnnnnnnnnnnnnnnnnnnnnnnnnnnnnnnnnnnnnnnnnnnnnnnnnnnnnnnnnnnnnnnnnnnnnnnnnnnnnnnnnnnnnnnnnnnnnnnnnnnnnnnnnnnnnnnnnnnnnnnnnnnnnnnnnnnnnnnnnnnnnnnnnnnnnnnnnnnnnnnnnnnnnnnnnnnnnnnnnnnnnnnnnnnnnnnnnnnnnnnnnnnnnnnnnnnnnnnnnnnnnnnnnnnnnnnnnnnnnnnnnnnnnnnnnnnnnnnnnnnnnnnnnnnnnnnnnnnnnnnnnnnnnnnnnnnnnnnnnnnnnnnnnnnnnnnnnnnnnnnnnnnnnnnnnnnnnnnnnnnnnnnnnnnnnnnnnnnnnnnnnnnnnnnnnnnnnnnnnnnnnnnnnnnnnnnnnnnnnnnnnnnnnnnnnnnnnnnnnnnnnnnnnnnnnnnnnnnnnnnnnnnnnnnnnnnnnnnnnnnnnnnnnnnnnnnnnnnnnnnnnnnnnnnnnnnnnnnnnnnnnnnnnnnnnnnnnnnnnnnnnnnnnnnnnnnnnnnnnnnnnnnnnnnnnnnnnnnnnnnnnnnnnnnnnnnnnnnnnnnnnnnnnnnnnnnnnnnnnnnnnnnnnnnnnnnnnnnnnnnnnnnnnnnnnnnnnnnnnnnnnnnnnnnnnnnnnnnnnnnnnnnnnnnnnnnnnnnnnnnnnnnnnnnnnnnnnnnnnnnnnnnnnnnnnnnnnnnnnnnnnnnnnnnnnnnnnnnnnnnnnnnnnnnnnnnnnnnnnnnnnnnnnnnnnnnnnnnnnnnnnnnnnnnnnnnnnnnnnnnnnnnnnnnnnnnnnnnnnnnnnnnnnnnnnnnnnnnnnnnnnnnnnnnnnnnnnnnnnnnnnnnnnnnnnnnnnnnnnnnnnnnnnnnnnnnnnnnnnnnnnnnnnnnnnnnnnnnnnnnnnnnnnnnnnnnnnnnnnnnnnnnnnnnnnnnnnnnnnnnnnnnnnnnnnnnnnnnnnnnnnnnnnnnnnnnnnnnnnnnnnnnnnnnnnnnnnnnnnnnnnnnnnnnnnnnnnnnnnnnnnnnnnnnnnnnnnnnnnnnnnnnnnnnnnnnnnnnnnnnnnnnnnnnnnnnnnnnnnnnnnnnnnnnnnnnnnnnnnnnnnnnnnnnnnnnnnnnnnnnnnnnnnnnnnnnnnnnnnnnnnnnnnnnnnnnnnnnnnnnnnnnnnnnnnnnnnnnnnnnnnnnnnnnnnnnnnnnnnnnnnnnnnnnnnnnnnnnnnnnnnnnnnnnnnnnnnnnnnnnnnnnnnnnnnnnnnnnnnnnnnnnnnnnnnnnnnnnnnnnnnnnnnnnnnnnnnnnnnnnnnnnnnnnnnnnnnnnnnnnnnnnnnnnnnnnnnnnnnnnnnnnnnnnnnnnnnnnnnnnnnnnnnnnnnnnnnnnnnnnnnnnnnnnnnnnnnnnnnnnnnnnnnnnnnnnnnnnnnnnnnnnnnnnnnnnnnnnnnnnnnnnnnnnnnnnnnnnnnnnnnnnnnnnnnnnnnnnnnnnnnnnnnnnnnnnnnnnnnnnnnnnnnnnnnnnnnnnnnnnnnnnnnnnnnnnnnnnnnnnnnnnnnnnnnnnnnnnnnnnnnnnnnnnnnnnnnnnnnnnnnnnnnnnnnnnnnnnnnnnnnnnnnnnnnnnnnnnnnnnnnnnnnnnnnnnnnnnnnnnnnnnnnnnnnnnnnnnnnnnnnnnnnnnnnnnnnnnnnnnnnnnnnnnnnnnnnnnnnnnnnnnnnnnnnnnnnnnnnnnnnnnnnatcctcctacctcagcctcctaagtgctgtggttacaggagtgagccaccatgcctggcctacacttttttttcttaactgaaaaataatctatgtgtattataaaaataggacaggcgcggtggctcatgcctgtaatcccagcacttggggaggctgaggcgggccgatcacttgaggtcaggagttttgagaccagcctggccaacgtggcgaaaccctgtctctactaaaaattagcgaagtgtggtgtcaggtgcctgtaatcccagccactcaggaagctgaggcacaagaatcacttgaacccaggaaggggagcttgcagtgagccgagatcacaccactgtgctccagcctgggcgacagtgagattctgtctcaacaaacaagcaaaccaaagaacaattctaatagaattgtatcagtcgtctgtgaccgaatagcaaattaccctgaaatgtagttgcttatggcaagtatttttacctgtagcagtatcagtttctgtggatcaggcgtctgaatgtggcttagtggctcttctgttgagtctcacaaaatacagtcatctcagagctccactggggtagaggccagctccatggtcacagatggcttggcagcatccagttcctcagggctgtgggccgaggccgccctcagcattgcaccacatgggcgtctccacagggcagcacacaacgtggagctgagctttcccctcactcttaatgtatttggctctttagacctgggtggctgggtccagcccacactaaaagagatgggggctataaaggcatgaactccaggacgggattgctaggggccccctaggagccacccaccctggaagcacctaaggtgacaatggggctccctgtggtgatccctgttgagagtttggggtatatcccagtaggccttttcctagcattacacataccgatctatacatacaaccacgtgtccttggcagattggaaaacagtggtgctgactcgtgtctgaggccttcaccgctgcctggccaaccaccctactttgttctccatcagcccacagggctgatcagacagacaggagaggccacgttggcgtctgtaggaaacaaggaggccgccctgcctgatgttggcgtcygtaggaagcaaggaggccgccctgcctgagaactggagcccacccatgcatgtgggtgttgtgggctgatggcctgkcctgggtcccaaaggcagacctgagagctaatctggctgctttcttttctccctaaaatactcctgtgagtgtttgctttccctcagtcttcccacagcatgtgaaccaatgctgcagggagtcaggggttgtttctctcttaatcacatttgtcttacctacagaacagccctacattgtcagcaggggcacgttcccatcacggattgcgtgttaatgtttccctagaaaagatgagtcctctgttttcttggtagcaacttccctattttcattagcttacaggactcattctgaataatagcagctacttattaccacatttaaaatatagtatcagtaacatggccacatattcagcatatttcaaaacgtggatcacaggtatagcccagtatctgcattgcatatctgaccattattagccctgttttgaattcctgaagatagttcaatgcagctttaaaaaaaagaaaactctaaccagatctacattttgacgacagaaaaggcagacacaggcttctttgaaatgaagctgttgtctggaatctttctttgtaggaaactggtttagagaaagtcccacatctttttctttttttttttgagatggagtctcgctctgtcacccaggctggagtgcagtggtgcgatcttggctcactgcaagctccttctcccaggttcaagccattctcctgccctcagccaaccgagtagctgggactacaggcacccgccaccacgcccggctaattttttgtatttttagtagagatggggtttcaccgtgttagccaggatggtcttgatctcctgacctgatgatctgcctgccttggcctcccaaagtgctaggattacaggcctgagccattgtgcctggccaaaagtcccacatcttaaaaaaaaaraaaaagtatttgaacatcacagtggtattgaacaacaacgaaagtctagcatctgccagagaagcagcaggacttgtgccctgtgtgcccagcagggctggtcctgctgtttcttctccacactgagggactctgtgtttcccttgtcttttcagaggcagtcaaatgcttctcagactctctgtgacatagttaggctgggcagagaccagggcagtcagctgcaagaggctctggagccagacccgctcctcacagcgctggagtcgtgagtgctggtgggccgtggtgctggtgggcctccctttctgggtcatggggacgtctrtgagccttgctctgagcaccaggatatgttgccacctcctctgattcacattcgaatgaaccccaggttcagagcccatgttaacttggggcctgtttccagagggaggggtctccagaggagtcacctggtgggtctagagagkgggccagcagcagcaggagtgtcctgagaaccctggcgccttgccttgagcctgagcaggttgagggttttgctggggtcctccacggggaggaaggagcatccttgcatcctttgtgtgtgtgtctgctctgccaggcagtgacctctgtgtgtgtccagcaggcaggactgtgtggagcagcttctgaagaacatgtttgatggagaccggacggagagctgcctcgtcagtgggactcaggtgttactcaccttgctggaaaccaggcgggttgggtgagtctcacgaggagaaatcgtgtagagctgaacttgacgcctcagtgatatggcagcccacacgagcagtctggattatgtcatttgtggttttaatttttgattatgcaagtaacaacatggatagattccccttgttgaaggcttgactttatggctgtggccaagtccccttagaccctcatcatcactggtgctccctctccagcctgaagctgctcgtcaygaccagttggcgatgcatttgtcgatgtgcgtggaacaggtgtggttggcaggttttccccaaggactgttccgacaagtccccacagctcccgtgtgtgtttgtgtgtgtgtcgcagggtttccactctgatgcatggttacatatacatgtgtttatctcccatgcagactggccctcacagggcaggggtgtgacactcaccgctgtctcccgtgccctgtgcacccacgggtcggcaccgcctgctgagcgtcgtgctgagcacttttttcccaggcgactctcctccattgccctttctcattcatcaggtgtcatttctgcacccactgtgcactaacacgggcccgaggagacagagaactgagacacagcccctcccctttaattgctcccagtctggcacaggaggcccgtctgtggacagcgagggtgatgcagagtggcgagtgcagtagacatgcacccagtgcctcggggctcacaagaagggacccacatggggctggtgggtggagcctcgcagtcagggacattttccctgagaggccgcatctggtcagacacagctccttggatgaggcagtgagggggtcccagtgtggacacaagcatggggcagtatgtggcagaggagagtggagcttgcttggaggtgctcctttgctgtgaccccacatcgctgtcctsaggtgcagctgtcggaggctgctgagtcacgacagtgaatgggcagagacagaggagtcagcagcagaagagtgagttcgggtgaaagttgagtttgtttgaggatataggtgctggagacccttctctgacccccagtagaaatttcaggaagtgtttgaaactgtttctctggatcatagtgtggcctagtccttccctcaagtcatagaaggctgggcactgccagagccgtycaagcagttgaaactccaaagaggatgcccatgaggcgcaaatggaaagacagccgagtggagtctgtgagrgaggcattggcacaagggggtgtggttggcccgccaggtgcccaggagatcctatagggtgtgtcccaaaagggccacatcagtgtcctctgggcacttcccctcctggcctcaccctggcccttgaaccccatctctggattcaggttccccacatgccggcaggaacctgatgtctcaggacgtttccgtcgtctccgttccatcacaggctgggacgatgtctaactctcccaaggtggccgtagctcccttatttccacgttctggggagaacataattcagcccccaacactgatagcctgtgcttttttaaagtgaaagaaaaaggaacaatgagaaaatgataagaaattgacttaaccttgatagtgaggttgttaggactctctttctctctctctctctctctctgtctgtctctggtagtacctaatacatatttgttagtttattaaccagaagtagtgttataatgttaccgttttctctagttaggcaactggaatattgatattttaatcttcataaacccaggaaagctgagccacttctgaggcccaagcttaaccctgyatgtgatagaggggactgtgtaaaaatcaggaaaacagagataagccagctgtttctcttagattattgtgattattattattattattttcagacagtgtcttgctctgtcacccacgtgggagtacagcagcacgatcatatctcagcgtggcctcagagtcctgagctcaagcgatcctcccacctgtcccccccaaagtgctgggattataggtgtgagccactgcacctggctctctgatttttaaaattattttgcatattactttaaaaaatatatgattacgtattacttttacaactggaaagagtgtttaaataaatatctcagaagacttgcttgaaaacaccacagggggtaggcgcagtggctcacgcttgtaatcccagcactttgggaggccaaggcgggyggatcacctgaggtcaggtgatcgagaccagcctggccaacatggcaaaatcctgtctctactaaaaatacaaaaaggaggctgaggcaggagaatcgcttgaacccaggaggtggaggttgcagtgagctaagatcgcaccatcgcactccagcctgggtgacagagcgagactctggctcaaaaaaaataaaaataaataaaaataaaagtcgacacaggaacagtgaaagagacagggatagcagtgaaggttttaaaagtgggacagagcaggacctctmactggtgctagggccagtgagtcctgtgttgtgtcacttgccctgcctccatattctcggatgtcgcaagcaagcatctgcctgaaggtctttagtrcctttctcttctgcctgtaccagtcaccagatcacgtgtggagacgctgggtagctgcactgctctaggrtttctttytgggaaagtyaaaagggctctttctggaagaagcgggtgcactgagttgctggtgaggttggacagggtcctggtgtccccggtctccatctgctttcctcatccacaggacagagggcttggtggactccttttctcagggactggaaaggtcatacgctgtcagcagcagcgtactacacggcatcgagcctcggctgaaggacttccaccagctcctgctcaacccgcccaaggtaaatggcygtggcgactgctgagtgcctttggaggcgtcgcaggagaggttgrtttgcagggaggagaagccacagcttgtcccataggtagcagagtgtggagtgaatgtgttctaagayggccattcccacacccccacttgagaagcaccgggcaggtgccaaaacacattttcaggactgcccctcccagatctgcaaatgctcatctctgcctctgcaaatgaccccgaggtcaccataagcctggcctccaagttgggggcacctagctaaggggtgctcggctcctgagaggggaccagggggtggcaggggaggccctttgccctgctcagcagcatgttgaggggggtgaggcacacaaaggctcctcctggttcagactgccagccaggcaactccccatcccgtctcaccctccccagacacaacccgacccctgctgcatagcaccctcctgacctatagctcagttcctctcactcgccaccttggtaagatccacctgycccactagcgagctctgtgggggccaagattctgttttgtcagctggaggtttcagtgaagagaaggtaggtgcagtaggctgagtgtgggggatcagaaaagaccgcggtccatcggaggaggcattcccgtcagtgtccccaaagtgtgttcatgggacacttgttagcttggtgttctgagattgtggccrcagagggacccccactgggcatcctcagtgaggcatcgtgccaagggctctggccttagaccggtactgctggccccatcttggacatctcacccgctgaggtgcacggctctctggccctgcaggctcagactggagtgcccgtgagcatcctgggagcactctctgaagccctgaggggagcagcaggctcttcaccccattgatgccttcatttcttctggcagacggccctccctgaggaacccccaccacatacctcgctaccccaggctgggtcccagcctagagtgatgggcatgagcccagagactccagcagtggcctcactgctcacagggcctaactgggtggtgccttctgtgtttgcagaagaaagcgatcctgaccaccattggtgtgctggaggagcccctggggaatgcccgtctgcatggcgcccgcctcatggcagcactgctgcacacaaacacacccagcatcaaccaggagctctgccggctcaacacgatggacttactgctggtaagtgggcccctcagccagccctgcatgtctgtgagtgtgccgggcatggcctgtggacttgtcaggagcagcagagcagggccccagcatttggacaaagctctgccacggggaggttccagtcccaagtcccaaggctggactacaggtctctggcggggcacagagcagcagtggggtgtgtctcagctgcaggctcatgggaagtgacgagtctaccgtagaattgccctgaaagcagaaggcggatttctaacccggtttgatggaatagagtgacacgtctacctcctttctcatgttctgactgaacaacatagaacttacacggtggttattaggtataaaatggctaaaagagaagctcctgtcgtccacagtagaaggccaacctggcagtttttgtcaaagccagcgggcagtgcctctccatcccgcagacggcttgcatgatgctccaggtggctgaggagaggaaggggcaggcggtgctggcaagtagtgccagtgagcagccctggctgtgggtggcgggctcctctgcggagagcatgasgctgctcccctgagaacgaagggcactgccctagtgggtcctgttggcagacgcagcccccgtcttctgcctggctctggggctctgctggaatctccctgcaatcttagtcccagaactgggctcgaagtgctgtctggctcagttctgtcagcgtgtggaaggtctgtccgcgtgtggaaggtccgtccgcgtgtggaaggtccgtccgcgtgtggaaggtccgtcagtgtgtggaaggtccgtccgcgtgtggaaggtccgtccgcgtgtggaacgtctgtcagcgtgtggaaggtccgtccgcgtgtggaacgtctgtcagcgtgtggaaggtctgtccgcgtgtggaacgtctgtcagcgtgtatgagttctgggcactgctttggctgtgagatcccagtctgcatcagggaagcaattacaaaagagacctactttccttttccctcttcttcttttttttttttttttttttttgagatggagtctctctctgtcgccaggctggagtgcagtggcgggaccytggctcactgcaatctccgactccctggttcaagcgattttcctgcctcagcctcccgagtagctgagattacaggcatgcgccaccaygcccagctaatttttttttgtatttttagtagagacggggtttcaccgtgttggccaggatggtctcaaactcctgacctcgtgatccacccgccttggcctcccaaagtgctgggattacaggcgtgagccactgcacccagccccttttccttcttcaaaagaattctgtcttccactttcttcctctcttttatatttactgtggtaaaatatcataacataaacttggctgttttaactattttaaggtgtgtcactcagtgcattcacaatcttgtatagccattaccattattcacatctagaagtttttcattttcccaaacagaaactctctccgttaaacactaactccccattcattctccctctccacagtctctggcaaccaccattgtctttgtctctgaatttgactattctaggtacagtttatgagtggaatcataaagtattatctttttgtgactgacttatttcacttagcactatgtgcccaaggttcattcagtattgtactgtatgtccaaatttccttcctttttaaggctgaaaaattactgtgtgggtgggccacattctgtccattcatccatccatcagtggagacttgggttgcttccagccttggctattgtgaataacactgctgtatatgtgggtgtacaaatacctgtttgagtccttactttcagttcttctgaaagtaagaagaagttcttctggataaatacctatgaggccaggtcatgtgacaattccatgattaagttttgaggccagacctttccacagtggctgcaccattttatcttcctgtcaacaaagtctcccctttctcctcatcctccccctcatcccgccgacacttgtcttccttcttctgatgctcgtcatctgatgtgcgtgtggaacggtgtctccgtgtggctgatgctcgtcatctgatgtgcgtgtggaacagtgtctccgtgtgacaagtgatgtcgagcatcttctcgtgctttttggccatgtgaatagcttcgttggagaaatgtctattcaagtcctttgaccatttttgaattgagttttttttttgttttttttttttagttttagaagttctatatatattctggatattaatcctttatcagatatatgcaaatattttctttgggttatctttttacataaaaaattttttttagatgtagggtcttgcagtacagtgatcatagcttcctgtaaccttgaactcctgggctcaagtgatcctcccacctcagcctcctgagtagctaagactgcaggcatgcgccaccacatccagctaatttttatattttttgtagagatggggtctcgctatgttgatcaggctggccttgaactcctgacttcaagtgatgctccggccgtggcctcccaaagtgctggaattataggcgtgagccaccagccacccagcctttactccttgataatgacctttgacacacaagttttaaattttgatgaaatccaattatctttttttctctgttgcctgtgctttcggtgtcatatccaaaaaagtcattgccaaatcagtatcatgaagcttttcctctatgcttccttcaaaaagttgtatgttttctctcttatgtttaggtctttratccattttgaattaatttttgtatctggtgtaaagtaagggtccagcttcattcttttgcatggggttatccagttttcccagcacttgttgaaaagactgtcctaggccgggcacggtggttcacgcctgtaaacccagtattttgggaggccaaggcaggcagatcacctgaggtcaggagtttgtgaccagcctggccaatgtggcgaaaccccatctctacaaaaaatacaaaaattagccaggcatggtggcrgcgcctgtaatcccagctacttgggaggctgaggcaggagaatcacttgaacctgggaggcggaggttgcagtgagccaagatcacaccactgcactccagcctgggtgacagagcgagattctgtttcaaaaaaaaaaaaaaaaaaacaccgtcctttcccccatgaatggtctcggcctaattgttaaaaaccagctggccggccgggcgcagtggctcatgcctgtaatcccagcactttgggaggctgaggtgggtggatcatgaggtcaggagattgagaccatcctggccaacatagtgaaaccccgtctctgctaaaaatatgaaaaaattagctgggtgtggtggcatgtgcctgtagtcccagctacttgggaggctgaggcaggagaatggtgtgaacccgggaggtggagcttgcagtgagccgagattgtgccactgcactccagcctgggcaacagagcgagattccatctcaaaaaaaaaaaaaaaacagctggtgatgtgtgcaaaggtttctttctggactctctgttctgtttcgttggtttatatgtctgtccttatgccagtgtcgcactgttttggtgactgtagctttgtagtaagtgataagtgtgagttttccaactttgttctttttccagattgttttggctattcaaagtcatcccgtgagattctgtatgaatttggggatgggtttttcaatgtttgcaaaawtgctgttcagattttggtagggattgcattgaatttatagatcactttgggtaatactgtcttcttaacaatattaagtcttcaatccatgaacacagatgtgttcctatgtatttatttatttatttctatttttgagacagaacctcaccctgttgcccaggctggagtgcagtggcgcaatctcggctcaccgcaacctttgcctcccgggttcaaacaagtctcctgcctcaacctcatgagtacctgggattacaggtgcccgccaccacaaaataatttttgttttgttttgttttttttgagaccgagtctcgctgtcgcccaggctggagtgcagtggcgcgatctcggctcactgcaggctccgccccccaggttcacgccattctccttcctcagcctcccaagtagctgggactacaggtgcctgctacctygcgtggctaattttttgtatttttagtagagacagggtttcaccatrttrgccaggacggtctcgatctcctgacctcgtgatccgcccaccttggcctcccaaagtgctgggattataggcgtgagccaccrcgcccagccaatttttatatttttagtagaaatggggtttcaccatgttggccaggttggtctcaaactcctgacctcaagtgatctgcccacattggcctcccaaagtgctgggattayaggcatgagccaccgtgcctggccccatttactttaaataggtctttaaattcttgtagcagtgttttgtagttttcagtgtacaaatcttttatctccttgacttaattcttctggatgctgtcatatataaaattgttttcttactttcctttttggattattcagtgctagtgtatggaaatgcagctgcttttttgtgtgtcaattttgtattctagaactttgctgaattcatttattagctctagcaatttatctggaatatttagaattttctatgtgtaagatcatatcaggtcaggtgtggtggctcatgtttgtaatcccagcactttgggaggcctacacaggaggattgcttgaacccaagagtttaagaccagcctgggcaacatagtgagacctggtctctacaaaataaataagaataaaaattaggcaggtgtggtggcacagatctgtagtcccagctattcaggagactgaagagggaggatcacttgagtctgggaggtcagggctgcagagccgagatcacgccactgtgtgtacttcagccagggcaacagagcargayccttgctcaaaaaaaaaatacatattctaaaaaaaaaaatcatgtcatttgggaacaaagataattttacttttgcctttaccatttggatgccttttatttctttttcttgcctaattgctctggctrggactgctaagagaagaccgaatagcagtggtgagagtgggcatccttgcctcgctcctgatcttagagaagctttcagtctttcagcattgaatatgttgtcagctatgggcttttcataggtgcctttatcatactgaagatatttccttctattcctagtttgagtgttctatcaagaaagtatgttgaatttttttttttttttgagacagagttttgctcttgttgcccaggctggagtgcagtggcatgatcttggctcacggcaaccgccgcctcctgggctcaggcgattctcctgcctcagcctcccaagtagctgggattacaggcgtgtgccaccatgcccggctaatttttgtattttcagtaaagatggggtttcaccacgttggccaggctggtcttgaactcctgacctcaggtgatccaccctcctcggcctcccaaagtgttgggattacaggcatgagccaccgcacctggccgtatgtggaattttatcagattttttttgtatgagttgagatgatcatttggctttcgtcctttatcctgttaatgtggtgtattgattgattttcatacgtcgatccatccttgcatttgaggagcaaatcccactttatcctggtatataattcttttgatatgatgctaagtttggtttgctagtattttgcatccatgttgataaggaacattggtttgtagttttcttttcttgtagtgtcctcattcrgctttggtatcagaggtaattctgtcctcacagaatgaattagaaagtattctctcttagttttttggaagagtttgagaaggattagtgttaactcttctttaaatgtttggtagacctcatcgccaggaaaggaaaaacaaacaacaaaataaatgtttggtagaatttaccagcaaagccatctggtacgggctttttgttgagaggtaggtctgactccatgttacagatgaggtgacacaggaaagcctcctccaaggttgctcaaggtcacatgggcagagaaggtgaagccaggatttaggactacgtttctgtggagaacatgaagcaaatgagcctcctgcctttctctagctccaaccccactgtgtggaacgaggagcccaagctcgaatcctggtgtggaatatacacctcaccccattcccctctccatacagtcctccttctccatggaggcagaagagggtctgggacacaggctgccgtggccctggaatgtaagagacggcagtggggggcgagtgcgtcagacctatgtccccctctctgtcctcatctggaagaagctacatgggaggtgagagatggcagctgtcctcgttcagccacctctgtcccccaggggagtatctaggtggccagaaccwcctctgggcttcagcccatgctggttaagtctgggctcccttggggagtgtctgaatgtgcccctcacagtctcacgtttgtgtggtggacgatatgcacacgcctgcccatcctgggtggaatcctcatgtgcttgagagtctaacacacttccaataattcatgagaaagacagaatcataaaggaacttctcacatacttagaactgaagaatcataaaaatactacttagcaaaatgtgtagaatgtagttmaagttgattgtatacagggaaatgtagcctttaaagacagactggaaagaaaggctgcaattaatgagttgagcttccaactgaaggacaaaagaagccaggcctggtgacttatgcctgtcatcccagcactttgggaggcggaggcgggcagatcacctgaggttggaagttcaagaccagcctgaccaacatggcaaaatcccgtctctactaaaaatacaaaaattagctgggcatggtggtgggcacctgtaatcccagctaccagggaggctgaggcaggagaatcacttgaacccaggaggcaggggttgcagtgagccgagatcgtgccactgcactctagcctgggagacaaagcaagactccgtctcaaaaaaaaaaaaaaaaaagaataaacccgcagaaagtagaaaggtgatgattcagattgaagcagagaccaacagacacccacaggcaggaggcagaagtgctcagtggctatttgaagaagctccgtaatagagagatgaccctsaggaaaacgcttaaaactccttcctagctacccagagactggacttgtgaggagttaggacgccacctttaggaagggtttccctcagctttgtggtgtagccggcaggagaaaaccgatctaagaactgtcttctgtcctctgtttacccaggacttgttctttaagtacacctggaataactttttgcacttccaagtggaactatgcatagccgctattctctcccacgctgcccgtgagsagaggacagaagccagcggatccgagagcagggtggagcctccgcatgagaacgggaaccggagcctggagactccccagccgkccgccagcctccctgacaacacaatggtgacccacgtgagtccaagaagcatccatcttatcagcgccaactgcgccccactcagaccgtgtccatgtcagcgctgacgtgtgccggacctcactgtgcagctgacacrggggcagggctttgaaaagggtccccaggtgtctggtcagacgctcgtagacagtggggcttgagtgggtcttgcagatctcattcctacctgccttcagcaggggtactggtgccttccacgtgcaggcctggcaagggttagcactggatgagatgagttcagtctggcctccagctggaggcccagggaataaatgcccagggagccagcagtgtcagtgatgggagccacacggtggggaggggatgctgagggacatgcaggccaaccagggactgtcacccggatagcaaggccacaggtatatcgtagtgtgaggtggagcccaggaaaaacatctcaggtacaagaagtgatctgtgtcagggcctggaggtgagagaaagtgctgagggcagacagccctagtcgttcttccggacacagagaaagagggcaggagagtggccaaagtggagggcaatggagagacggggagaaggcccaggggaagacaggggtcagggggcaattccaggagttggaggagaagggagagggtccttttctcgggcttcatctttagggcgctcagcagtatgagccccgaaccgcaccctcctctggtgtttggtgaggaccgcggagrctggggctgtgcgtgcgcagcagtcagggcctgcaaagtccacacagacgtggccgccagccagccctgcccaktccagggatgggtggaggggtgcgtgccgccttcagaccctgactcacgctgtccccctgccccgccccccagctgttccagaagtgctgcctggtgcagaggatcctggaggcctgggaagccaacgaccacacgcagtaagagccgctcggacgtggagggacccagcctggccagtcagggatgcagagacgcacctcacccaagccctggtgacgctgcgtgcaggactgcaggatcgggtggagtgtagggtgtgcgacgtggctccacgttctggggctgctgtgcaagggrcccttctactgggcggacagctgcaaatgctacttggggaggggacacagggagccgacaggaagcggtcccgtccccaccaggcacctgctstggcccccgcccagcctggctttgccctcttgtgggtccgctgtccgttcctgatcttccccaggaactcgggccctccgtcagcactcgcacacagggacgcgttattttggtctttccatcttctgcttaatgggtgctccctctggtcaggacacatgtcccgcttattgtcgtgggcccagagccatccccacccgtttgctgtcctgctgggaactgtctggctctgggcgatatgaggagggactccagggagctgggaggggtctgagtgcagctgtggggaagcagaggccgagctgggctgtacagcatggaggtcccgcccaaccctccccttggggtgctgagcctgagcttggtagctggcagcatgggctcacctcctgcgccactgctgccaccagcgggacttaggccacgccacggcctttctgcctccatttccctgtctgtaaaatggagtgagagcagtgtctgtttcctcatctgtctcagtggcacttttggtagtgaggttggggtgagcctgctgcacgtggcaggtgctactcaaacagaagtgtcctggaggagggcagggggcgcggacactgggcaggggccgggcatttgctctggaggtgaacctggaggagggcagggggcgcggacgctgggcaggggccgggcatttgctctggaggtgaacctggaggagggccgggggcatggatgctgggcaggggccgggcacttgccctggaggtgaacctggaggagggctgggggcgcggacgckgggcaggggccgggcatttgctctggaggtgaacctggaggagggctgggggcatggatgctgggcaggggccgggcacttgccctggaggtgaacctggaggagggctgggggtgcggacgctgggcaggggcmgggcatttgctctggaggtgaacctggaggagggctgggggcgcggacgctgggcaggggccgggcatttgctctggaggtgaacctggaggagggccgggggcatggatgctgggcaggggccgggcatttgctctggaggtgaacctggaggagggccgggggcatggatgctgggcaggggccgggcatttgctctggaggtgaacctggaggagggccgggggcgcggacgctgggcaggggccgggcatttgccctggaggtgaacctggaggagggccgggggcatggatgctgggcaggggccgggcatttgccctggaggtgaacctggaggagggccgggggcatggatgctgggcaggggccgggcatttgctctggaggtgaacctggaggagggccgggggcgcagacgctgggcaggggccgggcatttgctctggaggtgaacctggaggagggccgggggcatggatgctgggcaggggccgggcatttgctctggaggtgaacctggaggagggccgggggcgcggacgctgggcaggggccgggcatttgctctggaggtgaacctggaggagggccgggggcatggatgctgggcaggggccgggcatttgccctggaggtgaacctggaggagggccgggggcgcggacgctgggcaggggccgggcatttgctctggaggtgaacctggaggagggccgggggatggatgctgggcaggggccgggcatttgccctggaggtgaacctggaggagggccgggggcgcggacgctgggcaggggccgggcatttgccctggaggtgaacctggaggagggccgggggcatggatgctgggcaggggccgggcatttgctctggaggagggccgggggcatggatgctgggcaggggccgggcacttgccctggaggtgaacctggaggagggccgggggcgcggacactgggcaggggccgggcacttgccctggaggtgaacctggaggagggccgggggcatggatgctgggcaggggccgggcatttgctctggaggtgaacctggaggagggccgggggcgcggacactgggcaggggccgggcacttgctctccgaagtgaacctggaggcctctgccacttggctctctgggtcgtgggtctggcaaggtcggggccaggaggccgccccgatggtgcctgttgctttcagggcagcgggtggcatgagacgtgggaacatgggccacctcacacggatcgccaacgcggtggtgcagaacctggagcggggccctgtgcagacgcacatcagcgaggtcatccgaggtgagcccccaacccggtcatccttctgctgrtcgygggcaccgggrcccygaaggagctgccgcctgagactaagctctgcccggcagcaggtgctgactgcactgrcagtgagagacccatggccacctctrtcctctcacttcacacatcacatctctcctcgtgggggcctgggtctcaygtgtcagttctattgggcggacttctgtggagaccctgccaggcgtcagcgtgtggcacaagagacagtccctcccggggtagttggtgactccggagctggcactcagaagccgttagcgccaccgggctccttgcagctcagggagccctgcctggctaggctgtcctggctgtgtgctctgcactcaggtgattggagagtctcattctcactcaggtgtgagatttcgtagcacaagtctcaggggagcaggttgcagcctgtttcttaagaacgcagtgggttaggtgggcgcaggcacagcacatgtgtggcagaggcgggcccagctgtggcctctcctccctatacccgtgtaaggtgaggaagctctggatagtcctccccgcaccccaggaccatagtgaggggactcctgggttgggctccattagcccctggcgaggtcaggcctgccggctgccatcacaaataataaaagcagggcaggaggagcttccccacatcctggagggcaaagtagatgggtggaggtggaggccagggacagctccccagggcaggggcagtttaaggaggcgaggggcaagcaggaagctgttggatcattccatacgatctccagattgtgaatccttccaggactctgacctctccggaaaaacaggcaggacacgcgcccaggcctgtaggctgctgctgagtttgggcctgtgaggtggggggaaggaagctggctgctttctcagattctgttccacggcttctgcgtttctgggagttcctcagaatgggcttccacccaacagacttggaactcagatgcccactggggtttcggtaggggcagaagtgcccaccaccctgcccacaggkgctgcacctcaatctcactgtggccccaggcccctccggatacgcggctatgctgcctctttctcatccggcaaagcccctgcttcaggccctcagacgggctgaccacagtagcagcgccccatcctcccggacccaggatgcacctgccggagcccccgggtgccctgcaccatctgcacggggtctcccagggctcaccaggcagcacttcccttgcagggctccctgcggactgccgtggccgctgggagagcttcgtggaggagacgctgacggagacgaaccgcaggaacactgtggacctggtgaggaggctyggggcygccccctcggtgcacgcacggtgctgggaygccgtcagacgctcctgcctttgccctgaggcagaggccaagggaggcacaagggccgcacgcctgcctgctcctcttgactatgcggtgcccctgcatagtgtgtcctccgggctgatgtccgtaacagagaccccgtcctgtgccacacccagggctgggtctctgaggacctctgtgcagagccggtgttggcctcaggtccctttcctcccactccaggagctgtagcttgttggcagagggctccttttgcctgagacccacaacctgccccctgcacatggaggtcgggctgtcacggggccttggcctcacctaggcacctccttacacagcacggcctcctgggcccagagatctgatgagtgatgtgctgggtggggtctgggagccctgggctgggcatggtcctgggcgctgggctgggtggggtctggggcgctgggctggctcacacgcccaccccatctggcctgtgttttaggtgagcactcaccaccttcactcctcaagtgaggacgaggacattgagggtgctttccctaacgagctgtcccttcagcaggtgagggcgtggccggcacctgcaccctgccgggcccttcccggcacctgtgtgcgctgcgcttggtcctccagacgagtctgatggcatctcactagcaaaggggagcgggggctcgtctccgagcacgtatggggcggggtgggtctgaagggagaaccccaaagtcactccaccttgatgagagcactgaggacacggcagatggactcgaaagtcagagaatatggggcgtatctcagatgtgtccgcagcgagcgcgcagcctgagttttggtagaatcgtgagccctgaacagagtttactgcccacttgtgctggaggagaagctcccgaacaactagagagattgtggttcccaaagagcagcctccaggcctgatgcctcctccatgaccggtgtctgtccgtccctccctccctccctccctcccaggccttctctgactaccagatccagcagatgacagccaacttcgtggatcagtttggcttcaatgatgaggagtttgccgaccaggacgacaacatcaagtgagtctacttggagcgcactctgcacgaggcgcggctctccccgctgctgagctcccgtggaggcagctccctgaggtcttgccgggagtgccgtctgatgtccccgggagacagcaggtgttcccagttgtgtgagggtgctgaggcccccgatgagcaccgggggaggagcactgaggccccagatgagcagtgggcccggaggaacgctgaagccatcccccttgctcttgcagtgccccgtttgacaggatcgcagagatcaacttcaacatcgacgctgacgaggacagtgtgagcwagccgggctgtgtggggtgcsgccacccttttcccaggcagctcaggccatgcccatggctcggtctgtcatgggcctgtgcggtggggctgggagaggcccctctgtggagctcggaacagtcgctttccttgcccctccccgtcctcccctccagcccggggctcccacatcccgaactaagcccctstgggagctctatggggagagcggctcctgtctcccccagaccctctggaaactcaccttggcgttttactctgcagcccagcgcagctctgtttgaggcctgctgcagtgaccgcatccagccctttgatgatgakgaggacgaggacatctgggaggacagtgacactcgctgtgctgcccgggtgatggccagacccaggtgcggggcctgcccatccccacaaagyctctgmcgaggaggttcagcccccagaacacctgtcagacgccctgtggttcgttagctggcttgcagagcagccacacctgtcctgccagctctggggcccaatgcagcgggtgaccctaaggagcccagagctgaggcctggagcgtctcgtgctcctctctcgagacgatctgtgctcaccctcagccccgagcctggggccgccactgaccctccatgttaggcgtccgtcctgggccaccagacatctgactctgaatctcccccaggtttggagccccccatgcttcagagagttgctcaaagaatggcccagagcgtggaggccaggatgggaaggcgagcttggaagcacacagagatgcacctggggcaggtgccccacyggcccccgggaagaaggaagcsccccctgtggagggtgactcagaaggtggtgctgggcgccaggggctggsagtgtgggtatcggggacaggacatggyaccccggcctgggtgttgtggaggcttcatttggagctgaggcatttggggctcactgtggcccggagcctgaatccccagctatttcccagccgtcctgagtaggggtctgtgctgcgctgtgcccagcgcaaggtggcctcctgcccctgccttgcagttgtggtcactcagccacgttgccaaggctggtgggtggtgtccacctagtctccatcgtccgtccagcccccacacagtcaggcacaggcctgacgccctccccagcacagcagcacaggccggccgccaccttcatggccgacatctatggcaggagccagtccacctcacaggccgcatggctgatgagacccctctccttaccctgccctgggggcagcactgaggcactcaggactttggtggcgggggcagagatctctgttaggaggggctgagctcttcgctgacagagcaagggtgacaccctggggaagcaggaacatcccagataggaggaagacaccccatcctcgaggccaggaaggggccagtggtgctcggtgagctgccggctctgtgggttgcggtcctgggtaggacagggcagtggcatcacctccacactgtcagtgtcagtcctgctggaggcctgggggccctcaggcacctgactgagccccaggtcacacgccccatgggtgtcggcagcttgtcaggaccctcgagctgtcccctgttgctccttgaggggctgacgggcactgcctgggcctccctcctggagcagccccatcttcctgtcaacctctgaggggctcccggggcaggggcgctgcctcccctttgcctgcagcaccccaggsctgcccacgcctgaccactgtgtctctcccccagcaggcgccatgtggacggcagtgtttgatgagccagcgaactcaacgcccacagccccaggagtggtgarggacgtgggttccagtgtgtgggcagctggcacctcagctccagaggagaaaggctgggccaagttcactgacttccaacctttctgctggtaacaaatgcgctggcaggagggggctgtgccaggaagtgcctgtcagggccaggaggcacctgtcccccaggactgatcctgtcctcgtccttgtatgcagctccgagtcagggcccaggtgcagctctccggtggacacagaatgcagccatgctgagggcagccggagccaaggccctgagaaagcctgtgagtaggagcagtgcaggcggcacccagccttgcccagtttaaggcctgaggccagctggcccccstccttgggggcagtgggaggaggtggccggggcctcgcatgctgctacgtctctggtgacattggggtttgatacagcaatgggactggagcagccacgtgtagatggggaggcccccagaggggaggcagcaaggccattgggctggctctgagcctggtctgagtaggtggcacagctcaggtctgcaccctggattccggacagcagcactgggaccccagcattgagatgtgtgtgggtgggttgttggcaggaagctgttctgtggcctgatcagagcccctggcccccagccccctagtcaggctcagaagctcccccagataaggctgagagctccaggtgagtgacagctggctcccaacactggtgtccccrgttttggggtcctttgggcttaaaggagctgtggcaggaccacacgaggcggagtgggcccctccctgagcctctgcgtcctcctgtgagaccagggcatgtgtccctgtatcatgggggaggcaacagggttgtttgtgtggagaccccatggcaggtgcgtgagcctgtctgcctcatcatgcggctcccacacaggcacatgtgtgcaggcaacaggctgcatgtgagagggccacatgtatggggaccctatggctggagtggccgcaccctgtgacccctcctgcctcactggacagcacaggcctcctactttgcagtcagcccggcttctccatgtgcctggaacgtgtgtgtcaccaggaaggcccccctgctggcctctgacagtagctcctctgggggctcccacagcgaggatggcgaccagaaggcagcgagtgccatggatgcggtgagcaggggtcccggccgggaggcccccccgctgcccacagtggccaggacagaggaggckgtcggcaggtgtgtggggcgtggcgggggcgggcctgccgggtgcatagggcgtggcttccaggctctgtccccaggtctcagctcccctgagaggaggtgaggccaggccagggtcttctccacactgcctcccccatggccccgtgacccttcagaggctggctgaggcggcggtggtgcccacgcgtttacgtggaggccrgatgggagaagtgtggggccttctttcgtggacagaacatcgtgttctctgttgtgagtggttaagacaagaagacagggcctggatgtcccagacagtcccccagggacttgggggagcagcccctaccccagatcccagttggagagaacagcccagctcttggggctctgggcctggctgagccgcctgggatctgggtaccctggtggtcggggaggggcacagacttttaagtctggcaggcgagcgggcatctgtggggctcacgcagacctcrcctgctgctccccttccacgggaggcctatgattccgagacgcctcagaagcaggatagtaggatggggggcggcggcctcaggactgcactgggggcatccaaatcctgactgagagttggaggcagcttgcaggctggcagaggcccaggctcccttgagcccccaagagccatccctggggagagagtggagagggaggctctccctgtgaggaggttggaggctggccggcccctccagcaagctgaaccccatccgtccccagggccacaggaaggtccctgggatccttcagtaaacagatacctctctggcctctggggtcagggcgtgggttagcaggagggcaggaccgctggggtagatgccagggccaggtaaacctgagggggagggtaggactgggcttgacgtggggaggagggcgcacccagcaacggcacagctgtgcaaagaccctgaggcctgagctcccagtaggtccaggcaacagtggggaagtcctcgggctggattcctctaggaggggacaaggtgcctttcacatctggtggtgcatcccagtcactcctggctccatggttgtgaagggcctgcctggagcggggtgagggtgtcccccagcctcaccgcccaatgcagctcagcctgcatgcgtcccacctgtactacccttcccccacaggtggggcaggcctgacacctcagagggtcctgctcactgacccccggcaatcctggagagtctgtgtggtactggggctccgggcatctcccccagccaagctgcaagctcagcaccaggctggctctccccgccctgttgaccagcaggccccgtctgtgytcacagctcctccccttgtttggccaccctgtcttcagggcatctgcagcaagtggggggcacagcacgggaaacggggccaaggccgtttcccgatgccggcagtcactgggaagcccaggccagagcccctcgggttgaaagtcatacagagttcctgtgtgggcttcattccttcttaaagtttagtcactgaaatttttgtttgtttgtttgtttgagacagagtcttgctctgttgcccaggctggagtgcagtggcgcaatcttggctccctgcaacctccgcctcccgggttcacgccattctcctgcctcagtctcccaagtagctgggactacaggcatccgccaccaccaggcccggctaattttttgtatttttagtagagacggggtttcactgtgttagccagtatggtctcgatctcctgacctcatgatccgcctgcctcggcctcccaaagtgctgggattacaggtgtgagccaccgcgcctggcctagtcactgaaattcttaacagtctttaccctgccaggcacagtggctcacgcctgtaatcccagcactttgggaggccgaggtgggtggatcacctgaggtcgggagttcgagaccagcctggccaacatggtgaaaacccgtctctactaaaaatacaaaaattagccaggcgtggtggcaggcgcctgtagtcccagctacttgggaggctgaggcaggagaatcgcttgaaccggtgagccgagatcacgccactgcactccggcctgcgcatgagagagactgactgtcggcaaaaacaaaaccaaaacaaacctttacccacttctcctaaacaacccctaaaaaactgctctgaaaagcagggaatatcattgtgcaaagtaagttgtttttttccacggggcygtctgcgtaaaacttgccacttagagccctgcctgcaccgtcgtcacggcccagcctgcaggtgagcttcctcgcgcccccgcctgacctgagtgcccytccctsagtcagacacagtgtcgtcgccctgcaggaagccagggggcccgtctgctgctcgtggccaggctgggccttggggtgcccgaccccctccagagcaagccccttagatgcccggcagggtcctctctaccctcccatcccctgggaggtttccccasactgtgtccagtgtgaggctgaagttgagatcatagcacaggaggctctggggtccttgaagaatgaggcgcttgatgatgagcaggatctgagtgctgcctggaggaggtttgaggtcatcaatggacaggcagcttgtcccagtacttggaacttggggcagcagagctrcctagctgggcacaacctgggccaccccacaaagggcaggagtgagaggggccaaagatggtgctcccaggccgcctggacctttttgtccagctggtccttgggcatgaggcggggtggcactgagggtgggggtgcccgtaaccggagtccatgtttgccacacagggtcgggtgtgctgacagccggctgttaagccctgcctgccccgcgccaaaggaagtgactgctgccccagccgtggctgtgccccccgaggctactgtggccatcaccacagcactgagcaaggctggccccgccatacccaccccagcagtctcttctgcactggccgtggcggtccccctagggcccatcatggcagtcacagcagccccagccatggtggccaccctggggacagtgacaaaggacgggtgagcaggttgagtgtgggggtagggggtgtggacagggcccrcagcccgcacggttccaaccccaccccattcctgcaggaagacagatgccccgccagaaggagctgccttaaatggcccagtgtgatgctgctgccgcccggccacggcccaccctggtcaggctgcctccttaatcgagaaaactacctggtgatgcaatctttttttttttaatttaatttaattttaaaataaatgctgcattggtaaagctggcagttgaaaccagttggacggcccagcttgcgtctcttctgcctgagtgggcctctcaggtcactcgtgccctgctggaggacagaggggcacctcagccgcccccaagcccagagcacagcaataaggtcggcctgcaggagccggggtgggggtgggggtggggggggcaggaccctgagatgccaccaggacctgatgggccaggaagggcgtggacatggaggctgtttttacagtttttttttkktgttgttttgtttttaaagaatacagaaggagccaagcttttttgcactttgtatccagctgcaagctcagggcagagtcaagggcctgggttggaaaaacctgactcacaggaatgcataattgacccttgcagctacccaatagcccttggagctggcactgaaccagkctgcaagatttgactgccttaaaaacacaaggccctctaggcctggcagggatgtccctgtgcccagcacagggtgcctggcagggggagaccacaggtatgcaggtggggggacatggtgtggcactrggggctcgaagactggtttctagcactaccggtcacggccatgtcgtcctagaagggtccagaagattattttacgttgagtccatttttaatgttctgatcacctgacagggcaccccaaacccccaactcccaataaaagccgtgacgttcggacaaaccgcgtactgtgaaccttccggccccaaagccccggcccggccaggggtgggagagtctcctccagcacctcttttgtgggcccgccaccccccagcgttatccccgtgtaatgggtggaggcggaacaggccacatcacggcatcaggtctctacagcttagcaaatactgacatttttccgtttgggggatggggggaaccacttcrcctaacgctcaaacacatcaaccccaggacttccttttgtgccagctccccctcccagaagcctgggccccaccttgtcctcagtggctgagtgggaggggcaggtggagaccagacccccaccccgccccagcgagcttgtctttccaccacggttgggggtggagggaacccgctcagctccccagaggccgagtctctgccccagctacacattgagtgccttgttctcrccgcctaccctgtgcctggcatttgtcctctccccccacagacgtggaacagggagggcagggtcctttctccccttactctgacctgtgggttttccaggtgccaggaacttyggtcaggcgccatctgtccggcctgagggaagacctggctggtttcagtggctcaagtgagcccaccctcacatctcgcccaggtgtcccaacaccacctgtggggtgggggaggtggcgggaccatgctgggcctgacagggtccaaggccatccttggcttcaacgtcccaccaggggagggtcttggccccccacctgccagcactgggccctgcctctgcagctgtcatcagaaccttcccctcacccacacctgctgctcgcctcccacctgagaggaccacctgagggacccagcctctagccaggttctctgcccctcaccagcccctctggccaggtcaccagctgccactctcagatgttctcttggcctttgcagcgtctataaccctccccaccttctgctcctgcacccctggccaggcctcgtcacaggcaaggacacaacagctcagcaggtgaagccctgggcctggtgggactcaggtttgaataggaaaagagcagtgaggggccacagtgacaccaagaagggaaggacgggggccctctgagaccccagggaaaggacttttggggcagaattcccaagaactgagagggtccatcccccatgggcgttggccccttactctgccagatgctgctcgttgcctggcaggagccagatgtggtcaacctgcattcccctgggagcccactgtcccccccccccccccgcctccggcctccatcccttcagctcgggtctagccagaaactgacgtccacctcaagtgtcctctggacctgcaacagccttctggggtcaaatgaccacccaccctttcacccccaagcctctgtgaggtcagcttctgcatcccctgggtagggatgggggcttcctctccagccgtgccggcccctagaccagccctgaggcgtggagggaatcaagcaagtccccagtgaagcctcctgctcgatccgcccccagagcaaagtcactcccagggacatgcaggccgagctgggtggacccaggcaccaggagaggctcacgagaaagatgccaacctcccgccaggtgggcctggataggggcagatgggaccctctgggtaggccgagagcaggcagccggggagtggggaaggcaggcacaggagcgtggcgttagttctctctttatatagactctggttctagaaactcgcctgcagccgctggctggaccagcacacgctgacggggccggactatttacaggcccattgcgggctgtaccttggccacctcccggcacggtgctcagctgtgacgccaaaataagttagggccggccgggcggggcggggcggggacgggggctgtacacacaagtgctgggggctcggggcctcaatactgtcgagggccggggctgtaaacatggccggggcggccctgcccacccctagtggtcggtaacgaccggaagcagagcagccgggcagggctgggaggctcaggcgtccgacaggcagctctggatccggtccacccactgctgggccgagggcacgtcctgggcacagaagttgtaaacgcgacgcgttgtcttcacctggggaagggcgggttactgactccgcagcccccacaccgcagagcccctcccctctcccaagccccggccaaggctcacgtcaaagaaggccttctcgtccacagtcttaggggcacccatagtgggcgtgccaggtgccacagcctccacctccgccaagtcgatgacacccttgcactctgtgtccacacggtggtcgtagtagcgcagctggaggaggccacagagtcagcggagccccctcccccgtgagtcccccccaccacctgatcactcacctggtgcttggtcttgtccagcacgaaccagcgggccttccaaggcttcatgaaggcccccttcttgtacagagtgccctcgtaggacctgcatttccagcagaaccagggccaggctgaccgtcatggcccagccaagcccaggccccagcagtcgtcccccccttgctgtcccagcccaggaggtaagaccaggcaccctgtccccagaactgacctaagcccagagcactggccagggggccacaaagaagcctttgatggggggccgcaggcccaagaagacgacgcccagaaaggagacagtgaagggcgcctcacaccctccagactccagggagcatccccacaccagagcctcagggtcttgggaaagcagccccctacacagggcaggcgcccttacgaggagagggatggccaggcaggtagatctgtagaagcagccacggcagcagctgcctgggatggatcctgccagactccagactcacgggggccccaccactgccctctctctactcctccctcagccactgcaggctgtggtcagctgtggtcaccagttcgacaccccaaacccctcccagtggtggtgtatacttaggcaagctcctcaaaagcacccgcaatctcccaccagaggactgcctgggaccccagaacaccagctcagaggtgtccatgtggcagtgggaggtgccctcatacctgttctcactctctgctgtctggaactggctgtacagggtgctggtgctgcggcgggcagcctgacgggagccggatgtggttgagccactactctggtcgctgtccaggctgaggctcagggtggagcccacgggcccctcctgcaggtacacacccagcgagcgacggtggtggggtgcggtggacacaaggagggagctaggggtgccctgggaacaggaggttgggacttgggtcagggctggacagactccactttctcccagcaacacgcccaccgtggacgctcacactggccctcactcacacggccgtctggccggccctcgaggcgctgtgcagccttcacccggtcccaggtgtccttccagcgctcagcgggttggcccaactctgtctccagcctctgcagctcctgggggaagaattaatggcaagtttattcaaaaggaaatatccagactagagcacgaaaagacaaaaggaaaacacaggaaagagacacaacggaaaggcctaacgcgtgtgtgactggccacagggggaggtggcaagagggagggaaggaatatgcaaaatgaatattcggagacaacagttgaaaaatttcccaaactaaccagaggcatcaaacaacataatcaagaagcactacagaccccaacagggtaagttaaaaacacacaccccggccaggcgtggtggctcacgcctgtaatcccagcactttgggaggccgatcacctgaggtcaggagtttgagaccagcctgacaaacatggagaaaccgcatctctactaaaaatacaaaaagttagcccagcatggtggcgcacgcctgtaggagaatcgcttgaacctgggaggcggaggttgcggtgagccgagaacgcgccactgcacaccagcatgggcaacaagagcaaaactgcttctcaaaaaaaaaaaagaccacacaatactgatcttcaacactgcagggtccacaatgtccagcttacaataaaagaacagcagaaaaatggagaaaaacattaaaatagaccctgaaatgaaacaggagttagaacatacagtaaattcaagagagtgattttagggccaggcgcggtggctcacgcctgtaatcccagcactttgggtggccgaggcgggtggatcacgaggtcaggagttcaagaccagcctggccaagatggtgaaaccccaactctactaaaaatacaaaaattagccggacgcagtggcaggcaccagtaatcccaactactcaggaagctgaggcaggagaatcacttaaactcagggggcggaagttgcagtgagccgagatcacaccactgccctccagcctgggcggcaaagtgagattctgtctcaaaacacacaaacacacacacacacacacacacacacacacaccccaaaatgggacagaaaaactgctgaaaaacaaagagaaaagtcccaaaacctgccagaagaaaaaaagacatgctctctttgaaagagcaacaataaaactgacggctgacttcaaaagagaaacacgaggccaactgtcaacttccagccatgacagataattagtctgaacagccctccctccatatgcaaatgatgaaactggacaagaaggggaagccgttgtttccagatgtcagacaagcagtgcagcttgagagacaggagcctaagacatgggaccacataagatgggccccacagtcacctgttttctgcccagccacagtgcagggaggcagggccagagcaacacacgggagcttgctgagccgaggaggcagagacgggacgtccaggggcgctagtgcagctgggtctgcagggcagcccacagaggggagggagcaccacagcaaaggggctctagaaatctagacagagccctccttgagtcgttggccaaattaggctgccatgtgcaaagcaagatgtcacaaggcctggcagagaacagctactaagaagctatgacctgacgccggcagcagtggctcacacctgtaatcccagcactttgggaggccaatgcgggtggataacctgaggtcaggagttcaagaccagcctggtaaacatggcaaaaccctgtctctactaaaaatacaaaaattagctgggcatggtggcgggcacctgtaatcccagctactcgggaggctgaggcaggagaattgcttgaacatgggaagtggaggctgcagtgagccgagagtgcgccactgcactccagcctgggagacaaagtgagactctgcctcaaaaaaaaaaaaacaaaactatgagctgaacccaaattctagaggaatgctaaaagatactggacttccaaaaagccagtgtggcaagaccttaccgaagacacaaagacacaaaactccaactgaagccctggagaggccacacgccttgggctgctctatccctggagcttctctagaggtgctggagagctgcccaaacaaagcttagaaacaagcttcaaacagaccaagctgacgcacaagctcattacctacctgcgagaataaaacccaagactctaagcttaaagaaagacaacacaggcagggcacagtggctcccgcctgtaagcccagcacttcgggaggccgaggagggagaatcgcttgacccaaggagtgtgagaacagcttgggcaacatggcaagaccccatctttatatatatttttaagttatgtttcaagatttaaaagaaaagatggacataatggtttatcagatggggaatctctacaataaaaagcgttaaattcattagatggggccgggtgtggtggctcatgcctgtaatcccagcactttaggaggccaaggtgagaggactgcttgagcccaggagtttgagacctgcctgggtgacatagggagaccccatctctacaaaaaaaaaaaaaaaaaaaaaaagtagccggcacgtggcccacgccagtagtcttggcaactcaagaggctgaatgaagcaggatgattgtttgagcctgggaggttcgggctgcagtgagccatgactgtgccactgcactccagcctgggcaacagagcaagaccctgtctcaagaaattaaaaaaaaattcatttgatgggcttcagtatattaaaaacaagaaagaaaagagtagtgaacttgaagacaagccaacagaaatcatccaaaatgaattgcaaacataaagactgagaaaaaacaaacagagcttcagcaacgtatgggacaataaagttccagaaggaaagggagagatcatgcagaaaaagtaatttatagaagcaatggcttgaaatgtattaaatttgacaaaaatgatcatcccacagacccagaagtttaaagagccccaagcaggacgaaagcaaaaaccacaatggtcaaattgctgaagccaaaattaaatgcaaaatcttaaggcagagaatcaaagggtgccattatacacagtttataaggataagaatcaacaccaacttctaagcagaaacaatacaggccagaaaacaaagtaatatcttttttttttttttttttgaggcagagtctcactcatgtcgcccaggctgcagtgcagtggcgcgatctcagctcagtgcagcctccacctcccgggttgaagcgattctcctgcctcagcctcctgagtagctgggattacaggcacccgccaccatgctcagctcatttttatattttagtagagacggggtttcaccatatttgccaggctggtctcgaactcctgacctcaggttatccacctgcctcagcctcccaaagtgctgggatgacaggcgtgagccgctgcgcccagcctagtaatgagatcttttaaagtgacatcagtttaactgctgaattaaaaaaaaaaaaaaaaaaaagaagcagctgtcaacctagaaatgcatatccagagaaaatgccctttgcaaaataaaggcaccaagatgttttcagataaacaaaagctgaggggatttgtgactggcagctctgcattacaagaaatattaaaaattcttcaggctgaagagaaataataaccagaccagattatactgaaagr

SEQ ID NO: 93618 - DNA, 30553 bp, Homo sapiens
  misc_feature (1)...(30553): n = A,T,C or G
tggttttttttttttttttttttttttttgtagagacaaggtttcaccatgttttccaggctggtctccaactcctgggctcaagtgatccacccgcttcggcctcccaatgtgctgggattacaggcgtgagccaccatgtgcagcctcaaaagctgtcttcatcctctggatctaatagctaagttctaagtacaatcttgctacacgggccgcaggataagagaccgggcagctggcaggatggcacttcttccctcccctgcctcactttctcacccacccaccttatttcctgcagcttcaaacaaactccttgcatgtgaatcctcgttttagctacttcttctgaaggaatccaatctaaggcatcctgctaattgtgacactcacacttaaattatcaaatcgtaaagttaatcaatagttttacccttttcctgaacaatacaaggacccgagaagtatttaactctgtttactccagtcccaacttaaattttattattatgcattttaatattctttatttttccttttttttttttctggttttttagacagagtctcactgtcacgcaggctggagtgcagtggcatgatcttggctcactgcagcctcgacctcccgggctcaagcaatcctcctgcctcagcctcccaaagcactgggattataggtgtgagccactgtgcctggctattatttttcttttcaagacccataggaattgttattgttgctttaagccattgatgtttactagatttacccaaatgttacctctttctatatccttcattccttcttccttgtcagatcaccctgtgataccaattccttacaccttttaaatgtttctttaatgagaatcttccgtagtaaactcagtttgtccgaaaatgtcttcattttgtcctggttcctgaaagatatttttacaggatacagaattctgggtcattagtttccattatcacctcgaaggtctcgtccattgtcctcctctggctttccttgtcgctagaaaacatcatctctcagtcactcccttgaaggtcattttccatgcatctccagctgcattyaggacgcttttgtctttggtgttctgaagtttcaatgtggtctatctaggtgtgggtttattttgtatttttttctgcatgaggttctcaattatataaatttatatgaatttctcaattatgtgactttcattagtttagaaatttcatagccattatctcttcaaatatttcctctgctccattccatctcttctccttctggcactctaattaggctcatgttggattttcctattctagcctttatgtctcttaaccctttttccaggttttccaaatctatgtctttccaggcagcattctgtatactgtattcatatttatcttttagctcatgaagtctcgctttggttatttataatcttctgttaaacatgcatactaagtttttaatttagttgaaattaaaattcaactaaaatttgaactaaattaaaactttccttttagaacttccatttggttcttttcaaactgcttgactattctttatagttttgtgggttttgcacacattttctttctttttcttttctttagagacagggtctcactgtgttgcacaggctggagtgcagcggcatgatcacggctcactgtagcctcaacctcccatgctcacgtgattctctcacctcccaagcacctgggactacaggtgcataccaccgtttctggctaattttttatttttttgtagagacagggtctcactatttgcctaggctggtcttgaatgcctgggctcaagaattcttcagccttggcttcccaaagtgctgggattataggcatgagccaccatgcccagccttaagacatatgcagatgtaaaacataacaacaccaatacagaggatgggaggagaaatgaaaacatactgctgtaaggaggctcttacattatatgtagatgccataacatcatgtgagggtagactatgacaagttaaaaatgtatattataaatcctagagaaaacattttaaaaactacaacaagacacaattaataagctaagagtggtaataaaacagaatacgaaaacatacttgatcaatccatcagaaagcagaaaagaagtggaaatggaacaaaggtaagatgggacaaataaatagcaagatggtagatttaaacccaataatatcaatgattacattaaatagaaatgatctaaactcagattgaaaggcagagattatcagaatgtatttaaaaagtgagacacaaactataagctacctcaagaaatgaaatgttaaatataaacaccaagataggctaaaagtaatagactggaaagaaagaaaaataaaggagccaggtgtggtggctcatgcctgtaatcccagcagggaagccagggtgggaggatagcatgagcccaagagttcgagaccagccagggcaacacagtgggaccccatctacacacacacacacaaacacacacgctagccaggtggtggcacacacctgtagtcccagctactcaggaggctgaaggatcgcttgagcccaggaggtcaaggctgcagtaagctgtgatagtgtcactggactccagcctgggcaacagagtgagactctgtcagaaagaaagaaaagaaagaaaaagagagagaggaagaggaagaggaagagggagggacaaagaaagaaagaaagaaggaaaagaaagaaagaaagaaagaaagaaagaaagaaagaaagaaagaaagaaggaaaagaaagaaagaaagaaagaaggaaaagaaagaaagaaagaaagaaggaaaagaaagaaaagaaagaaagrgaaaagtgaattagaaggaaagatcagaatcaatggaataaaaaatatatacacagttgagggtaatcaatgaaaccaaaagctggttctttaaaaaactcagtaagattgataaacctctagctagactaaccaagaaaaaagaagacataaataaccttatcaggaatgaaagcaaaaatatcattatagattcagcagatattaaaagaattataaaactatgaacaactttatgccaataaacttgaaaatgtaaattaaatgaacaaatttcttgaaagacacaaattaccaaagctggaacaaaaagaaaaagaaaaatctgaatggcctcataattactaaagacattgaattaccaattaaaaacctttccacaaagaaaactccagatccagattgccttactggtgaattctagcaaacatttaaggaagaaataatactaatcctacataaacatttcaggaaacaggaggcagaaaccttcccaactcatgttatgaagctagaatgtcactactgaaaatgtggagaaatcgtatcaccaaagaaactacaatctagtttgtcaaaccctctgacaattcagctcctaaagtaatccctacaaaagccaggaggcatttgatcccatagaagaaactacgcagcctccaagaaggttcctctccagtgtcctcctagatgtggacacgaagtctaacagacaaggagaaacattccagaaaactgagccggcgctgccaggaaaggggacttcactatttatgctcaataggatttggcaagtgccacagactagagatcgggtctaaatatggggtctttgtagtatttacccaattcttactcttttgttttgttttgttttgttttgttgagacggagtttcactctttttgcccaggctggagtgcaatggcgcgatctcagctcactgaaacctccgcccgctgggttcaagcgattctcctgcctcagcctcccgagtagctgggattacaggcatgcgccaccacgctggctaattttgtatttttagtagagacgaggtttctccatgtgggccaggctggtgtctaactcccaacctcaggtgatccgcccacctcagcctcccaaagtgcagggattataggcatgagccactgcgcccggcccttaatctttctttgtatgtttgggacacataaaatatgttttagtttatacgacattggattaaactagtgtacactgagtttgttggaggatgaatgacaaaccttttataagtcactggaccacaaggatctacctctggacctgaaggagcaaattgcatataagtcagagaacctaaattttgagctggatgctgcaactagttagaacttttacagtggtctcccttaaggataaggtgagtgagttttgtatacaggaagtagagagggcatggccaaaggggcagatggtgccctaatatcaattttccagttttcccataattttagaatccctagccagcacctacacctggcctttatccattcacctgccgacgcacactcaggttgcttcctaacttggctattgtgaataatgctgcaatgaataagctggtactgatatcctccaagatattgatttcatttcctctggatatacatccagaagtgggattgctggattgcatggtagttctgttttaattttttactgtattccataatggttgtaccaatctaccttttcaccaacagtatacaagggttctcttttctccacatcctcgccaatatttgttatctcttgcctttgttttttttttttatatagtagccaaactaagaggtgtgaggtggatcgcgttgttgtcatatctcgttgtggtgtttgcatctccctgattagtgatgttgggcccctttcatatacctgttggtcatttgcatgtcttctttggagaaatgtctattcaggtcctttacacattttaaattgggttatttggtgttttgctattgagttttgtaagttccttatacattttggatattaactccttatcagatacatgatttgcaaatactttctcccgttccatgggttgttgatcgtacccctttactatcttgaaaagaaatttataacctatttttttaaattacacaatggtctaatgaagggatagagagaggagagtggcagccaggtcatgtcacatacatcacaaatccactccacattctcatcttcccatcaatgtaaaccaccaaggagtccaggcttcattcagccacccaggcacggtcataactactcccaggccttgagccaaaatacggaatcaaagattctctttgaagtgcactcatgttgataaatttgcactaacctacaattcattcttggctttgtatcctcacagtccattcctgtatgtattcccctcgccttttttttttttttttttttttttttttgagatggagtttagctctgttgctcaggctggagtgcagtggcacaatctcggcacaggctcagggggccgccatggtgtcagagaaggcctggagcaggaagtgcaaagacacacagcagagatgcagctctgtgtccactgcagttaaaggtgggctgagggcatcagccaagacaccatctcctgcccctctcagatctagtcagctacaatattgagtctactctgtcacgattcttcaaagtaaaggctagttacaactcctatgaaagccttaatacaagaggcttagcagaacaaatacaatccccactgccacagcttctcccaagtaacagatattcagcagccacctcctccttggcctcaccctcaccagcattccagcttgtctccatggcttgcctggtgacgctgcccagaccttcaccctgaggcatctgagcccttaggggctatggctgctgaaaagaccttttcattgtcattacttggcatggaagcaccaagacagacctagatgaatcctctaagtgccagatcaatgcctgcttgccccgttacgcagcagccacgctacctcctcaccgtttatcaggatcaagtatcccctcctttgtggcctgctggtccaccagtatgaggagctgagagtaacytggtggtctttgcagattcaggctcagcagaggtatccttcctgcaaccagcaggagtgccctcgtggaagcgttcctacctgggaaacaggctctaatccagcagatcctaaggctgtggagacagaatgtacaaattctacgtgtaagcactgggaatgatggtgagaagtagctaatcccaacccttgggttcctggacctgtgtctttctkcttsgatccacatgaagtatctactgggggcagagcaccatatattagactctgattcagtgtatatatcccaactcctcaggatactgtcctagaaccaggacctcagctaagcccttaagaagtcatcccatctttccagtagcctagctgcttttacgtaacgcaggatattagagaagcagtggatcccatggtcatccacacactaccatacctctttcgctataaaatggctttcttggcctgaggcgatgtgattcgtgatcccatgttggtacacggagcatgcctgaagctcctggatagtgatgctggcctgggaccctgtggatacagaagacaaacccttatccagagcaggtgtcaactccagcaaggatgaagggctgtcaccaacttgccactaagtaactagttggggtgctctagggatggtatctcagcaggggctcagcactgatcgctttcagcaggagtaatcatgagacaagccttgagaaagaaggcctgtgctggtggacrctaacctgtgctccttctgcatgacgccgccactcacagtccactgttcaagcacaggggtagccaggggcacagctgactgacatcccatccatcctgctgttcaccaactcctctgcagtattaacacaaggcagagagatgcacatattgtgtggccactcctgtaggtccatcttcccctcttgctcttttcaggtccctgaccagccagcaggacgtcacaacccagaagtycatatgcgtccctccctcaggccactactctgtccactgcctccatacaaagtggatatccacacgaactgctggaagctcagccccatggaggatttcctattgtcgtcctttagggtcaccttgaatgggactgtagtgtacctatggttcattttcagttcatatcaacacatcaaactgacctatatacgaaccagaccagaatgcttrtctgctaagggagaaatatcagtgcaaagcagatgtggggccacactgccacctcttcctgtaaataactgttacccactagacacgcttgggtccaagcccaaggctwcctttttcattgtaccatcaattgctactgagcctctgacctactgacttggaggatctgacaacacctcgcttgggcagaccctgtcgcatggtcgctgatgtcccaccagcaggtgctcggtctctacctgggtctggtagtgtgcctgatactgctctcacttggcgagtagttctctgctgcagaaggcatggtcttgtccargaactctaggacagtgtactgcaactcttccgttggagtttgccagagatgccatatagggtccttcctaccccaaataagccccccggtaacccattggatctatgcagcagggaagcccatctcccaatccaaatctttagcagagccctctttttctctgggccccactcaaagctggcagttttcccgttacccaataaaggggtcagagaggtatcctctagcgcggtgcatgctgactccaaaacacagaggtgcctcaaygctgtgcctctttcttccttgtaaggatgcaggatgcaataacttgtccctggcttgccctcaaacgctgcacccctgagaatgtcactgatatggcaggctccagaacttctgagggcttctcgctcatcctctgacatgcacggccttcttcaccatgtccaactagtatgacatcatcaatgttatatggaatatagatgataagctacctaaggactattgtgacagagaacaggagagttcagacagcaagaagcaagaccatttacagagctgtccttcccatataaatgtgaactgcttttaatcctctttaccactggcaattgaaaagaatgttcaccaagtcaataattgcattatcaagagccagaggtgcatttatyggttccagtaaagataccacacctagcacagctgtgtgatcggggacacgacttggctaagtttgtgcagggcatcatcatttacttgaatccaccaagatttagcaggagccattcaggttaattgaagggatgaaacggtaaccactgctttataagtctttgagggcgaaatacctctgcaattacacctggaatgcagcattgtttctgacttactatcttggraaggtttcagtagggtgaggagtttcaaaggtttctactttgcgcttccttacatatggtaccaaaggcctgggatcaatgtatacgctccgccctctgctaggtaaaaacatcccaagtatgcattgagaccagagaagtaaccacaggactcgggttgggaattctgcttatcatctgatttccataagcctgcaccctaatgagagggccatgatgcttcagggctcctggaaacagtgtcagctcagatcctgtatcagcccttcaaagacctagacagtcccttttccgaagtaaactagtttttttggtgtgtttgttgttgctgttcagacagtcttgctgtgttgctcaggctggagtgcagtggcgtgaacacaggtcactgcagccttgacctcctgggcttaagtgattctctcacctcagcatccagagtagctggaaccacaggcacctgccaccacgcccagctaatcttttaatttttgtaaagacaggttcttgctatgttgcccaggctggtctcaaactcctgggctcaaacgatcctcctacttcggcttcccaaagtgcagggattaaaagcgtgacccactgcccccagccagaatcagttttcttttttttttttttttttttgagactgagtctgactctgtcgctcaggctggagtgcagtggctcgcggcaacaaggcctgggttcaagggattgtcaygcctcagcctcccgtgtagctgggattacaggcacaagccaccaaacccggctaatttttgtatttttagtagcgacggggtttcgctatgttggccagggtggtctcaaactcctgacctcaagtgatctgcccgcctcggcctcccaaaatgctgggagtacaggcgtgagccaccacrcccggaccagttactttttaaagtggctctaggtccctttagggaaggattggaggaatatttcttggtatatgctcagatgctggtattgtaagatccttcctgagaggaaccaagcctccttgtcaattaatgggctctaggtctcaaaactgactcagatttaaacagaatgatcatgattttccactgcagcaaaagtgacattagccttgtgatcaccaatttttgatttctttctggttatcaaacaatactctagtcagatgccccaaagaacaccatggttcgacagacattgccacagatctctgtgggtccagcgttcctggtcgccgctctagcctggggcagaagcagaaatgcaggaggcacgcgtttaaatcaggacgccctcaatgkgaggtgcgcaggccgaggagggggctgcggcaagctgcgagtcttcactttcttcggctcttgggtttgactctgtaattggttctaggcctggaggagacgaggaggatagggggagaggggaatgaatgaagacgcgcatctcaagcggggcagcaaaagactcctcattcagaggtgcggctctaccggccagggagtccccgtgtagactgggcatttatgcaactggagtcatcggaactgtcccaagggtcacattccttcagcaaatgtttactgcgtacccaccgggtgcccgcatcccgcactctgcccgcgctgtgcggccctgcctagcgcgcgcgcctcctccaggcctcacccacgctcaggacggacgcgcgctggacggctcttccttgtcggagcgccccaggggtcggggaagagggcccggcaagggagccctcgcgccggagctgcagctgcagccgccgccccgccgccccgccggctcccacggggcagagacgcarctcctctccggtcttcccgkacgctaccgcgcccgggcagttcctcgcccgcgcacgcgccgctccgccaactgattggcctccggcgcctcggattggcccaggccgtccaacagcagccccgcccagagagagaccattggtccttgcccataggggcggggcccggcagagatctgcggaattcggccttcggaaagagcccccgggccggggcacggagagagccgagcgccgcagccgtgagccgaatagagccggagagacccgagtatgaccggagaagcccaggccggccggaagaggagccgagcgcggccggaaggaaccgagcccgtccgaagggagcggagcgcagcctggcctggggcccggtcgagcccgcgccatggcggccgaggcgacagctgtggccggaagcggggctgttggcggctgcctggccaaagacggcttgcagcagtctaagtgcccggacactaccccaaaacggcggcgcgcctcgtcgctgtcgcgtgacgccgagcgccgagcctaccaatggtgccgggagtacttgggcggggcctggcgccgagtgcagcccgaggagctgagggtttaccccgtgaggtgggaggtcaggggtcagcctctccggtgcgcggatcggggtcaggggtcagccgcggggccctcaggatgctccatgttttcgcccccctcttgcgcccgcgcctggggcggggcggggccggcctggccgggagggggccggggccgcggcaggtagggccggccgcgggctgagcgcgcctggtgtgggtctgcagcggaggcctcagcaacctgctcttccgctgctcgctcccggaccacctgcccagcgttggcgaggagccccgggaggtgcttctgcggctgtacggagccatcttgcaggtgagggggktgtgagcgccgcagcaccagtggctttagggcctgtcgcttacgcgatgcgggtagtattgttcccgttgcgcagttgaggacaccgaggttcacggtctgagtaacacctcattacaccgaagcctgggcctgtattcccagagctttgggaggctgaggcgagaggatcacttgagcacaggagttcgagaccagcctggacaacatagtgagacccccatctctaaataaaaatagaccaacgctaaagcctgtgctccagagcctccaggcaattggatcagaagtcgcagctctggtgggaggaaggcgagccctcatgtgtgtccctgtgccactttgccttggcccctttgctgtccatcctttttcagggcgtggactccctggtgctagaaagcgtgatgttcgccatacttgcggagcggtcgctggggccccagctgtacggagtcttcccagagggccggctggaacagtacatcccagtacgggcccagtcctaccctctcctccccaaggcacctccaccccctaaccctaccccagtgcccaatgtctgcctccacatccctcaccccaagtagggaatttccsccaaaaccctgacttcccctcattgccccagcccttcccactcctgccccagccccatcaccaccctgatagcttcctgggtgcagagtcggccattgaaaactcaagagcttcgagagccagtgttgtcagcagccattgccacgaagatggcgcaatttcatggcatggagatgcctttcaccaaggagccccactggctgtttgggaccatggagcggtgagtcaggagcctcctcagggctcctgtactcctgagctgaacctccatgccagcggatgtgtcgggggctctatccagccctccacttgagtggatctgatgtcatgggctgtcacagaacaggcttttaaatgcttgccagaggccacatgcagtgcctcatgcctgtaatcccagaactttgggagccgaggtgggtgaggtgggaggatcacttgagcccaggaggcggaggttgcagtgagctgagctcatgccattgcacttcagcctgggtgagagcaagactctgtctcaaaacaccaaacaaaaaaagaaaaaagaaatgattgccaaggccaggcacggtggctcatgcctgtaatcctagcacttcgggaggctgaggtgagcagattgcctgagctcaggagttcaaaaccagcctggacaacacagtgaaaccctgtctctattaaaatacaaaaaaattagccaggcatggcagcatgcacctgtagtcccagctactcgggaggctgaggcaggagaattgcttgaacccgggaggcagaggttgcagtgagccaagatcgcgccactgcactccagcctgggtgacagagcaagactccatttcaaaagaaaaaaagaaatgattgccggacaagtcacacagtgataggagcaggggtgcagtagtctggcctgaggggtagataggmgaggggtgggaaagaatagcagagccagkgtatcctattctttgggcttcaggtacctaaaacagatccaggacctgcccccaactggcctccctgagatgaacctgctggagatgtacagcctgaaggatgagatgggcaacctcaggtgagggcaggcaggacaaggctaatggtaatggtgtccgcccttccagtakttgctgagggctggtgtcagggcctggcctrttagggtggctctgatcctcctctagtcactcctgctcaggacccatgctcccatacccctgtaggaagttactagagtctaccccatcgccagtcgtcttctgccacaatgacatccaggaaggtaggagaaggcatctgagtctcctaacccaagatggaagagccagagggctctggagtgagcagaacctcaccccattcccccagggamcatcttgctgctctcagagccagaaaatgctgacagcctcatgctggtggacttcgagtacagcagttataactataggtgaggctggaaagatggcttcccatagatctgttcccayagggctcttgaaaacaggccagctgcccagggcatttggggactgaatgtccaccttattctcccaggggctttgacattgggaaccatttttgtgagtgggtttatgattatactcacgaggaatggcctttctacaaagcaaggcccacagactaccccactcaagaacagcaggtatgtgggccagaggctggggagcaggacccatcctgtgaggaaggagggaggtggagtctggaaggaatggccggaaaggatgttacctgggaaatactccacagtctccccaattcctgactcttggccattgatcgtagttgcattttattcgtcattacctggcagaggcaaagaaaggtgagaccctctcccaagaggagcagagaaaactggaagaagatttgctggtagaagtcagtcggtgaggaaggaggggcagggtggggtagggcagagcagaggaaagagggattggggaagaggcagatttatcaagctgcagggaaggtggctgtggagagtggagttaggacagtgggggagaagttaaaactgtagggattggccaacctgggtgaggggatccaagcagtgctagacatgctcttgaatgcccctccttttcctgccctccccccaggtatgctctggcatcccatttcttctggggtctgtggtccatcctccaggcatccatgtccaccatagaatttggttacttggtaagtgaccctggggatgggaatgctagctggggggctggggagcagcagcagccacacncttccaggaggcctggggagtcccgggtggctgtgggcagcctgaggtggatgtagaatgctggtcccacgtcttctcacyactgtgtggggtgggtttccttccctaggactatgcccagtctcggttccagttctacttccagcagaaggggcagctgaccagtgtccactcctcatcctgactccaccctcccactccttggatttctcctggagcctccagggcaggaccttggagggaggaacaacgagcagaaggccctggcgactgggctgagcccccaagtgaaactgaggttcaggagaccggcctgtycctgagtttgagtaggtccccatggctggcaggccaragccccgtgctgtgtatgtaacmcaataaacaagcttcttcttcsmaccctgtcctggccctgctgagcagcagcagaaagtaccaaaccgagcagtacacacaaagggactcttcagtgctctgggattgaaagtggttagcgttcatgctgccagttggggtcccccatccctccccagtcccctggctgcagcttagaataataaatactaggacttggggaggaggagagtgatgggggtatgaagacgaccctgaggtggggatgcygcccggagcaccagcgatcccagaacaggcagcagctgacacatcggtgaccttttccctacatttggctatttttagctctaawgccaccatcctcacgagactctggggccccccaggctcccagacctttgagcaaccttcaccgcacagaaacccagccgcgccctgcaattcccaccgcggaaggtgggtgggttctggttctcgccccacgtttttccccgaccccgatttgggagtaggtgtcaggttcctggtgagggcggggcgggggtggctaggcctgaaggacgtggggacacgggccagagtggctggccccacgcacggacaggagtgaacccgagctgtgagtaggggccggcacagggcggcccgcgggggtctgggccctcagccctgcacaggggcgaggacggcgctggggcccgcgcgctcgggtggggaagggcgggctcccgaaccctgcctctgtccaggccggctccacttccaggggcgcctctctcccctgcccgcgccctcgctgacgccccccaactccaggctgcccttcgccgtccttggggctcctggagctttcaaggcccaaatcccctgcaccacagtggctgtgcccacccggaaggctggcgcgaggatttggcggcggttggcctggcggggggcgcgggccgggggcagccgctagtcgcggggtggggggcgcgaggggtcgcggactggctgggggcgtctcggcgcggctggcggcggggccggcctaagcgcgcccgcgcacccatctgcccccgtcctaggtgccgaccaacccccaggatggcggaagctcaccaggccgtggccttccagttcacggtgaccccagacggggtcgacttccggctcagtcgggaggccctgaaacacgtctacctgtctgggatcaactcctggaagaaacgcctgatccgcatcaaggtgcgcacaggtgcttctcccagagcgtaggcagaggccggctgtcagctgttaagcgctttgttagggtccctcactgcctccttggctggcacttctgcccggtacaggttgtggaagtacagacaccagaggggtgcacaggatgtggtcggacacagggagctgtgggtgtggcggaggaaggagcacagcagggcatcaggagagaaagccttccaggccaagaccaggagccagttcccaagacttcacaggcaggctaacctcccgccttccggctccataagggcgcctgtttctgcccacagaatggcatcctcaggggcgtgtaccctggcagccccaccagctggctggtcgtcntcatggcaacagtgggttcctccttctgcaacgtggacatctccttggggctggtcagttgcatccagagatgcctccctcaggggtaaggagtgaaactggaagggcacaggtgccaccagggagggctgggcccagctcccaaggctgaggttcctgagctrggcagatacaggacagcagccattggcagtcacggggcagccctcccctatgacaaccattgtcttagccctacatccgctcatttgatgcagtcagacatragtgtgcccagggargttcttccccttggtgtctcccctgagacagttcacagccacccgaggctggcctcaagaggaccccctgcagccyttgcccctctccaataggtgtggcccctaccagaccccgcagacccgggcacttctcagcatggccatcttctccacgggcgtctgggtgacgggcatcttcttcttccgccaaaccctgaagctgcttctctgctaccatgggtggatgtttgagatgcatggcaagaccagcaacttgaccaggatctgggctgtgagcagcagccagtggaggggttcaggcacctgggttgagactctttggactcctttggggttctgagctagasgggagaggcagacagggcactggtgcctggtgtgtggtttgtcctggaggggctgggatggctctgagggtctcagggagttgctggttggtttccattttttccactggctcccaccccagcactctgctctgtacccccagatgtgtatccgccttctatccagccggcaccctatgctctacagcttccagacatctctgcccaagcttcctgtgcccagggtgtcagccacaattcagcgggtgagggcctcgcttgggcatcccagtgggcaggggaggttggattcaggagatgtttccaaatataaggttctgtgcaaagagtggccttaagggcttgagaataatggggctgggtgaggagrgagaggtgggaagaggattaagatagaggcagcccttgccatctggccccacggtgatgataactggctggacagtacctagagtctgtgcgccccttgttggatgatgaggaatattaccgcatggagttgctggccaaagaattccaggacaagactgcccccaggctgcagaaatacctggtgctcaagtcatggtgggcaagtaactatgtaagttcctgcccctgggctcactgtcacctgccatgtgtcctggctgcacccgccccagctctaaccttccacctccccacaggtgagtgactggtgggaagagtacatctaccttcgaggcaggagccctctcatggtgaacagcaactattatgtcatggtatgaactagagcccccaggtccccgcacgtgctcagctctgtcccagctccaaggcaagggatctggaggacagcccagagctctagtagcagcttccgtgggcaagtgggggttatggagtgaggcctgagggaaagggaagagagagaggagatcctagaagagtccagaagcagcttaggggcaatggggatcctaaggatgaggagagtggagaccgccagcctgccaccgcttctcagagtcccggggtcactgcccctgcccagctcgggctctgtcacctctttccttggtttcctcactggcctcctggccatgggttcccagctgtcctgacaccataaccagggaattgtctagaacgtgtcttgctttgtgtccctctgcagagccggacagcagaatggaggccaggctgctgcttttagagctcaggaagtcagtctgcctctgccccatrtaactggcccttctgagtctctgggtctcccagccacctgggctgtatggcatgcctcttctctcctttcccacggtccaaagcacacttgacttgccagagcctactggaattctcctccataagctgtccttccaggaacttacacacaacttgcccatagcagaggttttaaactgctttttagtggtagaacccctttatcaaagcaaaagaagtagaatayaagcacataaaatagcttataaaaaggcagctcgggccgggtgcagtggctcacgcctgtaatcccagcactttgggaggccgaggcaggtggatcacaaggtcaggagatcgagagcatcctaacacggtgaaaccccgtctctaccaaaaatacaaaaaattagccgggcgtggtggtgggcgtctgtagtcccagctactcgggaggctgaggcaggcaaatggcgtgaacccgggaggtggagcttgaaatgagccgagatcgcaccactgcactccagcctgggtgacaagagcgagactctatctcagaaaaataaataaataaaaatttaaaaataaaaataaataaacaaataaaaaggaagctcagagccaggcgtggtggtgcatgactctaatccctgcaactcaggaggctgcagcaggaggatcacttagggcgagtaatttgaggctgcagtgagccatgcttgttccgctgcactccagcctgggcgacagagcaagaccctaactctaaaaaataaagaataaagcagctcaggctgaagctggagcagagggttactgcgatcagttgtgcatttctggaggttcaccccggcagcatgtgcaggatgtactggaagagggagacagaacacctcaggcccccgaatagattggtccttgggtcagcaagactcaggtgacayccagacagaggcccccaccccgcgggctctgttcctctgtaggaccttgtgctcatcaagaatacagacgtgcaggcagcccgcctgggaaacatcatccacgccatgatcatgtatcgccgtaaactggaccgtgaagaaatcaagcctgtgagttgcgtcagggttgaaggtgggatgggaggggagacctgagtctgagccatgctgggccttccctcaggtgatggcactgggcatagtgcctatgtgctcctaccagatggagaggatgttcaacaccactcggatcccggncaaggacacaggtaactgagccccctcgctgctacctgtgggccatctggctggctcgctgccctcctgcctgctcatcaccaagcgtccccagtgtctcagggtcctgaaactgtgaacagtagtcaattgtgacagatactagacatccattgtttacaggcatgatgctggcgcagggaccccacagggcccagagcagagcccctcccctccggggctcactgcgcatggtgaagggagtcctgctgcagcccaaagcttaggacagacccggcgctgccatggagccggcagaggaggggaggggcgcacccaggggtctggcagaggcagcagccttccctgcttctgacactgtatccttaggcggtttgcacaaccctctagtgcgtcgtttcctcttctgtgaaatactttataggattgttggtgttgcgtgagagagagtggaagcacccagcacagggcctggtttaggacacacggatcccatccagggggcaggaaggcccaggcagaggccgagcaaaacagggtctgcaggggtcacctagtgcatgggaggtgggcccttcccaggatgtagctgggggccccgcctcagcttgcccgtggcctgtatcacagatgtgctacagcacctctcagacagccggcacgtggctgtctaccacaagggacgcttcttcaagctgtggctctatgagggcgcccgtctgctcaagcctcaggatctggagatgcagttccagaggatcctggacgacccctccccacctcagcctggggaggagaagctggcagccctcactgcaggaggaaggtattggcctcyrggragggactgtccccaccctgagttcagggctccgtgaggagaggagcgtggccctgcctgccaccctggaactggaggctggaggcacaactaggggaggggcattggtggtcatggcagcaggacagccagcataacctacctctgacgggtggcagccaggtgaagtgtgcagagggtggggacaccctccaaaatagcttggcaccccccacctccaggcccagcctggcacacacacccccacctccaggcgcagcctggcacgcaccccaacacctccaggcccagcctggcacccccacatctccaggtccagcgtggtaccccccatctccaggtccagcctggcaccccacccccatctccaggtccagccaggccctcagagkcaccctcatcccaagtccacgtgcccactgcttaccctgccccatgcttcagggtggagtgggcgcaggcacgccaggccttctttagctctggaaagaataaggctgccttggaggccatcgagcgtgccgctttcttcgtggccctggatgaggaatcctactsctatgaccccgaagatgaggccagcctyagcctctatggcaaggccctgctacatggcaactgctacaacaggtacggcagccccagccccacaggttacagcttaaggttaaaagttagggttatggttagaggattaaagataaaagaaggtagggttatgagctgggtgcagtggcacacacctgtgatcctagcactttgggggccaaggcaggtggatcacttgagtgcaggagctcaagaccagcctgggcaacrgagcgagaccccttcataaaagtagttaggattgtgattagtggttgggtagggctagtggctagggttaaaagctagggtttgggttatagaatagggttaaaagccgggcatggtggcaggcacctgtaatcccagctagtcggaaggctgacgcaggagaagcccttgaaccygggaggttatgggaagctaagatcacaccactgcactccagcctgggcaacagagcaagattccatctcaatttaaaaaaaaagtgagagaaaaagagagagagaatagggttagtaattagggttaaaggttggggttgcaggtcaggcwcctctggacattcccagctttggttcttcatgtgtctactcttcctgcaggtggtttgacaaatccttcactctcatttccttcaagaatggccagttgggtctcaatgcagagcatgcgtgggcagatgctcccatcattgggcacctctgggaggtaatagccttgcagagggaacctgcagggcaggctgtaggggatgaggccagcctctcagtctcatcctctccctgcagtttgtcctgggcacagacagcttccacctgggctacacggagaccgggcactgcctgggcaaaccgaaccctgcgctcgcacctcctacacggctgcagtgggacattccaaaacaggtgggttggaagctcccaragcaggtgtgagaccacaaagcagcaggtgggtacagccccgacgaggcctgagcctcctcctcccctgctggcctyactgcctggcccagccctcgggaaggcacagggcacgtctcaggatacctgtagagtccaaactggcttcagggaggacagagaccacccaccgcccctggggccatctgtgtttagagacagccatgagatggaggaggcactcacaggcccctggagcattttcagcacttccctcttacccacaaagctgagcccggcctctgggggctgattctccctcagactgtcttttgcgtaccctcctcctgaagatgtcttggccggctgtgccctttctccaccarctaaacgtcatgcctcctagacatgacccagagtcctgcttggagagccctaccctcagctgacccttcccatgtcttggcagtgccaggcggtcatcnagagttcctaccaggtggccaaggcgttggcagacgacgtggagttgtactgcttccagttcctgccctttggcaaaggcctcatcaagaagtgccggaccagccctgatgcctttgtgcagatcgcgctgcagctggctcacttccgggtaggagccccgcctcccgctgctgagagggcagggtggtaccagggtccacctgccagattcacccctctgtatatcccaggacaggggtaagttctgcctgacctatgaggcctcaatgaccagaatgttccgggagggacggactgagactgtgcgttcctgtaccagcgagtccacagcctttgtgcaggccatgatggaggggtcccacacagtaagtgtcctctgcccatgtgggggtcacagtcgtcgggtgaggtgccccctctgcctcctgtctgcctggagggccagggctactcttcacccctttacttctgccccgcagaaagcagacctgcgagatctcttccagaaggctgctaagaagcaccagaatatgtaccgcctggccatgaccggggcagggatcgacaggcacctcttctgcctttacttggtctmcaagtacctaggagtcagctctcctttccttgctgaggtcagcaccgttgttgggtgtgtcctttgtcccactgccctcctacacgcagggcttgggccatctcatgatggagcacggcctgttttcctggcttgctcccctgargctccctggagtgctgggccagctttcccgcccacaccccacctgggcctgtggtcctgggactgagcaggagcaacatcctctttgtggtgttggtgtccttgtgacagggaacagacaaatatatgatctgtcaggtggtgacagcactactgagactagtgaggctatgtgggggagaggcagagcagagggagggctgggcagctcacacaagccttatgtggcatgatgcacaggggaccacggggtggtggccagggagctcctgcaccctcagcagaacygtgtctggctcagagtaggtcgcagacaccacgtgttggacaggtgctttgggtatgtggcctctgaccagctgyggcctccattgcaggtgctctcggaaccctggcgtctctccaccagccagatcccccaatcccagatccgcatgttcgacccagagcagcaccccaatcacctgggcgctggaggtggctttggccctgtgagtgctcctgaagggggtgggtgggcagcaccagggccctgagggtttcagtggcgagtgcaggccctgaggtcagacgagaggcaggagcaccttgcttagaggagagcataaccccagacctgcatggaagcagaatgttagctatggactcaggcagccaagcacctgggacccacccatcccaaatacctccctgctgaagcatgaccgtggtttccggggtactgaagcatgactgtggggctggtttccagggtactgggyagtgcactgggtgcttctgaagtctacttatccaagagagtgcagctgtctcccacagaaaccttcacatgggctagcttgtcagaaggctagagaaccctctggagagagacggagtgatctagagaataagccccctgagggaaactgggaggtcccagatcccttggcggggtctgggcagcattctttggttttcacagtttcctgggggtggtcctcaggaaaaatgcagtgtctagggctggggcccgttcctgcaactcttgtgggaagaacaagtacaatatcagcttggctttcagatcttcaaggtttgatttatgccttyttcacccttcttgttgccctcaggtagcagatgatggctatggagtttcctacatgattgcaggcgagaacacgatcttcttccacatctccagcaagttctcaagctcagagacggtgagtctcctgccacagctcaggcctgaggaaggggtgccacctggggctgcccaggaacacaggtgtctttggctggggaggcatccttgcttgtgggaacagaggggtgggtacatatctgaaggtgcatctgaactcttggctcccacagaacgcccagcgctttggaaaccacatccgcaaagccctgctggacattgctgatcttttccaagttcccaaggcctacagctgaaggttggagaaatgccagctgccctttcgtccccacactgtggaggaagggacctgtggcagctcacaggcakgaggggtggccgtgcacaggtgcccaggctccaaggacagctccggcagcaggtcctcgctgggcagatgctgctccctgagggcccaggtggtggaggtggggttggagcaggaagggaattttgatttttttttttcttgatagatactaataaaaataaggctgtgtaattttctctcagcccttaggtacctgtgttttgtytgggaactcggaggccctccccctcccccakctcaraccacagaggtggcaagagaagggctgaagctggaagactgttcatgagggacttgtgtgacctgctttgaaatgtgtgactctgctgagtgacgtaggctctgagatagctgtccacgcccacgtgtttgcttggaataaatacttgcctcagaaccttcacctgttccctggggccatttctgtttgtctgtctgctggagagtgagcccacctcctcccatgcaggggcatgtgtgaggcacccctcttggctgaggcacaaccctgcacgggccccgcagcttcttgtcagcatggaaaggggctgcaggcccaggcctgaagtcttgaggcgccaggtggtcatgtctgcaagagggcacgcaggatgacctgtagcaacagacactccttcactgaggttggctcggctgctaaaatcatgttaagagtaaatacaaaataattattctttgtttttaaggcggagtttcgctcttgttgcccaggctggagtgcagtggcacgatctcgactcactacaacctctgcctcctgggttcaagcgattctcgtacctcagctcctgagtagctgggacaacaggcgcccgccatcacgcccggctaattttttgtatttttagtagaggcagggttttaccatgttggccaggctggtctcgaattcctgacctcaggtgatccacctgcctcagcctcccaacgtgcagggattataggtgtgagccaccgcacccagccataaaaaataatttttatgaaaagtataagtaggccctcaattactgtaattgaagtgaattagattcagttctggaccttcatttaggaaccagtgtcttcatctgtttttgtttttttcttttttttcccatgagatagggtctcactatgttgcccaggctggtctcgaactcctgagcttaagtgatcctcccacctcgactttccaaagtgctaggatttcaggcgtgagccaccgtgcccggccaggaaccagtgtctgttgaacacccaccatagacttggccctgtgctggggattcagtggtaaacaaggtcctattcctgcccatgtcgaattcactgctgggtgaggcaggtgtggtcaggggacagagcagctggcaggaaaccaggaggcttttgggataatccacttaccaagtacaggcatgggttgcttaatgaaggggatacattctgagaagtgcattgttaggcgattttgttgtgcaaagattctagagtgcatttacacaaaggtagatggtgcagcctactacagacctgggctatgctgcttaccctgttgctcctaggccgcatgcctttacaacatgttaccatactgaatactgtaggcaactgtaatacaatgggaagtctttgtgtatctaaacttgtctaaacatagaaaaggtatagtaaaaatgttatataaaagattaaaaatggcacccttatggccaggtgcagtggctcacgcctgtgatcccagcaccttgggaggccgaggcaggtggatcacgaggtcagaagatcgagaccatcctggctaacacggtgaaacagtgtctctactaaacaaaatacaaaaactagccaggcatggtggcgggcgcccgtagtcctagctgcttgggaggctgaggcaggaggatggcgtgaacccaggaggcggagcttgcactgagccaagatggcaccactgcactccagcctgggcaacagagcgagactccgtctcaaaaaaaaaaaaatggtacccttatataagacacttataagacaccatgggctgggcgcagtggctcacgcttgtaatctcagcactttgggaggccaaggcaggtggatcacaaggtcaggagatcaagaccacggtgaaaccctgtctctactaaaaatacaaaaaattagccaggtgtggtggtgggtgcttgtagtcccagctactgggagaggctgaggcaggagaatggcgtgaacctgggaggtggagcttgcagtgagccaagatcgcgccactgcactccagcctgggcgacagagcaagactccgtctcaaaaaaaaaaaaaagaggaaaagtaagtggagagacaaaaggagaggtgggtggcaatttcagacagtggcaaaagcaagccttcctgattggggtcctttgaccacaggcctgaaggagacgaggagcaagtcatgtccctcatgtccctcatgttccgtacctaagggcagagtattcctggctgaaggaacagcaagagccaaagctttgcgagcggtgtctgctgtgatgaaggatgtggctagtgtggagtcagggatgggaagagcaagcggggcagctagatcggggtaacaagggcctcgtaggccagattctggattttctgaatgacgggggaagctgttgggctttgaacagagggtggcataatctgtcctaattttaagggatcactggctaaccagggtggcgttagaacaaagtaggacgcagtaacagtggaagcaaggagacccgctggagaagtgctcctggtggtggtggagctggaagaaatgagcggcttaaactaaggcagtgccataggaaagtagaattaaggagcttggaatgtcaaacgtaggactgacaagtctaatcaggaggaatcaaagataactcatattttctatattgggtgattgggtgattaaattaggtctttaaatgttgaatttgacttgcctataagaaatagctgtgaaaatgtctcagactcttgaaaatataaatgaaaagctaaggagagatctaggctccttctaacagttttgaagacagttaaaaccttgaaagtgcatgagaggattcccagggcagaggctcctcacctccttcaagtcttcatgagctataagagtatgcctcttggggccgggcgcggtggctcacacctgtaatcccagcactttgggaggccgaggcgggcagatcacgaggtcaggagatcgagaccatcctggctaatacagcaaaaccctgcctctactaaaaatacaaaaattagccgggtgtggtggcacgtgcctgtagtcccagctactcgggaggctgaggcaggagaatcgcttgaacccaggagatggaggttgcagtgagctaagatggtgccactgtactccagcctgggagaccgagactctgtctcaaaaaaaaaaaaaaaaaagagtacacctctgcctgcaaaatgttacattccatatcagagcgttcttcagcttccaaaagtatttccagagacctctacctgtttgggtgccagtaagcctcccctgggaaggtgcctgcgttttggtagtcttctggggacatcagctcaccccgtcctgagatagcagtraacagagtttccaacaagctagctttcaattaacatcaaaattcagcattaaagttcttttatctcatttgttctgggttaaaatagtgagatgaggaacaacagtggtaaaccagggtataaacctctggagactgctgggcatggtagctcacgcctgtaatgcctgtgctttgggaggtcttgagcccaggagttcgagaccagcctgggtggcgcagtgagaccccatctctacaaaattaaaaaaaaaaaattagccaggcgtggtggcacttgcctgtggccccagctactctggaggctgagttgggaggattacttgagcctgagagattgaggctgcagtgagccatgattgacccactgcattccagcctaggtgacagagcaacaccctgtcttaaaaaaataaataaacctctgatgacaacccaaaccccaattagttccccatgtcccataggtctgcaggtctgcattaataaaagctagcagccataacataaatcctgaaacctcatggctcaacccaatagaagctggactgttggtcagataaaatccagttggctgagatgagggctctgctccatactgttattcaaggatctatggtgacagaggccctgccttcagcaggtagtactcaagctgccttgggcatcaacatcataagtacgtggggagagaaagagggggccacctgtgggaggctttgatggcctcaacctcaaagtgatacacagcatttccctccacaccctctggctaaagacttgtatttcaagagaatctgagaagtagagtctagctgtgtgtccagggcgtaaaggaaacatttagtgacagttggtctcagatacacaagggcatgggaagaccagcctgacatcttcctgggcttcatggcctggagtttgcagggtagcccacctccagctcctgagcagggtactcaagagcctgcacattccagctcaactgatctttcccgagtcttctctgtcccttaccaagaaccctgagcccagaacacactcgccattccccaaaggaggcaggctgagccacaccttcgcctttgccctagatgggccttctgcctggaatcctgtgccctttctcctactctctcggaagctgtcttccttagccatcagaattattcctgattcgggccaagcacagtggctcacacctgtaatcccagcactttgggagtccgaggcgggtggatcacctgaggacaggagttcgagaccagcctggccaacatagcgaaacccggtctctactaaaaatacaaaaactagctgggcgttgtggcatgtgcttgtaatcccagctactagggaggctgaggcaggagaatcacttgaacctgggaggcggaggttgcagtgagccgagatcgtgccactgcactccagcctgggcaacagagcaagactccgtctcaaaaaaaaaaaaaaagaattattccctattcatgtttctctgggctgctgtaacagaaatcggctctgggctgtataagcaaatggaagtatgaagagcagctcacaggtggaaagggatggccagaaaaccgggttcaaccggggcaggaacctggcagctggcggagggagtgtggcccaggcagcagcctcctcaataaacaagcgaatgctcactccttgcccagaactgtctggctcaaccccagccatttttcctcctctgcaatcaggctgctaagaatcagaatccctgagagaaaattcagggggtctaaggtttgtcaggattctcaaacacaaggtgttcaaaatcaaagttaaccttccaagctagcttctcccactcttccacatctctgccagtggtatcaccccggccattagccccttgcttctttctccctccctcccacattaccaagccctgtcaagtcgaccttggaatggctttgaccctgtccaccactcagccaaacaacagcaacggccggccccgtcgccacccgcctcggcagccagagaccttttaactctgccactcgcctacttaccacccttctagggtgcccacgtccctctgaaaaaaaaggctgagctcagactggcctctggtcagcctcctcccagccagagctttctgtcactgcccttctaggtgttgagtggctctgcttccagttcttgcctggagaccaggagcgcccgggagaccccagcactttccagcccacatagacctgcgtgcacctctgcctcgtctccctgagcccgggctgcctcctctgtaagatacatgccacataatgtccgccacacatgatcgctgtgacagtggaaatagctgggcgttcagcgactcattcgacaaatgtttaccagcacctttggtaccgggcgctgtcctggacactggggacacagcaggcaaacggggccctgcgtataaatccttaagctcaagaaggaggtgggggcaaaactgtcaggccgggaagctcttcatctccgcaggattctccctcaacctcaggacgtccccagcaccgcacctgccagtcccagactcggacgccgcagacctgtgggagcagcgcggaatgccccgccccttttccsgaggacacccaatgagggcgagaggtcacttccggggmggsttcgctaacggaaagggcggggcatccctctcgaggagcggccttgttcctcaagcggccgctgggggcgccagagcaggaccggagcgcgggccaagctgga

SEQ ID NO: 93619 - DNA, 42702 bp, Homo sapiens
  misc_feature (1)...(42702): n = A,T,C or G
ccggaccaaagtattgcacggtttttgtaacagatttaaagtgtccgggcgcggtggctcacgcctgtaatcccagcagtttgggaagccgaggcgggcggatcacgaggtcaggagatcgagaccatcctggctaacaaggtgaaaggccgtctctactaaaaatacaaaaaattagccgggcgtggtggcgggtgcctgtaatctcagctactcgggaggctgaggcaggaaaggctgaggcttgaatccaggcggcggaggttgcagtgagccgacatcgcggcattgcactccagcttgggcgacagagcgagactccgtctcaaaaaaagaaaaaaaaaaaagaaaaagaaaaatttaaaacgagtgaaacgtgagactcccctcaccattgccacccacttgggacccctaccctggtctgggggggagccctctcctgacttgccctgggcacacctaggtgtggctatgtgaggcacacacatccatgtgtgcagatttgcagtaggactgagaccccgttctttcctgagagcttgtttggaggtcctggcagaggagcgcagctactcgaagcccggtcctccatcctcttcgatggagcgtgcagcttcggagggacgcacagggaacagtggggaaggagggggacacctgcctctgagccagccacatcagccgaatcaacactggtgaccagtggggtgacaggcgtcacagcccgaccgtcctcacatcagagaccccactctttcctatggttggatctactccaacatataggtgttgtatgattcatctcatctgctattaatatgaaattaggtgactgccagtcttttcatgagttgctgccttgagctcacagatgtgtctataggacaccttcctggaagtagaaattctggttgaaggtgagcatgtgtttatgttgatagatggttcactgttctccacagagctttcgcctacccactgtccacgagtcctggacttggtgtcacgggttccaagctgctgagactggcctctctgttgggtgagctgaggatctctgcgtctgttcgtgcttccccttctgtctccccaacccctgcgctcaccccgtaaccctcctgctgacacaccatgggagcacagtcaacatttgctgggtgaataagtcgaggagtgccgagcacacaccccacaggccgatctgggagggcagggatgccttgcaggtattatttacttattttgaccagttgagggggcagggagtgtcacatttatatgtttttttttttttgagatggagtcccactgtgtcacccaggctggagtgccgtggcgaaatctcagctcactgcaaactccgcctcccaggtttaagcgattctcctgcctcagcctcctgagtagctggaattataagtgcccaccaccacgcccagataatttttgtatttgagagagggtttcaccatgttggccaggatggtctcgaattcctgaccttaggtgatccacccaccttggcctcccaaagtgctgtgattacaggtgtgagccactgcacccagtgttttgttgttgttgttgtttgtttgcttttttgagatggagtctcactctgtcgcccaggctggagtgcagtggcacaatcttggctcactgcgacctccgcctcccaggttcaagtaattctcctgcctcagcctcccaagtagctggggttacaggcgcctgccaccacacctggctaatttttgtatttttagtagagacggggtttcaccatgctggccaggctgatcttgaagtctggacctcaagcaatccgcccacctctgcctcccaaactgctgggattacaggtgtgagccaccaagcccggccaagtgtcacatttatgttgaaaggtggaggggcagccaagaaggcaggtgctggggaggcaggcagaaagggcttgaggggacagagtggatgggtgggagaaatttagcrgggcaggacgggaaatgaggggctcagttcccggcgaagcccttctgtttgctgatgtggcagctgctgagggggtgggaagaggtcggggcctggacatgctgaggccgagctgcctgggggttgtccagggagaggggtctggtcgctccccagcctggcaggcatgggactaaagataaggcaggtcgagaacagttttggggtttcagggatggcgcagccatggaggatatggtgagcctcatccacagagaatgcggagaggctggccaaggatggagcccagcgccagctctggaggggcaggtagggaagggcctgagcaggggatcccccaggttcccaaatctgctgctgcggcttctgctgctgcctccccactcggccctcagccttccacactgccaccagctctgtcctttcaaaacacaagtgcaatcaaatcgttcgccccaccaataaagaaaaaccagcaaaaattccctgtcctcaagaggctttttttttttttttttttttttttttgagacggagtctcgctctgtcacccaggctggagtgcagtggtgtgatcttgactcactgcaagctccgcctcctgggttcacgccattctcctgcctcagcctcccaagtagctgggactacaagcgccctccaccatgcccggctaatttttctgtatttttagtagagtttcaccgtgttagccaggatggtctcgatctcctgacctcatgatccgcccgccttggcttcccagagtgctgggattacaggcgtgagccaccgtgcccagccctcacaaggtttttaatctgggacaggtggaggacagccccagcgaggggctgcgtttcaggccctgagatgacaggacagttgctgcccctgtgagccacagtcctgcctcccgccagcttgtggggagggtgtatcctctgccctcaggcatcagcctggctgctgcttctgcacctgcccagcccaccagagaggaggccccgtctgtgattcccagggtccctggtgcttgttgcatgtgagtccattcttagttggagaagctgcttctggggagcgacggggctgccccagcaccgcttatgatggacacaggtgaaggggagacacaagtttccaaatgtgcgagggctgggccataggagggggcggtggccttggggaatgcttgtgagaagcaaaagaagctagggtggcaactggctggacaaacagcatcttggggttttttcctttttttttttgagatggggttgcgctctatctcccaggctggagtgcagtggcgtgatctcggctcactgcaacctccgcctcccgggttcaagcaactctcctgcctcagcttcccgagtagctgggattacaggcacgcgtcaccatgcctggctaattttttgtatatttagtagagacggggtttcaccatgttgtgcaggttggtctcaaactcctgacgccaagtgatccacccgcctgggcctcccagagtgctgggatttacaggcatgagccaccacgcccggcctttggggggttttgtttgagtgttttatgatggcagaggtaagtttgactctgatagcaaggaatccatagacagggaaggatggagtttggcggcgggcactgacagtgaatgatggcctgagatgaggagtgggcaggggggcagagccctgtggtaatggagggaggggtggtgtgagaggtgtaagatgggggcttggtgctcccatctgatagcttctatttgctctctgaggagcagccaattatctcagagacactggaagtggggtgagaggttcgaggagagtgcagactgcaagacagctgaccagaaatcagcaggctgggcggtagggaggggcatccatccatctgagacactgagccactgtggatggttgttcccaagggcctggtggaagcatgacagtggagagagtgcgacgcagggtccccagagtctcagagagagtggagagtgcggtgcagggtccctagagtctctccgaagagagccagccctgggctcaagcactagcccagacttgccccgggcccctgccagcctgcacacaagctcagtggtgtggtagtgtggtgctgaggacctttttgggtacaagtgacagaaaccaacttgagccagctggggcaaaaaggaggatttctggcagggcacagtttctcacacctgtaatcccaacactttttgaggcagatgcaggaggatcatttgaggacaggagttcaagacaagcctaggtaacttatcaagaccctgtctctacaaaaaaattaaattttaaaaagatgatttctcaacctgtgaaaaccaacagtgggagaggagaggcgtagcgtggcctgtgcctgagggcagggaggggaccctggtggggcctctcagtttgattccattcattctcttgggctggctcctgcccatggatggagactggatgccagtcatttggccagttcttgcagcagccaaactcatttaaaaacagaccttcagggccaggcgcggtggctcacacctgtaatgccagcactttgggaggccgagatgggcggatcacgaggtcaggagatcgagaccatcctggctaacacagtgaaaccctgtcgctactaaaaatacaaaaaattagctgggcgtggtggcaggtgcttgtagtcccagctactcgggaggctgaggcaggagaatgatgtgaacctgggaggcggagtttgcagtgagccaagatcacgccactgtactccagcctgggcgacagagcgagactctgtctcaaaacaaacaaacaaaaacaaacaaaaaacaaaaaacagaccttcgggctgggggcggtggctcatgcctgtaatcccagcactttgggacgccatggtgggtggatggcctgaggtcaggagttcaagaccagcctggccaacatggtgaaaccccctctctactaaaatacaaaaattagccgggcatggtggtgcacacctgtaatcccagctacgcgggaagctgaggcgggagaattgcttgaacccaggagacggacgttccagtgagccaagatggtgtcactgcacttcagcctgggtgacggattgagactctgcctcaaaaacaaaacaaaacataacaaaaaacagaccttggcctgctgtgctcagaggggtttccctgctgcaccaggctggctcctgcaccttctctcccagcatgttctgctctgggctcatgctcatccctgagccacttcaggggtggccctggccagccctgcccttgagaggggtgggcactgtcagggatcctgggggatgcagctttcccagagccccctgctccgtggcctcatgtgcctcacacgcttagaacatttgctctttacagggggacatgagcgtgccgtttttaagctgtgttaaatgtctcacttggcctagatgggggctcttcagcctgggaccccaagggcagggcctgaattctctctctgttccccatcgccaggctggcagcccctgaggtgatggccctgcgcctcctctgacttctagtttggggggcccggtaggcagcgcctaggcttctcccgcctttctcccgctggacagagaggggcgggggacgaggagtctggggacccgatccccagattgggacggcccaggggtggggttcgggctcctgtgcggggagtcccaacggcgagggcagctgtggtcctggcccatgcctcccgccgacaccacagccgacccgggtcagggcgtcagacccgccggagccgtagtccaggtgcccggcccgaggggcggtgctcgggccccagagtggtcagcgatgggcggggcgctgctctcgggagccgccctcccaccctctggaccaatggagatgcgcggttgcaggccccgcccgctcagggcttgacgacagcgcgcaggcgcacggcgcgcccgggcgggccggctggctgggaagatggcggcgggaacctgggccgccgccgccgccgccgccgccgccgcggagcgaaccaggggtgtccggggtgcgcggtccagggccggggccgggccatgagcgcgccgtcctcgagtccccgagccgcggagcccgcccgcgcccctcgggccgccccgcgtccctcgccatggcgcggctcgcggactacttcgtgctggtggcgttcgggccgcacccgcgcggtgagtgccgaggccaagcgctgagggccgggggccgagggtcgagtgctgagggccaggggctgggtctgagggtcgagggccgggggctgggggccgagggctgggggctgggtcgggaggccgaggactgagggccgggcgctgagggccgaggaccgggggctgggcgctgagggccggggtcgggggagccgaggactgagggccggggccgggggccgggcggggactgaaggccagggccgaccggacagcccgtggggagaatgggcgtccgctgggggcggcgtggccgcgcgggcctggtggcggcagggagagaaggctgggcccggcctgcccggcctccttggggtgggacgggctctctccttggccagctgcgggcggctgtggctctagtggctccaggggcgcggacccgcggctcgccagcccgcctctgaccttggtgctgcgtctgaagccccyggcggtcttggcggggtgcaaagagggggtggagttcgggtttggtgcatggagaagcggtgtttgatttgaaactgggaggatttgaggaggaagcgtcgagagtagagagaagagcattcctggcgactcgcctgacggtccaggccctgcacgccaagccctgggtggggtatcagcgtggcggtcggtgcccatgcccaggaggtctgtgtgtggggtcagcgcccgtgtctgagagctcttcagcccaggaggtaggagaaaacggagcctgacgatgacatcagcaacagcctggagacagcagcgttggcgagcgtgcttggtgtgccaggccccgcacagccctttgtgtacatgatctcacctcttcctcccagcagcccaccggggttgccctggtgttgcccccatctrtagagaagttaggcgcggataagctgactgcctggcctgagccggctcagagaggctgggactggcactcaggctgtcagatcccagctgcagactggcagtgtgtggggatggctgtgtggtcaggcaggggctggatcttgagcctggaggtgggattgagcttgccttcccagttaccctgttttttgtcagtscagttgtcactgtccccaccaaggacctggagttctctcttttttgtgtttcttctgctggacacccccctacacttcctgaagcctctttagcatcttcttcgtctccagccyctcctcagtgccctcttactcagcacacactcctctctgctcatgtctatccaagtgtgtgtcttatggcaccgtcagtcatgagcatctgtctttttctttagagagggagttctcgcttgctaggaccacayagtcctcatccccactgtgcaggttggctgtcaatgttgtcttgacccacagagggagctgtctgcaccgaggcacctatgaggggcatggaggaggccttaccacctggggcagagggtgcctgaggatccagggaagcaaggctggctgagggctgtcttggcgtgaggggccttgggctgagggctggggcgggggctacaggaacagctgataatgaccctgatgatcctgagggcagtgtggagagggtttgggttggtagagactgcaggcaaaggccaggtgggaggcgtggtggccgtggggtgaggagttgaaggtaggcagagagaagaggcagagtgggctccacaacaagctggctgtgacgtgtgtgctcactgctggagccacacgtagtgcaggcacctgtttgtgtgtgtcctttgcgcaggacagggtagaaggctggagcccaaggtgcccccccttcccctaagtgaccggaaggagtgataagtggtccactgcagtagggttggaggaccgtggagccctgtacccactaccttctggggttgagctggtcagctgcttgctggccttgcagccccaggcaccccttagaaggacttgttcattcttgaggggaacaaggctatagactgggaccctggtcatgggctgagggcagagccaggtaccagggccggtgggagctgggggaagaagcagaggagtgtggcgtgggggtcacttgtctctgctttgccccttgatagccttgtgacttcgagccagttgtttggctctctgtgcctcagtttcctcatctggggatggagtgagtcatgctaacctcccaggctgccgtgaggatgcagcgaatgcacaggtgtgaagcagtagcacacaggaggccctggaaatgatgagtttctttcattagtgactgagcagcaggtgtgtgaactctctaggcacagacacaacaggcacttctgagtgggtagaggaycctctctgttctgtcaggctaggacttcagggcgggatgcagggtctcttgggttggggattaggattggcggatagcttgtcttggcctggatctggacatcctgtctggagctgctgggtgcagcaccagggtgctgagggtgcatgagtcctgcctgaggcagcatcccagttgctagtggttaccagctggaaacctctcaggaaaggtggggaggggccctgagaaggtaaatgcctgtgctggccgtgaccctttcacctcagagagtgatggtggccagcgctggcccatctgcaggcccctcacctggtgagtcagggatcaccttctgtgctctggggcaggcatcaggactagacagactgcctctgcccggctcttggcctgatcacagcgtggccagtgctgaggtgtctttgagaacaggagacacatttgatctggccctgacctggccatcggccttccatctccagcagctgagtgtgcatctgcctgggaggaggggctggaccccttggatctgagaaaaagacctttcaccctatggcctcgcctctcctcctgactgtgatgtgctggctgcattcttgagccccatctactgtccccacccacgttcctgccctccctctggagcgggttggggctgtttgggatggcctcaactgcctcccagcctccaccctgggagccggaaggggtccaaggccttgggtcagaactgctcaggtctgatgggcaggggaggttgggggggatggctgtggaagctgcaggggccctgygcatggcctgctgctgcggccgagggagccatgtgcaygttggggttgggtgggtggcgtagcaggaaggtgctgtccttccttcttttctcttttcctatagctgggttccccacaagcagcagagccggccagggctggtcttcgtgcactgtggggagtgtggtggggaaacaggagaggctgccatccttctttgcctccccacagcacacgctggcctgggccagccctccaggcgtcagagcctggcactgatgatggggtgctgccagcagatgacagaacgcgaggtctgtgttygcctgcccgcccgcccgcctttcaggcctgccgtctgcgtggggctggccgcagggacattggtgcaggarggagtgctctttgaggggctttcaggacagaagccccagtgttgtccttaggtggccccctcagccccatgttcagaggtggaggtggcaaggaaaccttggtgcccagtgccacccagcacaccgtttggattcgtcctgttgccaaggggaggagtggggagggcaccctccctcctgtgtattctgaggtaaaggcagcactctgatgggcaaggagctcagctgctggaggtcactcctatggcaatagagcttcagtgggtgggggaccctgggaagatgtggcaaaaccccccacatccccctggaggccaagatgtggcctggccccggacagcacagagctgaggtgcaggctgggacctcagaagggtgaggaggagagctgctcacagctgagggctgcagggccctccatggcctgcctttccaggggccagctgtgttctgtcattccctggggctccggaaggtgccctgtacttccgactgaggaacctgtttgcttgttgggtgtggggaagatggttgtgtagccgactgtacgtgttctacaagccctaattagcctgtggtccgtcccagccaagccaacaggtgcactagcagtcactggggtgtggtggagggaggtcggtcctagggtccctgtaggccccaggctggggcagagtttcccaggggagggggtgctctgtgggctgagacctgaagggccagtctggggctgtcatggcacagaggagctcagggagaggtgcctgcttggcctggcccacttgggccattgggccagcccaaggagagtggagctcagggctggctctttggagggtagagccctgcagaggacttaaggctgagtgagagttgatgcttcacaagactagcggggggtggagagggtcaaggtagatggtgacctgccactctgcccatcctcctggggaaggctgccttcccttcctggccttggggaggctgcagtgcagagactgctgtccctgttcataaacccctcttccttcctccacctgctgcctcgtggcaagaactgggtgagccctgggtgccagccagggctgggcccagatggtggtttggggccaagcacaaggaggcctttgggggagtgggcggggtgggggaggagccgcagctcagggcctgcgcctgagtgagctgtccttgggggtgtggaggtaggtgtggcacccgcagacacctgggcccccacccgtctgccgcctgtcctctgcagggtgtcggtgggagggggaggggagcaggaagctgaggttttgtgagtcagaatcggcccctcaccgccccaccatctcccacttagcagcagcctgcccactgccgacttccttggctctgcccctgtaaccctggagggcagatggtctccccgcctgtaggggacccgtggagtgtgtgccattgggctgccagagttgctcatctgttcccaggaggaccaggcatgctggatgtggggctgcagcttcttgggggccggggtggggggtccatgaggggctctgtgttgagcatgacccccgccttgcccatctggctctgctgcttccgccaggtgggtggcggtgtagaggcccgtccagacagaggatgggccctggggacctgcggtttgtgtggaggagaaggcaggcaggctttcgtctttcctgctgcacctgctccatcctccacaagccctgggaggcctgcggagccgtcctgctgcgggagccacaccctgagtgtcccactgtggtccccaccgggcttcctggtttggctctccaggggtgagccacaggcagggacctttaccccaccagtgtggactgggcctggaaacagggccctggatgtggtagttctggggccccacggagaggaggggtctggtggggagacataggcctcttggctctccctgccctgaaagccctcctcctggcccaggggagcttaggctgtgctcagcacccatcctatggcctttgtacagggagatttggagacagggagcaggcctgggtgtgaccaccgtcccactctcctctgagagctgctggggtccaggtgctcaggaagccatctgggcatccttcggtggtcgtcctggaccaagtctccatccttcccgtctagctgctgcccctctaggtcctgctggctgtrgggctggtgttctaacagggagctgccaaaccccatcttctgggacctgtactggggacttgtctgtctctgaagcagctgggatagggaagagtttggggctgtgggcgcagggggtgtcctctagccttgtggggctgaggcttcttgaaccccacacagacagcaggtttgagtcctccacacccccggctgggtccagggctggtgggtgacagggagctctgggggatgcccactgttggggggccgagagcctaagtgggggcctggcggtggtggcagatgctgtgggggcctgtggaacagtcccgaagtgttgaccttcgatggagggctgctgtgctgtgtgaagctgggctggtcaggctgaaggaggtctctggggtgggatcggagaatggggtgtagcggcaggggcttctctaccctcaggtggccctggggtctgcagctgtcaagcagactctccatacggagctatttttagggagctgtggctgatctggtgccagatgagggcccagtgggtgggaatgtttccaccctgggatcctcaagcctcctggtgggtggggggcgggttgggtkctctgaccccctgttcttgtcctcagggagtggggaaggccagggccagattctgcagcgcttcccagagaaggactgggaggacaacccattcccccagggcatcgagctggtgagttgggggcrtgctgagacggtgctggcaggtggggagggcaggtgggcacagccctgcccttgtccctgactgaggggcctccacagtgcccggccccccgctgggctagggacaagacagcagagcctctgtcggggggtttgaccggcttggccggcggcctgtgcggtgctcatgtcactgtgtcatgttgtcactcactcatgatggtggggactgttctcccatctcctggtccttgccccaggtggggaggtcagaggctgttactcccttcaccyggagagactgaggcccaggaggccacgtgtccccagggtctccaagcaaggagctgcctgtgtgtgttggagcctccaggcctggtggtgcagatgctggggcgggtgggctggttcctgccacaggtgtagggggaggagctgactgctgagccttccctgcagttttgccagcccagcgggtggcagctgtgtcccgagaggaatccaccgaccttctttgttgctgtcctcaccgacatcaactccgagcgccactactgcgcctgcttgaccttctgggagccagcggagccttcacaggtcagcttggggcctctgggtacagcatgaatgaagctgcatccttgggccgtggccaactccccctgcccccgtctccccctgacccccagcaggaaacgacgcgcgtggaggatgccacagagagggaggaagagggggatgagggaggccagacccacctgtctcccacagcacctgccccatctgcccagctgtttgcaccgaagacgctggtactggtgtcgcgactcgaccacacggaggtgttcagggtgaggccggcagccggggcggcgaggcacgacgagggtgcttccatcggctgtcccaccactccccgctctggtcattgcagaacagccttggcctcatctatgccatccacgtggagggcctgaatgtgtgcctggagaacgtgattgggaacctgctgacgtgcactgtgcccctggctgggggctcgcaggtgagttttggaggcagctggtatctgcacagccacaggccctcctgctggggccctggtaggtatttggagcccagccagagccacacacagctggaggccttggatgctccctcttgcgtcctcgtgccaccattgcccccaacagtcctggcctgcttacctggccctcgcacctgtgctctgggcctgtgtcgttcagyctctctgtccactcctttgatggtgtgtgcctgtctctggatgttgatgtcagcttgtttgtctgctccctgccctgtgcctgggtgtgttggagtgtctaaccgtgtctttctgcccgtctgtcctgtgcagctggactctgttgaggaaggagcggtatggattctttgtttcttccgcccacctaggccccatccctacccccaagtcaaaagcagccactcctgtcctgagttttctctgcagctgcttgggacaacagaggcagggcatggcgtttccctcttgccatgttgcccatcccagccagtcccacctcgggtctgtcagtacaccagggtctgcctggggacacagagctctgggctgactctgggctggctctggccaaactactgagcccygatcctttttttgctgcagaggacgatctctttgggggctggtgaccggcaggtcatccagactccactggccgactcgctgcccgtcagccgctgcagcgtggccctgctcttccgccagctaggtgagcctgtctgtcccacccccgcatggcttcccctcggggactggtagttagggatgtgggttctcactctgcctgggtgggggcccagggtcctctccaagcttctcttcttcctttaggcatcaccaacgtgctgtctttgttctgtgccgccctcacggagcacaaggttctcttcctgtcccggagctaccagcggctcgccgatgcctgtaggggcctcctggcactgctgtttcctctcagatacaggtgacccctgcccggccctcccagccccttctcctggcccctttgcccagccgcgtcccctggctcactgcatcctctggggcctgcacagcttcacctatgtgcccatcctgccggctcagctgctggaggtcctcagcacacccacgcccttcatcattggggtcaacgcggccttccaggcagagacccaggagctggtaagggctgtgctttgtgtccacctcacggcccaggcctgcaggtccctgactgccggctcccttggtccgcagctcgatgtgattgttgctgatctggatggagggacggtcaccattcctgagtgtgtgcacattccacccttgccagagccactgcagagtcagacgcacagtgtgctgagcatggtgaggggcaccatgggcaagcgggagccttgggggcctttgggatgtggctacctggcagcacggggagcctagagccrgggccagcgtgcagctgcctgctccattctgtgctggcaggtcctggacccggagctggagttggctgacctcgccttccctccrcccacgacatccacctcctccctgaagatgcaggtgggggtcgttgctgctcctgcatggggaccccaggcacttaggctgcccccactcrggtctgctgccactgacacacagggccccacccccaggctggccccggctccagtagcagaagcaggagcctgggagcaaagcagctgccagcagttaggagtggtggtcgtgagtggtgcaggcgaggcggcaggggcccagcaaggggctggaacttggcgtctgatcacaggagcccttgagggtgctgagccaggagtgccttgtccagacagtttcagaggagctggtggccctgagtgcagaatggtgggaggggcagaaggatgggagcggggcagcttggggtgggttggggtgtggagaagctcctgggcagcctggggtggggattggcaggactggctctcacctgcactcagctcttctcccaggacaaggagctgcgcgcggtcttcctgcggctgttcgctcagctgctgcagggctatcgctggtgcctgcacgtcgtgcgcatccacccggagcctgtcatccgcttccataaggtggggtgcctggtggctgggcgtggggtaggagataagcgcatggtggagacccctgagggaccgacctccttctgtcatccaggcagccttcctgggccagcgtgggctggtagaggacgatttcctgatgaaggtgctggagggcatggcctttgctggctttgtgtcagagcgtggggtcccataccgccctacggacctgttcgatgaggtgcacctccaccctgccctcccagccccctgccctggctccgcctgaccatggcttacctaacctcctgcttaccccgctagctggtggcccacgaggtggcaaggatgcgggcggatgagaaccacccccagcgtgtcctgcgtcacgtccaggaactggcagagcagctctacaagaacgtacgagggtagcaggacgggagggcrtcgtaccgccttgatccctgggcccctgccccacacctgccgtctccccacaggagaacccgtacccagccgtggcgatgcacaaggtacagaggcccggtgagagcagccacctgcgacgggtgccccgacccttcccccggctggatgagggcaccgtgcagtggatcgtggaccaggctgcagccaagatgcagggtgcacccccagctgtgaaggccgagaggaggaccaccgtgccctcagggccccccatgagtgcgtaatgagggaggggaaggcaggccccgagcgtggcccaggatgggygtggggtcaggggtccgagtgtgtgtattctgtccccgcagctgccatactggagcggtgcagtgggctgcaygtcaacagcgcccggcggctggaggttgtgcgcaactgcatctcctacgtgtttgaggggaaaatgcttgaggccaagaaggtgaggrctgtgcaggctccagccgggccagggcagcgggtttcagaggagacccaggctgcacttcacccttgtgagtgctgacgctgccccagggcctcctctgcctaacagacagctagaggtggctgggctggccggagggtaggtgggctccaggtctcctctcttgacctcagtgaggggtgggtcgggcctgcgcgggagacccagccagggagatgtacttccatttttagaaatcagaaggtttcactattatgtttcgtctgtgtccttccccttaaattgggtaggcccatacacgacctgttctttgtacttgatggaaaacagagcttgctccctccatacgtgacctgttcctcgcatcttatggaaacagagctttttgctcctgctgttttgctctctgtggtgctcacttaacgcctctggggtctttcatcatggccagttggagactcttgtttttcattggctgtatggtgtccctttggggcggccagttttgtgatgaacgttgcagcaatagaacgcaaactccaaggctttctgtggccgggcctgtgccaggcgagtcactgagccagccaggcagctgtgagcctgtgagcaagggggcccggcccgcaaggcctccctccggagcgcacctccctgccagctcacaggtgcagcatctgcgtccttgtgtctggcctggtgaacttgtacttgtggagttgtcgggcccactggaggttttagtctttattggtcgscaaagccccagagtctggcacaccccacctgaaaggcatttgggtctcctggacacctgctgccctccctgccagggccccgagtgggtcttctctgtgccctcagcccgtgtctcctttccccacccccagctgctcccagccgtgttgagggccctgaaggggcgagctgcccgccgctgcctcgcccaggagctgcacctgcatgtgcagcagaaccgtgcggtcctggaccaccagcagtttgactttgtygtccgtatgatgaactgctgcctgcaggtgaggcctcttatcctgctagtgacatggctcatggcgcatgagcgggaacaggcgggcagaccctggtctgtgagtgagagtggagagayggtgcaagagactcctgtgccagtgggcaggggtcctcggtctgcagggaacagggtggagagaaccattgttgggggcaggtgccggggcctggggtctcctgatattgagcctctgaggcagccttggggagctggagccaagggtgtcaggtgctggtctgtggtggttatggggtggtgggggcatggtgggaggtgagtgctgcctgggaggggagaggtcctgacggtctctcgctctacctgcaggactgcacttctctggacgagcatggcattgcggcggctctgctgccwctggtcacagccttctgccgggtgagtgctggcatggctgaggtctccttcccagcccccccttcctggtggctgaggtctccttcccagccccccttcctggtggccgaggtctccttcccagccgcccttcctggctgcatccagctgaccttctcccctggctcctgcagaagctgagcccrggggtgacgcagtttgcatacagctgtgtgcaggagcacgtggtgtgragcacgccacagttctgggaggccatgttctatggggatgtgcagactcacatccgggccctctacctggagcccacggaggacctggcccccgcccaggtgcgcagggactccctgggctgggggctgggggctaggggctggggcagcgtggccccggctcatgcgtgtggtgccgtggcaggaggttggggaggcaccttcccaggaggacgagcgctctgccctagacgtggcttctgagcagcggcgcttgtggccaactctgagtcgtgagaagcagcaggagctggtgcagaaggaggagagcacggtgttcagccaggccatccactatgccaaccgcatgagctacctcctcctgcccctggacagcagcaagagccgcctacttcgggagcgtgccgggctgggcgacctggagagcgccagcaacagcctggtcaccaacaggtgaggcagggactgggggttgggcccagtggaggcggggcygtggtgggcagggcccatgcccacagtttcttctctggcccagcatggctggcagtgtggccgagagctatgacacggagagcggcttcgaggatgcagagacctgcgacgtagctggggctgtggtccgcttcatcaaccgctttgtggacaaggtctgcacggagagtggggtcaccagcgaccacctcaaggggctgcatgtcatggtgccaggtacgggggtttgggctggtgattcccccttggatgggtggggctgggcacaaagtgtgagaactgtcttcccccagacattgtccagatgcacatcgagaccctggaggccrtgcagcgggagagccggaggctgccgcccatccagaaggtttgcgggggccgttggggctgcsggggcccaaggcccgggctgcatcctgagctcctgctcttgttttcgagcagcccaagctgctgcggccgcrcctgctgccgggtgaggagtgtgtgctggacggcctgcgcgtctacctgctgccggatgggcgtgargagggcgcggggggcagtgctgggggaccagcattgctcccagctgagggcgccgtcttcctcaccacgtaccgggtcatcttcacggggatgcccacggaccccctgggtgagcctgcagactctctggccctgtcgccccctctsccccaggtctttgggatggatgggctttccctgcctccctctcccttttctcgggggttctgggtgcccgtgggaaacgggcctttgtctgctccttccccacccacttgggattccccataactgtggtaccctgagattctgggaccccccccscttaccttccttgcttctgactctgcctggcctgtcctaagttggggagcaggtggtggtccgctccttcccggtggctgcgctgaccaaggagaagcgcatcagcgtccagacccctgtggaccagctcctgcaggacgggctccagctgcgctcctgcacattccaggtggggcgcggtgcgcgggtggggctctcatcccccgccctggtctttctcctgcaaaccggtctttcttgtatgaaccatttttaggccagtctccagcagtggccctgttgttacgcttgcatgtctggggccctcactgtggctcttgagttgatgtccrctgtttgatgtgcggtctttgggtccttgtcctttccttggggcgccggccctcaagtccgtgtcttgggtgtgccttgcaaacccaggcctcagctcacagccactgagatttygagtttacacaagcgcttgccttcgtgtgacacagatacaggcctttgcctggggcctgcttctctctctgtcatggctgcgaggggaaggggagcctggcagtgtcagagttgggggaggggctggggggccacccacacccctaagggctgcttttactgacacagctgctgaaaatggcctttgacgaggaggtggggtctgacagcgccgagctcttccgtaagcagctgcataagctgcggtacccgccggacatcagggccacctttgcgttcaccttgggctctgcccacacacctggccggccaccgcgagtcaccaaggacaagggtccttccctcaggtatggatctgggtcccaggcagggcagctgggcctcagccrtgttcccgctccaaccctcctaggcccctgtgctcrtctttgtccctcctcctctcacctttgctgactctcgtgggcctcagaaccctgtcccggaacctggtcaagaacgccaagaagaccatcgggcggcagcatgtcactcgcaagaagtacaacccccccagctgggagcaccggggccagccgccccctgaggaccaggaggacgagatctcaggtggaggggtgggggtggagtcctgggtggtctctgratgctgacattggccagggaggatcagggcaggcggagtggcccygtgatgaccacgtgtgcccggcctgtgcagtgtcggaggagctggagcccagcacgctgaccccgtcctcagccctgaagccctccgaccgcatgaccatgagcagcctggtggaaagggcttgctgtcgcgactaccagcgcctcggtytgggcaccctgagcagcagcctgagccgggccaagtctgagcccttccgcatttctccggtcaaccgcatgtatgccatctgccgcaggtgagggccggccagggctggcccgggtggtggacacrtgactgggtgtcttccctgcccgctgtgggcctgggccacggcttctggtcatgtaaggaatgtggagggggagactccgggcagagggacgggccacagggctggggggtggctggggggccccgtggctgagctggaagcgcctcctgctgggagccatgggctggctcctcttgccctgcttggggcgtgagcctggaggcgggtggggtcgccagccaccttcacgcctctgcctcctctcagctacccagggctgctgatygtgccccagagtgtccaggacaacgccctgcagcgcgtgtcccgctgctaycgccagaaccgcttccccgtggtctgctggcgcagcgggcggtccaaggcggtgctgctgcgctctggaggcctgcatggcaaaggtgtcgtcggcctcttcaaggcccagaacgcaccttctccaggtacctcctgcgtcctgccctgtgcctgccytgccctatctcaccctcccctccctcagctccgtgtcctcccccaggccagtcccaggcggactcgagtagcctggagcaggagaagtacctgcaggctgtggtcagctccatgccccgctacgccgacgcgtcgggacgcaacacgcttagcggcttctcctcagcccacatgggcagtcacggtgagggtgcttgtgggcagacggtggggcaggggcactttggggggccgtggtggcatttatggtttggcaggcaggccagggaggagcagaaacggcgctggtcatggatgtttgggtgtgggatgaggagcatgccctccgggtgccgtggggcaggggcgggaagcctgtccagaccaagtgtgtgcccagaccaggtgtgtgccctgacctcctgcccgccctgacgtcctgcccgctctccacctctgcgtctgctgcagcttcctgtagggtcctccgggtgctgcctctacgcggctctgtcttaccatttcccacagcctggaaacatcccagatgctcctctgtcctgttccctcccagtgtcactgtttttcctcatcccccacactccaccctccctgcatcccccaatccagactgtctttggagcctctggcctggctctgcctgcagcttggcctctgtcctcgtgtgtcctggttccttgggccttgcccgagctggccttgctgtctctgtccccaccgccacgcacacttcacaggcgccctgcacacactgagctagactggccccaggacggggtggcagataggccccacactcactcctgtgtccggaccacctgttctctagttcagaagtggttttgtttttccagataccacattatatacttacattttacaatcgccctgtcttgctgccttcccacccctgccagaaaccctgagtggcatttgcaggtggggccgcccctgcaccccccatgcttgtgcttcccacagagtcccttttgcgtctccgaccatccccagtgccagtggctgctgcctccccgtgtccccctcagtgcccagcaatgctcaggggctcaagcttcactcagctgtagtcgtggcttctagtcccagccctgaccttttttttttttttttttttgagtcggagtctttctctgtcacccacgctggagtgcggtggtgcgatctcggctcactgcaagctccacctcccaggttcacgccattctcctgcctcagcctcccgagtagctgggactacaggtgcccgccaccgcgcccggctgatttttttgtattgtatttttagtagagacagggttttaccgtgttagccaggatgatctcgatctcctgacctggtgatccgcccgcctcggcctcccaaagtgctgggattacaggcgtgagccactgcgcctggccagctctgacctttttacaaggatacactgggccctggttggcgtccaaagcaggctggtgcyscgtcctcactgtgagctgggcgcctgcagtgtggcagccgtcagaggacacagggcgtgttgggctggcattgtgcttggcctgtagtgaccacttggtggacgaggggacattgcctctctcagtcccaccctcgggccttgcagaagcaggtgagcctgggcagggccaggcgcccagagaccctctgtggaccccaggcatctcccagccctttgggctgccagtcctccctgtgccttcaggccacgtcgtctggaccrtaaacctcagcctgggactcagatctgcctgtgtcctggactgagctgctctccgtccttttggactgggctcaggctctgagcccaccctctcccctcttcgggaagcctccaggtcgcctcttctccaggccacacctcttgggcacctcctgttgctgtgccctggacagaggcgtctacatgctcatgtgtggagcgttctgagctgtgcccatcacaagccctggccccctgagtggaggacaaagggccaggatgtggagggagggactcagagacagacttgctctaagctggtttgagtgggaagaaaggaagtgttagaggagagcccgggatccccaccgcatagcccttctgctgccacggagtgctctgcggcctgccctgccctggcagagaggcccacaccaggatggctcttcccactttcctgcgatcagggacttggggctgacccctgctgtctccaggctccctgggggcttggtggaaccctctgacctgtaggcacccccaagctgggcacgcccaggcctggggctaggcctgagccttctctctgctgtgccctcagttcccagccccagagccagggtcaccacgctgtccaaccccatggcggcctcggcctccagacggaccgcaccccgaggtacsgtaccgagcctgcgcaggcccgcctccccttacttggtgctggcggcctctagtgtgcactgagttattgcgggcactaatgtctccctccacacctgacactaacgacccgtctcccgagccccagtccttacctccctgacccgtgagtcctgccctagaaactaacactggctgccaccccacgtctcagaatctgtgtgttccagccctcctctcgcacggccctgctggggtcctgccaaccacccctgccctgggagctcagccccctccctggaggccgggcccagccagccccaggtaagtggtgccctggcccccyttgggtgcttacctggcatctccttcacaggtaagtggggcagtgtccggaccagtggacgcagcagtggccttggcaccgatgtgggctcccggctagctggcagagacgcrctggccccaccccaggccaacgggggccctcccgacccgggcttcctgcgtccgcagcgagcagccctctatatccttggggacaaagcccagctcaaggtgactggggtgcggggggtggggggtgagggtgggggctcggcagggggcttggggcctcatgtgtctcaygggacttgtccggattcttttcagggtgtgcggtcagaccccctgcagcagtgggagctggtgcccattgaggtattcgaggcacggcaggtgaaggctagcttcaagaagctgctgaaagcatgtgtcccaggctgccccgctgctgagcccagcccagcctccttcctgcgctcactggaggactcagagtggctgatccaggtctctgcactgccccgtccctctgcccgccttggtgctgggcyctccccttgggtagagccaagtggacgggtctaggtttgcttgtctgacagtgtggagcgctggaaggaggaggtgacagccacttcccacccaggctctggtgcctagaaggcagctgggaggctgggcctggctggggccagctgacagtgagagtggccagggcttgggcatgggtatgtcggagcagcctgctgggcccacgtgggctgatgaccacacgggggatgcagtttatggttctgggcccctgctgcattctctcgggggtgggtactgacaggatgctggcttggtaaacactggagggcttgaaggtagggccaccgggcatcttgagggacagggacgtccctcagtcctagagggcttggaagggggtgggctgtgaccagcaggctggaggcggtggtcggcacacccagagcgagctgtgtttgtccagtgctctgcccgcatacagggcttggggggctgtggacagggcctgcctccccgctgcctgtggacatgcgggtctctggcctggtgagtggccaggcgggagggcggtgggtccccgaggtgctgaggccgcctgtccctgcagatccacaagctgctgcaggtgtctgtgctggtggtggagctcctggattcaggctcctccgtgctggtgggcctggaggatggctgggacatcaccacccaggtgtgtggcgcgtggggctggggtgggccaggctcccgggctcctcgctgacctcctggcggtgctggcaggtggtatccttggtgcagctgctctcagaccccttctaccgcacgctggagggctttcgcctgctggtggagaaggagtggctgtccttcggccatcgcttcagccaccgtggagctcacaccctggccgggcagagcagcggcttcacacccgtcttcctgcagttcctggactgcgtacaccaggtgggcaggccgctgtgtgggtgggccgggactgtgcaccctgaccgctgagccctggcccctgacccacatggcgtgcaggtccacctgcagttccccatggagtttgagttcagccagttctacctcaagttcctcggctaccaccatgtgtcccgccgtttccggaccttcctgctcgactctgactatgagcgcattgagctgggtatgtggggagtcggggctggggcagccacgggtcaggaggggcccaggctcagtgctgcttctgtgcagggctgctgtatgaggagaagggggaacgcaggggccaggtgccgtgcaggtctgtgtgggagtatgtggaccggctgagcaagaggacgcctgtgttccacaattacatgtatgcgcccgaggacgcagaggtaagctggggcctgggtcgggtaggcggctcctgcccgacccaggtcctcaaccacaggcccaccctcaggtcctgcggccctacagcaacgtgtccaacctgaaggtgtgggacttctacactgaggagacgctggccgagggccctccctatgactgggaactggcccaggggccccctgaacccccagaggaagaacggtctgatggaggcgctccccagagcaggcgccgcgtggtgtggccctgttacgacagctgcccgcgggcccagcctgacgccatctcacgcctgctggaggtgcgtgtgatcccagagcagggtctggcctggcacccccctcctctcgctcagacaccagggtcrtgcgtgtgtgtgtacactcgtacatgcacgtaagtccggttacccctgggggttggtgtggccctgccgtctccccaccatgtgaactgcctactggcctggggtggctgtggctccccagggccccgcaccactcagtgggtgcttccagacagtgacaggagggccgtcatcagagaccctcaggtctcagtacacagcctccactctgagcacgtgtgttttccctgacctggctttgagcagctcaggcacctgttgaggagtcagcccttagagacgacagtgttttactccctctgccagaccgcctgccccacctaacgtgagcagctctgggttcttgccctgagagcttggggttgacattgaggcctctcttacccctcactgtgccatccctggtgggcctggactgaacaaggcagagatgcctgggagggagaaaggagactgcgaytgggtggtggctgggttggtgtgtaaggcctgaggcagtgtcctgcgcgtggtgctaccttttggggccatcccggagtctctgtgggactgagcaggcagaggagtgtggaccttggacctaggccacggggggacctgcactcagctccccactgttggctgtgtggccttagaggttatctttttttttttattttgagatggagtctcgctctgtcgcccaggctggagtgtagtggcgcgatctccgctcactgcaagctccgtctcccgggttcacaccattctcctgcctcagcctctcgagtagctgggactacaggtgcccaccaccacgcccagctaattttttgtatttttagtagagayggggttttaccgtgttagccaggatggtctcgatctcctgacctcgtgatccacctgcctcggcctcccaaagtgctgggattacaggcgtgagccaccgtgcctggcctagttatctaagcatcttagagcttctggytccttgtgcagaaagtggaaatgctgattcctgccttacagggaagttgtgaggcttaaatgagtcatttatttcagtgacttagcatggggcacagggtttgggggagtacgggagtcatggtttgtgwtggaggtgacccacaaagcacagacagcagtccctttttctctctagcgatgctcattgtcttaaagttgacgcggtctcattggtgctaacagagtcactcagctttgtcatgaccagtgtcagcttgctctgttgttttcttgtattttttactggtctgtgtgtttatgtttaaggtgagtttcttgtacacagaatgtagatgtagttgggtcttcttgttatccagtctaatgggtttttttaattggaatttttagcccattttaatttactgttactattgatgtggctgggtttaagtctgtcatcttgctctttgttttctctttgtccctttgattttttttcctttctttcttttctttttttaaaaaacaagtgtttttagtattctgtctactgtgagttgagctgtacatctctgtgttgtgtttcaggggttgctgggggctataatcatctgacttgaaattacatcaccctgttgacaccagaagagccttacggcagtgtgtgtccattcatgcctttcctgtcctgttactgtcacacattttatttttacgtatgacataaacacccagtatggttttttttttttttttttttttttttgagagatggagtctccctcagtcacccaggctggagagcggtggtgcgatctcggttcactgcaacctctgcctctgagttcaggtgattctcctgtctcagcctcccaagtagctgggattagaggcacccaccatcatgcccggctaaattttttttgtatttttagtagagacggggtttcactgtgttggccaggctagtctcaaactcctgacctcaggtgatccgcccgccttggccttgcaaagtgctgggattacaggcgtgagccaccgtgcccggccctgtttttgttttaaatagtcaactttgttttaaggaaattaagaaagaaggaaaaagtcttctatttttgccatttataacattcttcattctttcagtataatctggtctggttattatttctcttcagcctgaagaatttttaatatttcttgtaatgcagagctgccagtcacaaatcccctcagcttttgtttatctgaaaacatcttggtgcctttattttgcaaagggcattttctctggatatgcatttctaggttgacagctgcttcttttttttttttttttttttaattcagcagttaaactgatgtcactttaaaagatctcattactaggctgggcgcagcggctcacgcctgtcatcccagcactttgggaggctgaggcaggtggataacctgaggtcaggagttcgagaccagcctggcaaatatggtgaaaccccgtctctactaaaatataaaaatgagctgagcatggtggcgggtgcctgtaatcccagctactcaggaggctgaggyaggagaatcgcttcaacccgggaggtggaggctgcactgagctgagatcgcgccactgcactgcagcctgggcgacatgagtgagactctgcctcaaaaaaaaaaaaaaaaaagatattactttgttttctggcctgtattgtttctgcttagaagttggtgttgattcttatccttataaactgtgtataatggcaccctttgattctctgccttaagattttgcatttaattttggcttcagcaatttgaccattgtggtttttgctttcgtcctgcttggggctctttaaacttctgggtctgtgggatgatcatttttgtcaaatttaatacatttcaagccattgcttctataaattactttttctgcatgatctctccctttccttctggaactttattgtcccatacgttgctgaagctctgtttgttttttctcagtctttatgtttgcaattcattttggatgatttctgttggcttgtcttcaagttcactactcttttctttcttgtttttaatatactgaagcccatcaaatgaatttttttttaatttcttgagacagggtcttgctctgttgcccaggctggagtgcagtggcacagtcatggctcactgcagcccgaacctcccaggctcaaacaatcatcctgcttcattcagcctcttgagttgccaagactactggcgtgggccacgtgccggctactttttttttttttttttttttttgtagagatggggtctccctatgtcacccaggcaggtctcaaactcctgggctcaagcagtcctctcaccttggcctcctaaagtgctgggattacaggcatgagccaccacacccggccccatctaatgaatttaacgctttttattgtagagattccccatctgataaaccattatgtccatcttttcttttaaatcttgaaacataacttaaaaatatatataaagatggggtcttgccatgttgcccaagctgttctcacactccttgggtcaagcgattctccctcctcggcctcccgaagtgctgggcttacaggcgggagccactgtgccctgcctgtgttgtctttctttaagcttagagtcttgggttttattctcgcaggtaggtaatgagcttgtgcgtcagcttggtctgtttgaagcttgtttctaagctttgtttgggcagctctccagcacctctagagaagctccagggatagagcagcccaaggcgtgtggcctctccagggcttcagttggagttttgtgtctttgtgtcttcggtaaggtcttgccacactggctttttggaagtccagtatcttttagcattcctctagaatttgggttcagctcatagttttgtttttttttttttgaggcagagtctcactttgtctcccargctggagtgcagtggygcactctcggctcactgcagcctccacttcccatgttcaagcaattctcctgcctcagcctcccgagtagctgggattacaggtgcccgccaccatgcccagctaatttttgtatttttagtagagacagggttttgccatgtttaccaggctggtcttgaactcctgacctcaggttatccacccgcattggcctcccaaagtgctgggattacaggtgtgagccactgctgccggcgtcaggtcatagcttcttagtagctgttctctgccaggccttgtgacatcttgctttgcacatggcagcctaatttggccaacgactcaaggagggctctgtctagatttctagagcccctttgctgtggtgctccctcccctctgtgggctgccctgcagacccagctgcactagcgcccctggacgtcccgtctctgcctcctcggctcagcawgctcccgtgtgttgctctggccctgcctccctgcactgtggctgggcagaaaacaggtgactgtggggcccatcttatgtggtcccatgtcttaggctcctgtctctcaagctgcactgcttgtctgacatctggaaacaacggcttccccttcttgtccagtttcatcatttgcatatggagggagggctgttcagactaattatctgtcatggctggaagttgacagttggcctcgtgtttctcttttgaagtcagccgtcagttttattgttgctctttcaaagagagcatgtctttttttcttctggcaggttttgggacttttctctttgtttttcagcagtttttctgtcccattttggggtgtgtgtgtgtgtgtgtgtgtgtgtgtgkgtktgtgtgttttgagacagaatctcactttgccgcccaggctggagggcagtggtgtgatctcggctcactgcaacttccgccccctgagtttaagtgattctcctgcctcagcttcctgagtagttgggattactggtgcctgccactgcgtccggctaatttttgtatttttagtagagttggggtttcaccatcttggccaggctggtcttgaactcctgacctcgtgatccacccgcctcggccacccaaagtgctgggattacaggcgtgagccaccgcgcctggccctaaaatcactctcttgaatttactgtatgttctaactcctgtttcatttcagggtctattttaatgtttttctccatttttctgctgttcttttattgtaagctggacattgtggaccctgcagtgttgaagatcagtattgtgtggtcttttttttttttgagaagcagttttgctcttgttgcccatgctggtgtgcagtggcgcgttctcggctcaccgcaacctccgcctcccaggttcaagcgattctcctacaggcgtgcgccaccatgctgggctaactttttgtatttttagtagagatgcggtttctccatgtttgtcaggctggtctcaaactcctgacctcaggtgatcggcctcccaaagtgctgggattacaggcgtgagccaccacgcctggccggggtgtgtgtttttaacttaccctgttggggtctgtagtgcttcttgattatgttgtttgatgcctctggttagtttgggaaatttttcaactgttgtctccgaatattcattttgcatattccttccctccctcttgccacctccccctgtggccagtcacacacgcgttaggcctttccgttgtgtctctttcctgtgttttccttttgtcttttcgtgctctagtctggatatttccttttgaataaacttsccattaattcttcccccaggagctgcagaggctggagacagagttgggccaacccgctgagcgctggaaggacacctgggaccgggtgaaggctgcacagcgcctcgagggccggccagacggccgtgtgagtgagggccagtgtgagcgtccayggtgggcgtgttgctgggagaaagtggagtctgtccagccctgacccaagtcccaacctcctgttcccagggcacccctagctccctccttgtgtccaccgcaccccaccaccgtcgctcgctgggtgtgtacctgcaggaggggcccgtgggctccaccctgagcctcagcctggacagcgaccagagtagtggctcaaccacatccggctcccgtcaggctgccygccgcagcaccagcaccctgtacagccagttccagacagcagagagtgagaacaggtatgagggcacctcccactgccacatggacacctctgagctggtgttctggggtcccaggcagtcctctggtgggagattgcgggtgcttttgaggagcttgcctaagtatacaccaccactgggaggggtttggggtgtcgaactggtgaccacagctgaccacagcctgcagtggctgagggaggagtagagagagggcagtggtggggcccccgtgagtctggagtctggcaggatccatcccaggcagctgctgccgtggctgcttctacagatctacctgcctggccatccctctcctcgtaagggcgcctgccctgtgtagggggctgctttcccaagaccctgaggctctggtgtggggatgctccctggagtctggagggtgtgaggcgcccttcactgtctcctttctgggcgtcgtcttcttgggcctgcrgccccccatcaaaggcttctttgtggccccctggccagtgctctgggcttaggtcagttctggggacagggtgcctggtcttacctcctgggctgggacagcaagggggggacgactgctggggcctgggcttggctgggccatgacggtcagcctggccctggttctgctggaaatgcaggtcctacgagggcactctgtacaagaagggggccttcatgaagccttggaaggcccgctggttcgtgctggacaagaccaagcaccaggtgagtgatcaggtggtgggggggactcacgggggagggggctccgctgactctgtggcctcctccagctgcgctactacgaccaccgtgtggacacagagtgcaagggtgtcatcgacttggcggaggtggaggctgtggcacctggcacgcccactatgggtgcccctaagacngtggacgagaaggccttctttgacgtgagccttggccggggcttgggagaggggaggggctctgcggtgtgggggctgcggagtcagtaacccgcccttccccaggtgaagacaacgcgtcgcgtttacaacttctgtgcccaggacgtgccctcggcccagcagtgggtggaccggatccagagctgcctgtcggacgcctgagcctcccagccctgcccggctgctctgcttccggtcgttaccgaccactaggggtgggcagggccgccccggccaygtttacagccccggccctcgacagtattgaggccccgagcccccagcacttgtgtgtacagcccccgtccccgccccgccccgcccggccggccctaacttattttggcgtcacagctgagcaccgtgccgggaggtggccaaggtacagcccgcaatgggcctgtaaatagtccggccccgtcagcgtgtgctggtccagccagcggctgcaggcgagtttctagaaccagagtctatataaagagagaactaacgccacgctcctgtgcctgccttccccactccccggctgcctgctctcrgcctacccagagggtcccatctgcccctatccaggcccacctggcgggaggttggcatctttctcgtgagcctctcctggtgcctgggtccacccagctcggcctgcatgtccctgggagtgactttgctctgggggcggatcgagcaggaggcttcactggggacttgcttgattccctccacgcctcagggctggtctaggggccggcacggctggagaggaagcccccatccctacccaggggatgcagaagctgacctcacagaggcttgggggtgaaagggtgggtggtcatttgaccccagaaggctgttgcaggtccagaggacacttgaggtggacgtcagtttctggctagacccgagctgaagggatggaggccggaggcgggggggggggggggacagtgggctcccaggggaatgcaggttgaccacatctggctcctgccaggcaacgagcagcatctggcagagtaaggggccaacgcccatgggggatggaccctctcagttcttgggaattctgccccaaaagtcctttccctggggtctcagagggcccccgtccttcccttcttggtgtcactgtggcccctcactgctcttttcctattcaaacctgagtcccaccaggcccagggcttcacctgctgagctgttgtgtccttgcctgtgacgaggcctggccaggggtgcaggagcagaaggtggggagggttatagacgctgcaaaggccaagagaacatctgagagtggcagctggtgacctggccagaggggctggtgaggggcagagaacctggctagaggctgggtccctcaggtggtcctctcaggtgggaggcgagcagcaggtgtgggtgaggggaaggttctgatgacagctgcagaggcagggcccagtgctggcaggtggggggccaagaccctcccctggtgggacgttgaagccaaggatggccttggaccctgtcaggcccagcatggtcccgccacctcccccaccccacaggtggtgttgggacacctgggcgagatgtgagggtgggctcacttgagccactgaaaccagccaggtcttccctcaggccggacagatggcgcctgaccraagttcctggcacctggaaaacccacaggtcagagtaaggggagaaaggaccctgccctccctgttccacgtctgtggggggagaggacaaatgccaggcacagggtaggcggygagaacaaggcactcaatgtgtagctggggcagagactcggcctctggggagctgagcgggttccctccacccccaaccgtggtggaaagacaagctcgctggggcggggtgggggtctggtctccacctgcccctcccactcagccactgaggacaaggtggggcccaggcttctgggagggggagctggcacaaaaggaagtcctggggttgatgtgtttgagcgttaggygaagtggttccccccatcccccaaacggaaaaatgtcagtatttgctaagctgtagagacctgatgccgtgatgtggcctgttccgcctccacccattacacggggataacgctggggggtggcgggcccacaaaagaggtgctggaggagactctcccacccctggccgggccggggctttggggccggaaggttcacagtacgcggtttgtccgaacgtcacggcttttattgggagttgggggtttggggtgccctgtcaggtgatcagaacattaaaaatggactcaacgtaaaataatcttctggacccttctaggacgacatggccgtgaccggtagtgctagaaaccagtcttcgagccccyagtgccacaccatgtccccccacctgcatacctgtggtctccccctgccaggcaccctgtgctgggcacagggacatccctgccaggcctagagggccttgtgtttttaaggcagtcaaatcttgcagmctggttcagtgccagctccaagggctattgggtagctgcaagggtcaattatgcattcctgtgagtcaggtttttccaacccaggcccttgactctgccctgagcttgcagctggatacaaagtgcaaaaaagcttggctccttctgtattctttaaaaacaaaacaacammaaaaaaaaactgtaaaaacagcctccatgtccacgcccttcctggcccatcaggtcctggtggcatctcagggtcctgccccccccacccccacccccaccccggctcctgcaggccgaccttattgctgtgctctgggcttgggggcggctgaggtgcccctctgtcctccagcagggcacgagtgacctgagaggcccactcaggcagaagagacgcaagctgggccgtccaactggtttcaactgccagctttaccaatgcagcatttattttaaaattaaattaaattaaaaaaaaaaagattgcatcaccaggtagttttctcgattaaggaggcagcctgaccagggtgggccgtggccgggcggcagcagcatcacactgggccatttaaggcagctccttctggcggggcatctgtcttcctgcaggaatggggtggggttggaaccgtgcgggctgtgggccctgtccacaccccctacccccacactcaacctgctcacccgtcctttgtcactgtccccagggtggccaccatggctggggctgctgtgactgccatgatgggccctagggggaccgccacggccagtgcagaagagactgctggggtgggtatggcggggccagccttgctcagtgctgtggtgatggccacagtagcctcggggggcacagccacggctggggcagcagtcacttcctttggcgcggggcaggcagggcttaacagccggctgtcagcacacccgaccctgtgtggcaaacatggactccggttacgggcacccccaccctcagtgccaccccgcctcatgcccaaggaccagctggacaaaaaggtccaggcggcctgggagcaccatctttggcccctctcactcctgccctttgtggggtggcccaggttgtgcccagctaggcagctctgctgccccaagttccaagtactgggacaagctgcctgtccattgatgacctcaaacctcctccaggcagcactcagatcctgctcatcatcaagcgcctcattcttcaaggaccccagagcctcctgtgctatgatctcaacttcagcctcacactggacacagtgtggggaaacctcccaggggatgggagggtagagaggaccctgccgggcatctaaggggcttgctctggagggggtcgggcaccccaaggcccagcctggccacgagcagcagacgggccccctggcttcctgcagggcgacgacactgtgtctgactcagggargggcactcaggtcaggcgggggcgcgaggaagctcacctgcaggctgggccgtgacgacggtgcaggcagggctctaagtggcaagttttacgcagacagccccgtggaaaaaaacaacttactttgcacaatgatattccctgcttttcagagcagttttttaggggttgtttaggagaagtgggtaaaggtttgttttggttttgtttttgccgacagtcagtctctctcatgcgcaggccggagtgcagtggcgtgatctcggctcaccggttcaagcgattctcctgcctcagcctcccaagtagctgggactacaggcgcctgccaccacgcctggctaatttttgtatttttagtagagacgggttttcaccatgttggccaggctggtctcgaactcccgacctcaggtgatccacccacctcggcctcccaaagtgctgggattacaggcgtgagccactgtgcctggcagggtaaagactgttaagaatttcagtgactaggccaggcgcggtggctcacacctgtaatcccagcactttgggaggccgaggcaggcggatcatgaggtcaggagatcgagaccatactggctaacacagtgaaaccccgtctctactaaaaatacaaaaaattagccgggcctggtggtggcggatgcctgtagtcccagctacttgggagactgaggcaggagaatggcgtgaacccgggaggcggaggttgcagggagccaagattgcgccactgcactccagcctgggcaacagagcaagactctgtctcaaacaaacaaacaaacaaaaatttcagtgactaaactttaagaaggaatgaagcccacacaggaactctgtatgactttcaacccgaggggctctggcctgggcttcccagtgactgccggcatcgggaaacggccttggccccgtttcccgtgctgtgccccccacttgctgcagatgccctgaagacagggtggccaaacaaggggaggagctgtgagcacagacggggcctgctggtcaacagggcggggagagccagcctggtgctgagcttgcagcttggctgggggagatgcccggagccccagtaccacacagactctccaggattgccgggggtcagtgagcaggaccctctgaggtgtcaggcctgccccacctgtgggggaagggtagtacaggtgggacgcatgcaggctgagctgcattgggcggtgaggctgggggacaccctcaccccgctccaggcaggcccttcacaaccatggagccaggagtgactgggatgcaccaccagatgtgaaaggcaccttgtcccctcctagaggaatccagcccgaggacttccccactgttgcctggacctactgggagctcaggcctcagggtctttgcacagctgtgccgttgctgggtgcgccctcctccccacgtcaagcccagtcctaccctccccctcaggtttacctggccctggcatctaccccagcggtcctgccctcctgctaacccacgccctgaccccagaggccagagaggtatctgtttactgaaggatcccagggaccttcctgtggccctggggacggatggggttcagcttgctggaggggccggccagcctccaacctcctcacagggagagcctccctctccactctctccccagggatggctcttgggggctcaagggagcctgggcctctgccagcctgcaagctgcctccaactctcagtcaggatttggatgcccccagtgcagtcctgaggccgccgccccccatcctactatcctgcttctgaggcgtctcggaatcataggcctcccgtggaaggggagcagcaggcgaggtctgcgtgagccccacagatgcccgctcgcctgccagacttaaaagtctgtgcccctccccgaccaccagggtacccagatcccaggcggctcagccaggcccagagccccaagagctgggctgttctctccaactgggatctggggtaggggctgctcccccaagtccctgggggactgtctgggacatccaggccctgtcttcttgtcttaaccactcacaacagagaacacgatgttctgtccacgaaagaaggccccacacttctcccatccggcctccacgtaaacgcgtgggcaccaccgccgcctcagccagcctctgaagggtcacggggccatgggggaggcagtgtggagaagaccctggcctggcctcacctcctctcaggggagctgagacctggggacagagcctggaagccacgccctatgcacccggcaggcccgcccccgccacgccccacacacctgccgacagcctcctctgtcctggccactgtgggcagcgggggggcctcccggccgggacccctgctcaccgcatccatggcactcgctgccttctggtcgccatcctcgctgtgggagcccccagaggagctactgtcagaggccagcaggggggccttcctggtgacacacacgttccaggcacatggagaagccgggctgactgcaaagtaggaggcctgtgctgtccagtgaggcaggaggggtcacagggtgcggccactccagccatagggtccccatacatgtggccctctcacatgcagcctgttgcctgcacacatgtgcctgtgtgggagccgcatgatgaggcagacaggctcacgcacctgccatggggtctccacacaaacaaccctgttgcctcccccatgatacagggacacatgccctggtctcacaggaggacgcagaggctcagggaggggcccactccgcctcgtgtggtcctgccacagctcctttaagcccaaaggaccccaaaaccggggacaccagtgttgggagccagctgtcactcacctggagctctcagccttatctgggggagcttctgagcctgactagggggctgggggccaggggctctgatcaggccacagaacagcttcctgccaacaacccacccacacacatctcaatgctggggtcccagtgctgctgtccggaatccagggtgcagacctgagctgtgccacctactcagaccaggctcagagccagcccaatggccttgctgcctcccctctgggggcctccccatctacacgtggctgctccagtcccattgctgtatcaaaccccaatgtcaccagagacgtagcagcatgcgaggccccggccacctcctcccactgcccccaaggasgggggccagctggcctcaggccttaaactgggcaaggctgggtgccgcctgcactgctcctactcacaggctttctcagggccttggctccggctgccctcagcatggctgcattctgtgtccaccggagagctgcacctgggccctgactcggagctgcatacaaggacgaggacaggatcagtcctgggggacaggtgcctcctggccctgacaggcacttcctggcacagccccctcctgccagcgcatttgttaccagcagaaaggttggaagtcagtgaacttggcccagcctttctcctctggagctgaggtgccagctgcccacacactggaacccacgtccytcaccactcctggggctgtgggcgttgagttcgctggctcatcaaacactgccgtccacatggcgcctgctgggggagagacacagtggtcaggcgtgggcagscctggggtgctgcaggcaaaggggaggcagcgcccctgccccgggagcccctcagaggttgacaggaagatggggctgctccaggagggaggcccaggcagtgcccgtcagcccctcaaggagcaacaggggacagctcgagggtcctgacaagctgccgacacccatggggcgtgtgacctggggctcagtcaggtgcctgagggcccccaggcctccagcaggactgacactgacagtgtggaggtgatgccactgccctgtcctacccaggaccgcaacccacagagccggcagctcaccgagcaccactggccccttcctggcctcgaggatggggtgtcttcctcctatctgggatgttcctgcttccccagggtgtcacccttgctctgtcagcgaagagctcagcccctcctaacagagatctctgcccccgccaccaaagtcctgagtgcctcagtgctgcccccagggcagggtaaggagaggggtctcatcagccatgcggcctgtgaggtggactggctcctgccatagatgtcggccatgaaggtggcggccggcctgtgctgctgtgctggggagggcgtcaggcctgtgcctgactgtgtgggggctggacggacgatggagactaggtggacaccacccaccagccttggcaacgtggctgagtgaccacaactgcaaggcaggggcaggaggccaccttgcgctgggcacagcgcagcacagacccctactcaggacggctgggaaatagctggggattcaggctccgggccacagtgagccccaaatgcctcagctccaaatgaagcctccacaacacccaggccggggtaccatgtcctgtccccgatacccacactcccagcccctggcgcccagcaccaccttctgagtcaccctccacagggggggcttccttcttcccgggggccggtggggcacctgccccaggtgcatctctgtgtgcttccaagctcgccttcccatcctggcctccacgctctgggccattctttgagcaactctctgaagcatggggggctccaaacctgggggagattcagagtcagatgtctggtggcccaggacggacgcctaacatggagggtcagtggcggccccaggctcggggctgagggtgagcacagatcgtctcgagagaggagcacgagacgctccaggcctcagctctgggctccttagggtcacccgctgcattgggccccagagctggcaggacaggtgtggctgctctgcaagccagctaacgaaccacagggcgtctgacaggtgttctgggggctgaacc

SEQ ID NO: 93620 - DNA, 27875 bp, Homo sapiens
  misc_feature (1)...(27875): n = A,T,C or G
ccagcctattattaagccaaggctgacttctcgattgtttattccatgtataggagccccttgaagacatctgagagttcacgccacaggctgtgtttgagcacagggctctgcctgggtgggccagatggaggtcagtgacatgagggagctgggtacattgggagctgcccaggggtctggcaggagaccaggaggcaggggctgtaccaagaggacgggccagaggcagaggaagctgtgctgtgagtttccagggtgggcagtgacctctgattgataacctgaccccaaatggaaacctggacggtgccctgactgctgtctctgctgctgttctcttcccaggatggaggccaggggcatcagatgcaccttccctcctccgtcccaacccagggcctccagctaccctccccctggcctcactctgcagaggagcctcttctaacctgcccacctcatctctccttctccccttgcccactctggcccttccgtcctttcctgaggccaagaagtgggagcaggagggaagtgagggaccggctccaccaccgaccttggagtgtggagctgacaggtccaccgggctgtgccaggcctgaggctcctctgtgatcaggcagtgggcaacaccaagccaggcctcttcagagagaatgctgaggacggggcaggagggtgcccagggagccacgccgtggcggagcctgactgtgctctgggcggcccactgcctggggcaggggagacaatcccatcctcatgcctcctgggaaagcagcaccaggcacacagccaagcacaaaagacgcctttattggtgcccagatctaaagggcaggatgggctggtgtgaaratgacgtggaagatgacagtgcttcccctyttcccctgggagtcagcctcttcccctctggcacggggcctagggttgggggctctagactcagacccccacagcccagggcaggggaagggtcttgagcttggtcgtgttttcctcctgggccaatcacagaggcaatagtgggagtcctggggaggggcatggctggcgtgggggtggggcctggagccctcaatgcagcaccctgcaaaccccaggggcagccccccaacctgtgcctggccctgcagggtcagctaaggcacagtggctgggtcctgtcctgccggaggccagagcactcccggcgacctggccctctcaggacgtgcagctgggagaacacagctacttctttcgccgggtggtcctcgaactactggagcaggggttgggggctgcggtggcctgttcggaggcagctccggagtctttctgggaggctggcctgcgcttctccccgctgactggtgccagcggggaggaccggagagaacagggtgctagcagggcctgcacaaatctgacagcccccacggccatgaggagcccccagagcagggcgggggcctccaggggagacagctgagagcgagtccagtggagggcctgggccagggtgctgttggcgctgcgggtgcgaggtgggcttttctcctgtgggagggagggagggagggaggttggggaagtgcttactgggtttaccccgggaggctggggtcacccctgccacctcccccagcctggctgacacccccttacctgtagtccaaactgcctgagcagcgtctccagcgtggggtcccccagggacacggatgggaagaactcctccacccactggcgccgccaccactggctgcagcaggacccgatgttcagaagctggaggcaccccgggctccataccccatcgccagtgcccagccttacccctgctcctcagctcctcacgctccacatccccccctggtgcccggccttacccctgcaccccgggctccacaccccacccggtgcccagccttacccctgcaccccgggctccacaccccccccagtgcccggccttacccctgcaccccaggctccacaccccaccccggtgcccggccttacccctgcaccccgggctccacaccccccccagtgcccggccttacccctgcaccccgggctccacacccccccccggtgcccggccttacccctgcaccccgggctccacaccccccggtgcccggccttacccctgcaccccgggctccacaccccacccggtgcccagccttacccctgctccccaggctgggagaaccagtacttgtagcgctgggctcggacgtaggtgggcggctgcttgtggaagggatacctggccacttggctctggacaaggcggatcactgcagcgagaggcatcagcgtggcccccacagtacccgccctgcccctcccctccccaccccgctccaccccagcccactccacaccccccaagcccgctccgcacctggctccttgccctgmagcagrcgcaagaccaggcttgtgaaccacgggctgtgcgtgtgtgggcccagggctgcaaaccacatctgccagtccaggcgtggctgrtggggcaccacaaccgggggcggccggctcaggttcccaggcttgtacatgaactcgatctcctgccaggcaggccgaggtcagctgggcccgctgacctgggccccaccaccctgcccgccctgggagggctcaccrtccagtggtggccgtcgtaactgccctccagcaccacctcaggccgtccaccaagcccagtcatgcggcggaagaggccgtaggagttggccagctgtaggtgctccacggcaccaaacaggcggtgggccccggtccagaggcgcccgtgggtcccgggctccacgtaggagtacggcacctggagacargtgggaggttctcagggctgccctgcccccagcccatcccccagccctgcagcgctacccaccaggctaatcaggaacaaggccacggtcgcagtgcccacaagggacagttggactacagcactgagcttccgtagccagccccgcacctgggtccacctgtgggcaaggacccaaggtcgtcaggccggccctgcacacctgtgccccctccctgcttcctgggccatgtacctccacagggcactcagcagctcccagaccagggaggccacacccagccacacagtgggcagcgtcagtgtcttcagccactgagaaaactggtggaaggtgaaagctggtggasgaggggggtgtgaggactggyccgcccctgccctctggcccccccaggtcggcactcactggttctggagtggatggtgcgctgctgccagtcaacctccaggccaaagtagtgcacagtgccataggccagaagcccgtagacggctagttccagcagcagcgacagggtggccagcagggccttgggccaggctgtggggcaggacagtcatgggtcagcagagggtccccagccagggggctggggtgcagctagagtgggagtcctgtgggggtgttggaggggagaacccctgggagggcagggggctggacaagtgacacgcacaggtggccgtcttcttgcggctgccrtggccaggctcagcagccaggtgctggtcgtccarcagcgcagtggtaagcaccagcgtcatcaggttgaaraarttgtagttgccggtgatgataatcaggacctgcagcagcacctgggggcggcccgctctcagtgctcccggagactgacgcctggccccgtggcaggcacccacctccaccctgcagggtgcatccctctgctacaaggccttcccaacagcggttgccagctgtccccgggagccaygctgtccccaacagggcacgctgagcagcgctgaaggccgagccctgtctgcctctctctgacagctgcggccctcacccacctgcgagtagaaagcagccaagcgcaggcgtcgaatgggggcgaagaacaggggcggcacagcgatctcaattaggaaggtggccaccacgctgagcttgtgcagccagaccggcaggtggtgtgcgaaccaggcggcgggcgtgggcaggcactgggtctcgtagtggtaggtgagggctgcaggcgagggcaggagtcagggctggccgagcccccagactaccccaggtccagaccgggcccctcaccagtgagcccccaccacgcagggcagcggctggtcagcttgaccacgcctgaggcgaacatgaggcggaacagcagccatcgcaccagccagaaggggaggtcttcgtggggcagggcccctgcctgcctgccctggggggcctccttgcggtgggaggctggcctcagcggggccaccagcacggccaggaagccagtctctagcagcagggagtccctatggggagagcaaatagcaccaagagcccctccccacacagctgcttccctcggaaagtcctcccaggaagggcagagccctcccccaccccctacccagcctcccacagccccaggcccagccgtcactcaccactggaaataaaggaacacctggcccacctgcggagagaggggctgtcagggagcgggtgtgtctgtggactcaggtaaggtagaggcaggggtgggtggtgggggttggagatagagtgagctggtcacaggtcccacttgcctggcaggctgacaggtaggcggcccaaagcagcaagtagatgacrgggtggcgcagtgggctcagcagcagggctcccagggccactagtgcacccagcaggctcagcagctccaggccctgggccgtgtccagccccagtctcggcgcttcccacagcagcgtcggggtctcccacagctgctgccagcgccccttgccctgaggccgcagcgtcctccttgcaggtaggatgccctcggggccatacaggcctgtgggagggcatgtcatggccaggccctggacagcccttgcagactagactacctctgagtcagggcctgcagatcccccagcctaggtcagagcatgcggatacctccatccctaggtcagagtctgcagtccctccagagcccgtcccccaggtcgggacctgtcaaaaccccgtcccagggctagaggcctgctcaactacctgagtcagggcctcccacccagcagagcccactgccctcttccaggtctcagcccgatctcctacctgtcccaccaggtctgggaggaagcctctctcccacctctctcagagttctgtcccccaccccaggtcagagtccagagccttacgggaaatggatcaccgcacaccttcctacccccacagcggcctgcaggacacgaaccgccgccccctaccccacgccaaggcctggccctcactcccaaccccggactgcgtgagtgccgggcacagagaaaagaggacatagggtcccgcgccgaggctgggggtgtcccaccctgggtgccttcacctgggatttgcgtgtagagggaagcgaaagcaaacatgaagacggccgccacgccctggaggaagagctgccgcgggagccgggagcccgccatgtccgctacgcggcccgctagagcagggcccgccctccgcgtccgcccgcccgcggcagccccaggccccgcctcctcaccgccccgcccgcccaatccgtggcagccccaagccccgcctcctcggcccgcccgcccgcccgcggcagtcccaggccccgcctcctcaccgccccgcccgcccaacccgtggcagccccaagccccgcctcctcggcccgtccgcccgcccgcggctgccccaggccccgcctcctcaccgccccgcccccccaacccgtggcagcccccaagccccgcctcctcggcccgctcgcccgcggcagctccaggccccgccccaccccgccccgcccgacccacggcggccccaaaagccctcccgtccaaactggtggcagcccaaagctccgcccaccccccccctcccggaggcttcgaccccgccccgcgactcttccggtgagctcccgctgcgcggcgccggggttcgcctctctggcttttgcccacgttacgtcatagacatgcgcgcgacgccgcgcctacgcattttcctgggcgggaacagcaaaatggcgccagaactagtggygggctgaggacgccgtacccctcggaaggcagccctgcggtccctttgccgcccgttccctcccggacatggaggacgtggaggcgcgcttcgcccacctcttgcagcccatccgcgacctcaccaagaactgggaggtggacgtggcggcccagctgggcgagtatctggaggaggtaagggcggcgggggagtgacgcggggtgggccggcgggtggggctgcggggcgggggctccgggcccggggctgtgggcgccccaccgyctccacgcctatggctatctggcgctctggccgcgcaggtcctcgggctccctgcttcttttcaaactccatctctgcctccccaaatcatcccttgttggattagcgtggacctgtcattgcaggtttctacccgtcagcgagccgtgaatgattgagtgggtggtgaccagccgtttctctaacgtagtggaatagactagaaagcattattgcttttattgcagttattgcgagcatgcttgtgtgtttgagaggtctggatcacgatgtcagaggaattttttatcttggattttcaaaccaatttcaagctattgccatgctctatcctgttagcgattagtgtttcttccatgtttgacagccctgtctagacctgtgttaagctgtctgctccatatttgcgcttcatttttactcctcagcccagctcagtctggcgtccacgacacttaaatgtttcttgtcttgatcagcagtgatctccattctaccaaatccaagggacataagtcagcatttgttggactggccactcctttctttttgaaacatggtggtaggattttttttccctatttcattgcctgatttttcttttctatccagtctctaagtgttgagttcctcaggatggggcctaggtcatcttctgatgcatttaccctgaagtgtcatttatttctatgattttaaatattgcctgtattaggacaactaccagatctgcagctccatcctagatctttcctccaaatctactttacatatccagctgctctcttgacatctagtgggtgtcacgcaaacatctcatttaacatatttaaagtggaactcttcatttttctgcttaaaccccagcttttcccatctcggaaaatgacaccgctgttcaaccaaaagcaaaagctaaatgtggctatagtgaagccccatgcttaacactcagttcatccatgaattccatcagttataccaccggaatatcacttgaattcatctgttgtccattttatttggtctaggccaccattgtctctggcctggatttgtgtaaaaccttcctatttgggttcccttatccctgtttttgtcccgtccaattcgtgctccaaccagcagcaagtgtgactcttaaaaattaaaatctggccacagcactgttttctgcctaaaatcaacccctcagtggctttccattatgcccagaataaaacccaaatttccttctctgaacctggctctgctctccattttagcctcattttgggctgttttgtatcttgttcttttgaaccagtcaacctatggcccctccaagctttttcttggtggaagrtcttcatgctttctgcccccacttgggaatcttcttttttgkttttatttatttatttatatattttgagacggagtctcactctgagacggaagtgcagtggcgcgatctgagctcactgcaagctccgcctcctgggttcacatcattctgcctcagcctctgcagtagctgggactacaggcgcccgcctccacgcccaactaatttttttgtattttagtagagacagggtttcaccgtgttagccaggatggtctcgatctcctgacctcgtgatccgcctgccttggcctcccaaagtgctgggattacaggcgtgagccaccgcgcccggcctcttttttgtttttaaataaagagggacttcatatggcaaggaaaaggagaaaaaaaaaatcagagaggaggatcttactgtgttgcccaggctggtctcaaactgctgtgctcaagcagtcctcctgcctcagcttctcaggtagctgggactatagctgtgcaccaccacacctggctgggaatattctttcaatgactgagtttgttttcttttctttttttgagatggagtcttgctctgttgcccgggctggagtacaatggcagaatcttggctcactgcaacctccgactcccaggttcaagcaattctcctgccttggcctcccgagtagctgggattacaggcatgcaccaccacgtccagttaatttttgtatttttagtagagatgggtttcgccacattggccaggctggtctcaaactcctgacctcaggtgatccagccagctctgcctctttccaaagtgctgggattacagacgtgagccaccacgcctggctgactgagtccttttcattcttaaggtcttagtgtaaatgtcagctgaccaccctatctaaaatagtcctctccatctcagcaccttacacactttagaatgtttatcataaaccatttaaattttttttttttttgagatggagtcttactctgtcgcccaggctggagtgcagtggcatgatctcagctcactgcaagctctgccttctgggttcacgccattttcctgcctcagcttcccgagtagctgggactacaggcacctgccaccacacccggctaatgttttgtatttttagtagagacggggttttaccrtgttagccaggatggtctcgatctcctgacctggtgatccgcccgtgtcggtgtcccaaagtgctgggattacaggcatgagccaccgcgcccagccaaaaaaaattttatttatttatatgttttttttttgagatggagtctcactctgtcacccaggctggagtgcagtggtgcaatctcagcttgctgcagcctccaccttctgggttcaagcagttctcctgcctcagcctcttttttttttttttttttttttgagacggagtctcactctgtcgcccaggctggagtgcagtggtgcaatctcggctcactgcaagctccacctcctgggttcacaccattctcctgcctcagcctcccgagtagctgggactactggcacccgccaccacgcccggctaattttttgtatttttttagtagagacggggtttcaccgtgttagccaggatggtctcgatctcctgacctcatgatccacccgcctcggcctcccaaagtgctgggattacaggcctgagccaccgcgtccgatcctgcctcagcctcttgagtagccgggattacaggcgcctgccaccacgcctggctaatttttttttttttcttgagacagagtcttgccctgtggcccaagttggagtgcagtggcacaatctcggctcactgcaagctccatctcctgggttcgcgccattctcctacttcagcctcctcagtagctgggattacaggcgcccgccaccacgcctggctaatttttttgtatttttcagtagagacagggtttcaccatgttagccaggatggtcttggtctcctgacctcgtgatccacccgcctcggcctcccaaaatgctgggattacaggtgtgagccaccgtgcctggccccagctaatttttgtatttttagtagagatggggtttcaccatgttggccaggctggtcttgaactcttgacctcgtgatccgcccacctcatcctttgaaagtgctgggattgcaggtgtgagccactgcgactggccacaagccattcttcaactcatttacctgtttgtggcctgtctccaccctagaatgtgaattctgccagggcagggaccatacttatgccctcttttgtctgcttagtagagtgcctggcacataggtgtggacgttaaagtgtttgttaaatgcacatgtgatctgatgaccaaacttctctgctctcatgcatagttggctgagaaaatacggggaactgtgctgggcagagctcctgtggattcaggttttcacatcaagcagggtccatgaggacacctgttcacttggtaaatctccttcctggcttggtcagctcccttcctgctttcttatgtctgctcttccaaacctctgcagcttgaagtcctgatttcctggtttctagtattatctttttccttctgtcattttccacacactaccatgatgttctttttcttttttttgtcctttgtttttttttttttgttttttttttttagataggttcttgccctgttgcccaggctagagtgcagtggtgcaatcatggctcactgcagcctcgatctcccaggctcaagtgatcctcccatctcccaagtagctgggactgcaggcatgtgccaccgcacctggctaattttttgtatttttggtagagatggggtgtcactgtgttgcccaggctgttctcaaactcccaagctcaagtgatccacctgccttggcctcccagagtgctgggattataggtgtgagccattgcactggccagaatgttcttctagtactgtcatgatcctactctcttttatccatttatttattcattgttgttagttgtgaattgtgtgccaagaaccatgttaaactttgaaaaaatagtgccaagcaaagcaaatgataatccccactatggtaggacttcctctgtcatgggaagacgggtccaagagagtaaccgcatgggggtgtaataaatatgcatttggtgtttacttgtgttaagcacctgttttatgtgctttacacatatgaatgcagagtcctcacaaaaaccttgttagtagaggcgttagagatgtactctgaatgatagtggttcctggcagatcagaatccagcctccacccctgcgtgtgactttgtgtagtcagaaactgatggccaggcgaggtggctaacgcctgtgatcccagcactttggggggccaaggtggctcacgcctgtgatcccagcagtttggggggccaaggtggctcacgcctgtgatcccagcactttggggagccgaggtggctcacgcctgtgatcccagcactttggggggccgaggtggctcacgcctgtgatcccagcacttagggaggccgaggtggctcacgcctgtgatcccagcacttagggaggccgaggtggcttacgcctgtaatgctagcactttgggaggccgaggcaggaggatcatttgaggtcaggagttcgagatgagtctgaccagcatggtgaaaacctgtctctgctaaaagtacaaaaaaaattagccaggtatggtggtgcatgcctgtagtcccagttacttgggaggctgaggcaggaaaatcacttgaacctgggaggcaggggttgcagtgagccgagattgtgccactgcactccagcctggacaacagagcgagagactgtctcaaaaacaaaaaccaaaaccaaccaaccaaccgaaaaaatcaccagaaacttataagggatttgaaagaaaatgtatggtcctgtggagagtttggggggcttagtttgtttgagatgaaagcagttacttatttatggtgagctaaagaatgtttagctccaggtggaggaaacctggtgttggaaggattggagtttttacaaaaattagccgggcgcctataatcccagctactcaggaagcttaggcagggagaattacttgaacccaggaggcggaggttgcagtgagctgagattgcgcccctgcattccagcttgggtgacagagtgagactccgtctcaaacaaaacaaaacaaaacaaaacagaaggttccragttgggaccatagagcagaggagggcaggcagctggagagggaggctggccagcatggaggcctccctctggctccgtttaggattttgggtttttcctgccactgttaggaaaaacccaaaatcctaaacagaggcactgagcagagcgtggagagtggacgggaggggagtgaagggcaggaggagccctgtcagtgcagaggtgaaaggggaggtggtggggccagaatgggggtgactgtggagaggaacccctgggtttctgggcaggtgggttgggggctatttggagttcagtgtggatgcattcagtatgaatcttggtgaagccatccaagcgatgtttgaagaaggcagctgaacatgtgggtttgggctcagatggcaggtccaacctggggaggtgagaagacaagtgaagcccagtagtgtcttgggagtgggcaagccagccaggctgagggtcactggagagaagggccacttctgcagctcagcttccaggccgccatctcctccatgttcccttctttctggaccagctcttcaggtcctgaacacccccgaggtccttacactccgtagacgaccatgctgctgtttcctctcccttcctcccagatctgacaaacaccctttatccttcaagagctaatggaagtgactccccttggggatggcttcccagcctctgccactccttcgtgctaccatggtgcctaaaatcttgcctctccccagcacgcgccatgctttggccatgtttagatcatgctcattttcctgaagagacgtgtccagtctctgctagctgccttcacgttcccttcatctgtctggtgagcctctgcgtttttcaggcttagctttgacattatctatgcatgtgttcatcaaatatttactggacaccagtgtcaggcactgaacagaaggctggaattacactaatgctgctcacacagttcactaagggacacgatcacactaagggagcggcacagaggccccaggaatggaggggctctgaaaaagagtttgcgtggggacagctgggggtcggtgttccaggcagatggaaatgcaaaattgaagagctggaaagacacctaggggcttcaaagtgtcgtttgtggctgggcacggtggtgcatgcctgtgatcccagtgctttgggaggctgaggcaggaggatcactggaggccaggagtttgagaccaacctgggcaacatagagaaaccctgtctctacaaaaacattttttttttgagacggagtctcgctctgtcgcccaggctggagtgcagtggcgcgatctcggctcactgcaagctccgcctcccaggttcatgccattctcctgcctcagcctcccgagtagctgggactacaggcgcccgccaccacgcccagctaattttttgtatttttagtagagacgaggtttcaccgtgttagccaggatggtctcgatctcctgacctcatgatctgcccgcctcggcctcccaaagtgctgggattacaggtgtgagccaccgcacccggccttttttttttttttttttttaaagtgtcatttgctgagaaggaatacaggagatgagccagcgttggggaagatgttgggtaaagtatggaagtaaagtgtttggggacatttgaatgtactctgtggacagctatgaatgcagccccagagctaaggagagagagctggtcgggttgggtttggggctcattggcttatggttggcagcttgggcatgggatgaaggaatgtgcatggcggggggtggagcgcctggcgcactgacgtttaaggggtgacagaggagctggggctccgggaggctgaggggagcagaggaaggatggcgactcacctgtaactgtttcctgagttctctgctcagaggatggagacctcagcattttatctctgcctttcctacccctgaggttcccttttcttctctgtgtcggggatcttcctgctggagtctgtcagcctctggcgccttgtggagggagccgctgtgctgccctggttgtttgtaracagtgtgccctgggggccttccacttccaaaacaggtttttgttatagraagtagggggaaacacagagacctgtctctgccccgaaataccagggacaaccggtgagcccacagcakagctagagctgcccgtctcgggaggtgctgggcagagaccaaagatgggtggggctgccctggaagaagygagtgcagactgggccttggattccccctgtctttgtgttgtttcttgcagctggatcagatctgcatttcttttgacgaaggcaagaccacaatgaacttcaytgaggcagcgttgttgatccagggctctgcctgcgtctacagtaagaaggtgggccctgcttgacgctggtcttggcattttggtggccagtgggaccacagtsggctctccttctggggcaggtgcagtggtcgtccygtctgtgacctacctccctctctcctcaggtctcagccaattcctcagcaccttccaacaccaagaacaatttttaatttaaaatcgcacagccaggcagggagggtcttttgkgctgttgggctctgttgtcttgggggaatgacacctgctgtgtgcacttggacacagcccagggtgccacctgcacccaccttccccttccccgtcccctacttgtgggtgcctcattgtcagcacctagaaagtccacaaccaccaccctcacggtggggcctctgttctgtggaggagaaggacaggaagtgagtgacgggctctgtcctgcaggycccgtggcggcaggagctgggacagggcagggccaggacaggaggaggggctggggtgatgctggcgggagcacacgggcggaggagcagcagggctgcaggccgtcggcagagtgggtgccaagcacgaggggcctcnccaccaaggaccgtgtgatgaggcacactgtgggaaccacagtgctgtcagggtcacacgttgagaaggccacgctcgcggctgcgtggaccatagagggcagaggagagatgtgggtggcctcagctggtaaagtaattctcatgagattcctggtttgatttgagaattatttttggaaccaaaattggtggtttcttgtactggaggtttggtggtggtggccaggcctcgtgggggcaccgatggatagctgggaaggccttgggggtgggcccctcctttctgggtcctcactgcctgcatctggtcaccaggtggaatacctctactcactcgtctaccaggcccttgatttcatctctggaaagaggtgagttctgcagccactcactgtgctgccctgcatgtggccagggaggcccctgcagctcctgggatgcccacgggatgtgcttctctctcaggcgggccaagcagctctcttcggtgcaggaggacagggccaatggggttgccagctccggggtcccccaggaggcagagaatgaggtgagtttctttggcatgtggtccccgcccactgtgtgtttgcctgggctcygcccccacgagctctgtctccctccagttcctgtcgctggatgacttccctgactcccggactaacgtggatctcaagaatgatcagacgcccagtgtgagtcctggcctggcccctcttaggctggggtgaggtcagcactttccctggggctgtgttgagctgatggggtgtgggaaggtgtcattgccccatgtgggtcctgttctccactggagtggaagggtgcctggctcacccacccttggcctccatgcaggaggtcctcatcatccccctcctgcccatggccctggtggcccctgatgaaatggagaagaacaacaatcccctgtacaggtagggatctgagcccagcgacggggagggaggcctgcctgggaagggtctctacagcaggcgtgtttttgccagcacagccgtcagggtgaggtcctggccagccggaaggatttcaggatgaacacgtgcgttccccaccccagaggggccttcatgttggagccagarggcatgtcccccatggaaccagcgggcgtttcccccatgccagggacccagaakggtgagggcttggatgcggggggcttggtgggaaggaagggagggtcttctggttggactcttgtggggtgccctgtgcttgccacctctggtcttgggagctccctgtctctgggtgcctgctctagtctagacaggttggctggtgctcatcccacccatctgctgygccttgattacaagttaacatggtctcagtgccagagacctggtgcctggctcagggccctgctgtctccccccagcccaaggcctggagtctgctggtctctgccctcctgctggccccttggagaggcttgttgaacaccgggcagggaccatcttggagaggggctgggctgaccttgtctgatccctgtctctcccagacaccgggaggactgaggagcagccaatggaagtttcygtgtgcaggagccctgtcccagcactcggcttctcccaggagccaggtgagaagagagctccccggtgggactggcagggcagccaaagaggggaccagggaggcagcacccagtggacagggctccaaggggctgctctyagctgccagcctcatgccccttctgtggcccatgggagtgaggcctcgccccggggaagcagccacagcccccggtgagcctcagcccatcttggttcactgactgccctctgactgccctcctgggtctcctctctgggcagatgtggatggctgcatttaaagaggaacatttgctaagaaataaaatgaaccaagcagagcayagagcacaggagcacgacgaggatggtgcaaggcacccgccaaatcctctgggctccrtgactaaagctgagggaggaagtagccatcagggtccctttggtgccgtctggtctcggcactccttggagctgatcactctcttgctccctgcctaggcccctstccagaasgcccgatgcccctgggtgggggcgaggacgaggatgcagaggaggcagtagagcttcctgaggcctcggcccccaaggccgctctggagcccaaggagtycaggagcccgcagcaggtgggacccacatggaggcctgcagaacctgagctgtgaactggcaaccctggctctggggccgagtcaccttgcacaaggaggacagtggtatggccttggccccagaccactggtctggggcagaagcccacctgtcttgcagcccgtcctgcaaccagcccttttgaagagcagcttctgtgttcctcccctctctgagcagaactgatgctcctcagagtagtgggctggcgtccaaggatttgagccctgtcgagctcacggcaacctgggatggccgccggttgccaaggcgcctctctgcagtcgggctggtaggagggagtgtctggaggccattgctgcctccctcaacccccggggtcaactgtacccagcctagagccaagaaatccttcctttttattcattaaaacaaaatcaacctgatgcatacagaggaaatgttaacgtttcttcactctagttggtagatggcatggatatttgtcatattctattcatttttcctagttttgaagaagagtaccccgtgaccactgtttgtgttttctgtttgttttttgagatggagttttgctctgtcccccaggctggagtgcagtggtgcgatcttggctcactgcaagctccgcctccygggttcacgccattctcctccctcagcctcccaagtagctgggactacaggcgcccgccaccatgcctggctaattttttgtatttttagtagagacggggtttcaccatgttggccaggatggtctcaatctcctgacttcgtgatctgcccgtcttggcctcccaaagcactgggattacaggcgtgagccaccacgcccggcccactgtttgtgttttaaagtttttcttagggtttttgttttaatacccccagagagtactagcagggtttatttttatcttattttatttatttatttttgagacagggtcttgctctgttgcccaggctagagtgcagtggcctgatcttggctcattgcagccttgactctctctaggctcaggtgatccttccacctcagcctcccgagtagctgggactacaggcgtgtaccaccacacccggctaatttttgtattttttgtagagacggggtctcactgcattgcccaggctggtcttgaactcctgggctcaagtgatctacccgccttggcctctcaaagcactgggattataggcgtgagccactgtgtccggtccctgtaggttttttttttttttttggacggagtcttgttcttttgcccaggctggagtgcagtggtgtgatatcggctcactgcaacctctgcctcctgggttcaagcgattctcctgcctcggcctcccgagtaggtgggattacaggtgtgcgccaccacacccggctaattttttttgcatttttagtagaggcgggggtttcaccatgttggccaggctggtctcaaactcttgacctcgggtgatctgcccgccttggcctcccaaagtgctgggattacaggcatgagccaccacgcccgacccttgtagggttcttgatgttaacccaaggtggagttcctggggtacccagagccttgaggggagaaagaggagaagtggggaccctgtgactgtctttgcagagtgctgccctgcccaggaggtacatgctgcgggagcgggagggggccccagagcctgcatcctgcgtgaaggtaggagtgttggggccctgacccccggcagggagggatgggcggattcgaggactggctgcctgcccatcatgctcttgctcctgctggcctgtggtgttcccagcctgtggccctttgcacttgctctcttaaagaccccytcatgcgactctgggctcccaccctctctctagtgttcccctctgtgatccaggatttgagtgtggtcggctctgccccaggctgtcactgcacttgttgcctgggctttgggaaggcggctgtgcaccccctactcctctgggagggtggctgtgtaccccctactcctttgggagggtggctgtgaaccccctactcctcctttgggagggtggctgtgcaccccctactcctcctttgggagcgcggctgtgtaccccctactcttcctttgggagggtggctgtgcatcccctactcctttgggagggacggctgtgcaccccctacttctccagcgccttcttgtgctctgtgcccaggagactccagaccyctggcagagcctggacccctttgactccttggagtctaagcccttcaagaaaggtaattgggtggaaggtacctccactcaggtacccctggctgggtttcctggggcatgaggtrggggggtgggagtgggctttgcaccctgatcccccagcggctctaagacagtccctgtttgcccccaggtaggccttactctgtgcccccctgtgtggaggaggctctgggacagaagcgcaagaggaagggcgctgccaagctgcaggacttccaccagtggtacctggctgcctgtgagtgggtgtggtgtgcactccggaccactgggagctgggggctgggccagggccagtggaggaggatcagcacccttttcccaatgctgtgggcagctcttggcctggctggtgctgagcatgttctttcacagatgcagaccatgccgacagcaggcggcttcggcgaaagggtccgtcctttgcaggtgaggctgaagtcctcggggaagacagttttactctccttcccctacctcttcccccacctggtgtcacccaaagccttgggtggactggcacggggcctgggaaggacgagggagccctcacaaggcctttgtctgcagacatggaggtcctgtactggacacacgtgaaggagcagttggaaactctccggaagctgcagaggagggaggyaagtcccagctggtcagctgtgatctaggaccccgtggtggccctgatgggaggtgacagtgcccctcacagatgctttctctggacaggtggctgagcagtggctgcggcctgcagaggaggaccacctggaggattccctggaagacctgggggcagcaggtgggtgcctgccagggggtggggtggggcttggcacctgccgactagctgcctgcgtgctgttcactctcccacctcccagcagatgactttctagagcctgaggagtacatggagcccgagggagcagaccccagggaagccgctgaccttggtaggtgggcagcgggctaggagtgctgaggggccactggagctgggggcaggggagagcgtggccccttagctgcccagctcacagctaccccttcccagacgcagtgccgatgtccctgagctacgaggagctggttcgaaggaatgtggtaggcctgggttagagggrgacggggaggggagggggacaggtgagcggtgcccaggcccctgcttgggaggcagtagctcctgctgatcctcccctaggagctcttcatcgccacctcccagaagtttgtccaggagacagagctgagccagcgcatcagggactgggaggacacagtgcagcctctgctccaggagcaggtgaggcggggccgctgggaaccagagctgtgtgccacgggtctgtccagggccttgcctctctccgcagccaacatgcccctcccctgtgcaggagcagcatgtgccctttgacatccacacctatggggaccagctggtctcacggttcccccagctcaatgagtggtgtccctttgcggagctggtggctggccagccggccttcgaggtgtgtcgttccatgctggcctccctgcagctggtgagtagcctgggatacgtgggagggggagacggtccccagaccctgctgatgtgccacccctgcaggccaatgactacacagtggagataacccagcagcccgggctggagatggccgtggacaccatgtccctgagactgctcacgcaccagcgagcgcacaagcgcttccagacctacgctgccccctccatggcccagccctgagtggggagcaccgaggcaggggtgggggaatgtgtactgaggagccgtgygtctgctcctggctggcccggcctaataaagcagtgttgccatctcatcttccccctaaaaacccttttatgtacacctgcgcagagaagagggctgcctggcctccctgggccgctggtacagatcacacacacacacagattaaacgcagcccgtttaatgatggggcccagactgcagtggctcaagacaggacactgcggaaagccgccatgtgccgccgcacactgtctgagatctgctcagccgatctgctccggccgtagtaatccgtgaagaggccgtcagggttgagcaggtagatggcaatgragtggtccacgatgtagtcctggtcctcatccttggggcckgcattgtagtacacgcggtaactgtgactagcctgggcaacctgtttggtrgagccggtcagacccaacagtcttgggtggaagtcctggacgtagcgggccatggcttcaacgtcgtcccrctcggggtccacagtgatgaagacaggctgcactggaggcaaaccaggctctgcttccagctgccgcaccacctgcaccagcttctccagctygtctgggcagatgtcagggcagtgagtgaagccaaagtacatcagcacccactggccccggaagtcagccttgcagcgagcccggcctctrtgatccagcaggtggaagtcgccctggcccacagctgcctggcgcagggcttctgttcrcttttgctgctgcagcctctccttctcagccctcagggccagccaggccccaccgagtccagccccgaacaggcctgtgatcagcagccgggttcgaagcccagggccctrgggctggccctgcccacctgtctctgcagggccctgccttgacaaaagccaggacctcagatgcagggcctggcctcccagggtcccagggaggacccgaggcttgagctgagagagcctgtgccaagctgtggggctccgagtcagcagcagcatggatctgatgctcctggaaacaagcacaggcgtcaggagccagaagggaaggcccaggacagtgcctgggctgcccctgcgacttgagaccagccacccatctgaaggacccagcccacgttcaggcttaacaggcatttgcagctgctcacctgagctcagaactccacctccaccaaacatccacacctgggcaaccacacctgtcactcctgtcctctacctgggatcaccagcctgtcaccgcaccctgccctgcacctgcacctcagcaaggtgaacctcttgctgacggaaagcattccaagtgcatgccttgcctgaactaaccacgttatctatttgcaataaacccatttcttaaaaggaggtgggtaactctctggcttgcaatccccgagagcaaccgattcctccaacactttcctgttacctccagccacttcaaccaaccgcggccttcctccacactcccagcagaaaacctgcacgacctacccccggagctcagactctgcccgccggctgtgtttaacctctcctggcagagacgcacgacacttccacccgccacaaaaccccaccctcctcacatccaggcttcccagcagctcctccgggctcacagccgacgccctgcctttgcgttggtgacctttgagcctttcccacgggcccccgcagaaggtttgctaggtggaggtctcaggactcccggtcactgccccctcctgctgagggcaccctcccgaggactcactgcacccccgcccgggcggttctgggtttgtgccctccccagcaaggccagcgccctcgtggccagaaaggttccaggaccactcgaagcgccgcgcgagcgcgttataactgtgcttggccgcgagaacaccggtgcctgctgggagcctcccacgggcgccccagcctcgctccggcctccagcgcgccctggggtgtgccccgccagccccgcgcagtagccggagctgggaaactaccccggagtccagcgagtcctcagggctacctcctcccctcccagccccggcgtccgcacctcgcggcggggccgcgcgtcagtggaccaagcacgagaggaagcgccgacctccagctccctgsgctctgccccgccggctcagggaaagcgggcgccacacgctcacaggcagggcgcaggcgtccccggagctgcgcatgcgcacacgggcgcagccgctgacaggctctcagcgcgtgcgcggaaggcggagcccgccgggggtcacgtgttcatcgagacggcccccgcctccgcagccctggatccttccgctcccgcccaagcactgacaaggtttcgcggcaaaggagctttattgctgcggcggcagaacgagctctgcgaagggcragggggcggcraatggcgygcggtcggagagtacgagcgcctcctgcagggcgcggctctgcgggccgctgagcgcggggccgtcccggtgcacgcggagccagggggtccctgcagagcgaggggctgttagaggccgcgcggccggagctgggcgggggtgcggggccagcagggcgggggcggcgctcaccacggcgcagcctctgwcccacgtcgaccagcagctctgcgcccacccccaggcggagcggctccccagcgcggctgcgcccggccccgagctcgtgcagcaccagcgccagcggcagcgcccggaccagctccacggtgcctgcggggagaggggctgagaggcgcgggctcgggaaggggcggggcctcgggaagggaaggggatggcggaggcggaaggacggggactcccccgacgctcaccatctgcgggcgccagcagctcctcctgctcccgggcgcgaggcagcagctgccggcgttctgcgggacttcccgagcacagggctcgggccagaccgggatccacgccctgcgccgccagcatccgctcgaagcggccaagggccgagccgtcgtccagcgccgcggccacccgggcagcgccctgrgcctgagtccccgcgtgtccgctgagccagagcagggcgccccctgcgggcggggacgggtcttaggcgcggccgggtcggggcggccccagcgggaagcaccccccgccgcctccgctcccctacaccccgtccccctcaccgagcgtggtgaccaggtcccttaagtctggcgggcctgcgccgtccatgcagagcagcgcckyctccacctccagggcgtggcccacgcagcgacccaggggcttgtccatggcggtcagcgctgccgcgacccgaagccctaggctggctcccacgccaacctgcggagaggaggctcagcgtggaccccccatggcggggccttctgcagccggttcttggtcgaactccagcccctgctgcaccctgggttgccagccccccagcatgaagtcagggaaggattggggtggggaagagacacgagtgaagtgcgacacctcgccatggggccaggaggaacttgtacttggtctggggcaggaacgccacagagggcttccccaggtccaggccgggccagccttgacctctaaagtcacagcaggttaggaagccgtgaaggagggagggacttcgggcagaagagggtgggactggggttaggcaggactgctgagtggagggaggcagtggggacgggaggggtgaagggtaggctgggcccgcatcaagacgcttgcccagggaaaggccacaccgctcaccagcgtctttgccagctcccgggcctgctcctggttggggaagacggcggcccctccgaacttaacgtccaccaccagagcggacagcccctccacgagtytcttactgagaatggaggctttgggggaggcagaggaggttggagacaatggagaacctggagcttcttgggagagttcggggatgccgactttggggtcaggggccctgagcattgagggtcaagtcccttattatgggggtggcagcacctggtgggttgagtatcaggccaccccacatggtggtggtcaggcatcttgtgatgggggtaggggggcacacggtcaggtgacgggtaactcctaacgagaggcccttgacttgagtttggaggtcaggagcctgtgaacatgcagaagcaggccatggagtcaggtcacctgtgatgagtggcaggctgtccacggtggctgtcacatctctggctgcatataggattccgtccgcaggaaccagctgctcactctgacccacgatacagcagcccgcctggtccagcagcacttgcatctggtcagacatcccctgttctcagtgacttatggtaaatgacttagcagctttttttttttttttttttttttctgtgaagagtcttcctctgttgcccaggctggagtgcagttggcacaatttcggctcattgtgacctctgcctcctgggcttaagtgatcctcccacctcagcttcccagtagctgggactacaggtgcgcaccaccacacgcggcttttttttttcttcttttttttgtagagatcaagtttcactatattacccaggctgatctccaactgggctcctctgcctcccagagtgctgggacagggtctcactctgttgcccaggctggagtgcagtggcatcgtcccggctcactgcagcctagacctcccaggctcaagtgatcctcctgcctcagcctcctgagtagctggaaccacatgcgtgcaccaccacacgcagcgaactattttgtagagatggggttttgccgtgttatccaggctggttttgaactcctgggttcaagggatctgccctcttcggcctccccaagtgctaggactacaggtgtgagccaccgtgccccgccagccatctgtgattttgaccaacttcccattttatgatcctaatcaaagttccactgatgatttcggcccaggcccagtgactcatgagtaaccttgaccagtgttctcattagtgaccctaatgatccaccagtgatcttttagtgattctggccagggtctssatcatcaacctggattaatgactgatccgtggcgccccgtacctgctctgggctctggatgacattgaatccaggaatagactccagcttatccaaggtgcytcctgtgtgccccagaccacgtcygctgatcattggcacctggtggtcagggatgctgagtaccctgcacagtacccctcccccacctctgtgcatcccttcaccttccctggctaggagtgcagctggatttggaaagtatttaagcagctataggggtgcccagctggtgagggaatggaaaggaagttttcttggttgagaagtgtcagtaggggaggaggttggtacctgtccttggggaaacaaggcttggggcagagggagggaagtcctcagctcctcccttgggggagctgtctggggacccaaggggaaaggggtctgaattccatcagtggatctttttcctgctccaaggggcctggtctggagccagaggggccccaagcgctgtgctggggaacggggtggggagaactgtgctggggagcagggtggggagaagccttggtagggtcttggaggctttgggccaggcttgaggttgggagctgcctgtggatggactggttgctgcatgtgcggtataggctcccgtctggaaaggaggtggtttctaaccttgcagccacatgccgccagggcaggtgcgaggaccaggctgaccttgtcacccacaccccctgtggaatgcttgtccacaagctgctggcgccaggcctctggccactccagctgctgtcccgactgagccagggcctgggtcagcaccgaggtctcctccagatccatgccccgaagtcggatggccatcagcatggcccctggtatgtgggggtacgcgtgagggtggcagcccacagcggtggggcaccctggggccggtgctggtagtggggcaccgtcgcacccccagggacccaaagtctctcgggctgacctcccagtcggggtcaggaacgcccaaccctccccacgcaccgatctgtgcrccctgcgcgctcccattcaccacagcggccacgaagcccctsatgtccgcttcgctcaggcggcctccgtctcgcttcatgcggatcagctccgggagctgcttgggctctggcgaagggtcgggaagtccctggctcccttccccggagaagtcaccaggcgcgggtggggccccggttcccggggtcatcaaggctgccatcgctccgggcctgcggggatgcctgacacgtccggggtctgcggcctcccggcgtcggtgtctgagccacgtgctcctgtcccgacccctttcccgtgtctctccggtgtccgcccctcggtcccgtgtctgtgtcgccctcgtccgtgtctgcctcccgcttccccgcctcgcgacttgagccccgcccgtacctgcttagggcgctgccctcgcccgcttgctccggatcccagcccaggtacccggcctcgcccgcgggtcgggaccgtagggttcagggttcgcgcacagcggtccactgccggcggcg

SEQ ID NO: 93621 - DNA, 42501 bp, Homo sapiens
aatggtatctgattttaacttcagtaaaagctttcctcagcttattgaaagttagattttaatagctacttaaattttctcctctgaaactataaaagcctgtagggtagagtaaaagtacactgcctgcaaatgaatcagctttgcatggctttgaacagatgacttaaccttgtaccttaacttttttatcattaacaatgaggataataacaataataatatctctcatcatacttatttatagaattaggtcttaaaaacacattattgacacacttaacatctctgatcatatttttaacctacaccataaaaatttagtaactctgaatgaaaaattcttgaactaacagctttttacctttcatgttctatcattaatatgttgcagaaggccgggtgcggtggctcatacctgtaatttcagcactttgggaggccaaggtgggtggattgcttgaagttaggagatcgagatcagcctggctaacatggtgaaaccctgtctctactaaaaatacaaaaattagcttggtgtggtgttgcacgcacacctgtagtcccagctgctcaagaggctaatgtgtgagaatcacttgaatcctggaggcggaggttgcactgagccaagatcgtgcagcagtctgggtgctgggtgtagcactatgctacagcctgggtgacagagcaagaaactgtctcaaaaaaaaaatatatatatatatatatgaaattggtgctttatcttatctgatcccacaagatggaaaaattaaacatagatgaaattttttgaataaaatgtcaacatgtatgcctctataaatatacagacttaaacattatatgcatggatgcttcctgtaacgatcagttgtttgtaacttcacatcataggcagtttaggtactgtgtagatcagtgctgtctattctgtgagctgtaaagaatgaattttgtgtgtgagtctttgtcttttgctgggctaggtgccagagctccggcattggaaggtggttgacttgcagattggtgagaagaatttactgacaacagtataggtttgaaaaggaaagttttactagatagaaagaaagctgcaaaagaatgcagcagggcacctcagcaagggaggaattgtggtggattttcccttaggcgtgtttatgaaccttaaagcgggagtttaatggtaatttggaccctattagccacataggtcatgataaatggttaaatttgtaggcattttggtgccttgatgtcagcaagtgttgcacaatgagtttcaacatacatacattctggagatgtatggaaattctagttacttataaatttttgagaaagaagcctggaaccagatgcccgctttagataacagggaagtctaattacttctaaattcctcagacgaggagttttttcctctggatggctggcttgacggtcaccaggtgacctccactctcttcatctttgattctacttctcatctccttgagtgcactgaaatttcttactagagattcatttctttggaccttgaacacttttggttttcagagctctcagagaaaaactgatcaaaagtatgataaattattaaatggataaaaggaattttgtttgaggggcataattagtgtttgtgaaaggaatcagggtttatggggactgttcctctgtccttcttcgagaggacagcgcatgttatttaataggactgggaagtgagaaggccagaaaaccaaagaagaggaacgttttttttctcctagcttttattgccaccttcacccgacctctgatctggtgaaagaagttgggaatatttacaggaaatctggattcctgagatttctaaggaacactaaaaatctgacactggactgcagaggcaaatattttaatttttcactctgctatcgaaagaggtggcggacagattcaaacaagaatataatgtaggactctttacattctgtgactattaaaggaacaaaaggcagggtgcttcagtactagacttgcatggggccagaaagttggggggtttgaatttaagctgcctacttcataatttgtctaaggctgggccactttcccaatcttttttgctattatcctcagggccttatgaaataactacaatgcaacatgactattaatgttatagttaatctgattatatgatttttgctgatgtatttctcaaagtgtgtgacttcatgcaatgattctcagccgtggctgcacgttagaatcacctggggagcttttaagcgatctgacgcccagaccacacaccaggctaatcatatcagaatctctgggggtggaagtcagacatcaccattttctaaaaaaggctttctagataatttccatgtgtagctacagttgtgagcattggtttaatgtattatcatctgtctctctcaagtagaatggttttaacatagtgattctctaatgttttggtctcagaactccttgcattagtaacagtaattgaggaccacaaatagctttcatttatgtggaccatgtctatcaatatttattgtattgaaaattagaacaggcattttacaaatacttaattatggatttattttaaaagaataaagtcattgcatctaaagacacatgttttatgaaaaaatacattttccaaagtaaaaagagtttagtgagaagattggcatttaaaaaaatctctttaatttctgactttttagatgacaactggattcccatatttgcttatgcattccacctgttgtgatatattattttggctgaagtacatgaagaaaatttgaccccacacggacatgtagtaggaaaaaggaagagtattttaatagcctcttcagataactgtggataatctccttcattattaaatcaaaacataacaaatgatagtgtcataaaaggtacaacttaaaatctgcttctaaatacatgtttttattccattacattaaaatccactgggtgtctcttatactttgagtggaacttttctttgtgactttgtaacatgatgaattgaacatttggaaaatattgcttcactgagttatgcagatattccaaatgttgagcatttcattatatataataaataatcacatttgttaaaatcaccaattttgtcataaaagttgttgcatatcaggaaactatcaagcttatggtagcagatacaagttatccaaaattccaatttttactgcaaagatccaattttatcactggcaacaaacagtgtcagttattttccttcaagggataggcgcactttattcatcttcaaatgtctgccaaatatccaagtctgaataatcataatttatcagtcattgttctttcaattaaattggaatttcatgaaaaaagtagcaagttcactatgcttctctctctctctctttttctttttttgagactgtctctctctgtcacacaggctggagtgcagtggtgtgatctctgctcactgcaaactctgtttcccaggttcaagtgattctccttcctcagtctctggagtagctgtgactacaggcacctgccaccattcccagctaatttttgtatttttagtagagatgggggttttatcctgttggccaggctggtcttgaactcctaacctcaagtgatccacctgctttgtcctcccaaaatgttgggattacagatgtgagccactgcggcccactatacttctgaaacaacggtacaaatgcttttctttgagacaattgccctttggtgtgcagcagaagtgtttgatttctacgtcttattttcccatgtgagtataaagagctgcatactctcaatttgtgcttccagttaagatggaactggatttgtcatcccacctaaaatatattaaaaatgacattcacaatggattggataaagaaaacgtcacacacacacacacacacacacacacacacgcacacacacacacacaccctggaatactaccagcaattaaaaataacaaaattttgtcttttgtaacaacatggatggaactggaggccattatctttagtgaaacagctcaactagcacatgttctcacttataagtggaagctaaataatgtgtacacaatgacatgaagagctgaataatagacattggagacttggaagggtgggagggtaggagggatgagaaattacctgatgggtaaatgtatactatgttttcaggtgatgcttacactaaaagcccagacttgcccactatgcagtatatccatgtaccaaaactgctcctgtactctctaagtgtataaaaatttttaaaatgatgcttaaatattggaaaagaggtatcacaggaaagtggtgagaaaagggaaaatgaaatgagatgagcctgatgttttctccagcttactgctttgagagtttccaggatgcagtgcaggtaggaggagtccacacagagctggtggtctccatgagatgaaaacgcagacgtgaggagctctctctcctcctgtactctgtcctgctagatttaaaatctagcttcatggagagacagcttcagaaggcagtaaaacaacaattttattacttcatcaatgacattcttaagtgaaactggctctttttcttttcttttatcgtcctcttctttttttttttctttatgcgtggcagtgaaaaatactaagatggctgggtatggtggcttacgtctgcaatcccagcactttgggaggccgaggcaggtagatcacctgaggtcaggagttcgagaccagtctgaccaacatggtgaaaccctgtctctactaaaaatacaaaaattagcagggtatggtggtgcatgcctgtaatcccatctcctcaggaggctgagataggagaatcgcttgaacctgggaggcagaggttgtagtgagccgagatggcaccatggcactctagcctgggaaataagagtgaaactccttccaaaaagaaagaaagaaagaaaaacacaatgactacaagtatagattttcctcctcaatagtacagttttgtgtcctgtattgacagttgctaaggtgccagcatttttacccatcattgcttttgcaacatcagtgcaaagtctatacagtagaaaaaatgaatcttgttttggtattattataaaagttgatttgactttggagacagccaagagggtcttggggaatccccagtatccatggaccacacttttgaaaactattgttttaatagaaccttctggtcattactactttgatctaatggcgccactttaaaggtgggactgggtgtaggaacatcctgccatggcagcttcatggagaagatctgttttggcaattgggtccttcatttccttcacatcacagtatggaatctatactataatggaggtaaaaatttctccacttgagaacagtgttatcactgtatatacaacacattttttccatgatgaaaaacagggtctgaaactttaattaaaatggaaaagtcattagttatcttccatgggaagagtttgaagaaaggaaaagttgaagtagggcaaaaatagcagatataaggtatttctaaacgtttcccaaatgaaggaagagagaaaagaatgagcgaaggaaaggaaaagggtatttagtgtgtaagacactagaaaagatatgcataaggaatgaagtgatacatacatagtggtgttggatttgtagattcttggaaagttggcagaaaagcttacatgtaaaaaaaaaaccaatgtattgaaatcagtctcactagctatgtggaatgttttagatttgtaccagatacaatacgtttgtggtggatacaggagatgcgctgcccagatctgcccccagggaaggaccctgctccagctgttggaggccggctggcccacagcctctagcagtcaagctcttttggctggaaagccgcttgcaggaaatcactccatggaggtgcagagataaggccccagacattttggcccagtatgggacaactttgaycgtctttttcagcttcaggactcccatggagttgggtgaggttgttgggcccgctttgctgctaacttctccctctgttctctcctgttccccttcttcctcccacaggggtttgtcccaagggcactccctaatacacatcctgcakgttaaactcttgtctcagagtctgcttcctgtagataccaaactgtaagaacatcttattgacttaaatataaccaaaattggagaaacttaggaaacaaaatcatcattacgttatgtgctgacattttagcttatttctatatttcttgttttgaattgctcatacttagcatgatagtacctctcacattttgtttcatttaggtttgctatttccacgttctctttcttataggaaccatattgtgaaaagacataaaggtaatagggtaaaaaaaagcaaataggctctttattacccagccactcaggaaatgcactatttcaaggttgacccaggcagcaagagaggagctktattggggaatgtgacagtggtttagttctgaaactggagccagtagaaagttctgaagggggtccgatgatcagaactgtctgtgggtttaataaaggtgtatttaattttatttaagcctggagatttaaattgtcactcaaaactctcagacatgaatagggttagcaaatctgtacaccaggaaaggagttatttacatcctgtcttctcctacagctccagaggagggcagaacagygtatttccaggcaagccctctctttaaaaactcatagccaaggctgggaagacagagtgagtgggtgggccttctggcagcttccttaccttcaaatctttgctctctgtgaaatggttctgcttcagtatccttgttctgatttttctgggaactagatgttactgggagatgactcagagcaggccaagccctgatcctcactgtggaagcaaaagaggctggtgaaagtcactgtcctgacaacttggaccagaaacctacagacaaaactgaaatgttttcctgccctaggattatctggataacaatgacctttgatgttacaaagtaaatagaattgtgtttggcttttccttttggggccatgccttggagaagatgactccttcagagccgctgtgaatattgtagatctcattatttcagataattactttgaccatccttttcaatytgagagtatgatgtgaggcaaggcaactatttgtgagaaaaaagagaaaaggcaamgatycactgtcatacttttgcttgtgggttccagtccaggctttctatggggggtgggggggtgtctcagtctccccgtctgtaaaatgggattagtggattaaatccgggaaggttggacaagcacctaggacggtgcctggtgccgtgttcagcagacgtcgattccctgtccaccccttctttaggagctgtgggaaacacttcataactccccaggrtctggtgaacccttcctcccttttctgttccctgttttggcattggagatcataaaaaggctcttccatgtctcttgcttccttcctttcatcttctccaagagaaggaagtggccgcctttgttagcttgggttcagaagcttgtgtctgtcacccagggccgccyagccccggggtttgcgaaggtccggggtaggagggctgcagcctgcgcgacgcggcgggaggctacccggaggcgatgggaaggcgggcgcagtcgacccaagggtggagaagagggaaggcgaaggacgcgcgttcccgggctcgtgaccgccagcggcccggggaacccgctcccagacagactcggagagatggcaggcggaagacaccggcgcgtcgtgggcaccctccacctgctgctgctggtggccgccctgccctgggcatccaggggggtcagtccgagtgcctcagcctggccagaggagaaggtgaggggctgtttctgcgtagttgtacttgagcggctctggtccgatkcgaggacccctggccgggtcagccctacctaggcagagcgggaggcggggcagggccacggtccccagcccaggcaccggcgccccacccggcgcccggaggagtcggggctctgcatactcgccggggtgcctcggccagtccggggctgttctggagacgccaggggggctgggtgatgtcactggcctctcctgggctgcggtctgatgggggtgctgataggcacaggaaatgtgtctcgccggcggctgctgagccgggaggcgagggcgcatcgcggcgccaccccccactcgggaccctsgagggcaacggggccggcgctccggggccgctagggtgcggggtgcgcctgggggtgtgcccacagcccccccgctgcttcatccaaggatgctgctgaagtgtccctacagtctcaggacggatgtgtgttgtttgttttagatttttaaaaggagcaactcggcaggaaggacctttactggagacctgcttacttcaaaagcctttttcctccacttaaaagagggtacctgctattttcagagaaaatggatctagttgtaggtagaaatcgcatataaggaacttaggataaaagtgatttgcaagttccctctgtaagaagtatatgggttcggccgggcggggtggctcacgcctgtaatcccagcactttgggaggccgaggcgggtggatcacgaggtcaggagatcgagaccatcagggctaacatggtgaaaccctttctctactaaaaaatacaaaaaatcagccgggcgtggtggcacgcacctgtaatcccagctactcgggaggctgaggcaggagaatggcgtgaacccgggaggcggagcttgcagtaagccgagatcgcgccactgcgctccaacctgggcgacacagcgagactccgtctcaaaaaaaaaaaaaaaaaaaagaagtatatgggttcacaattacatgggttcacaattacttccttttcttgtgtaacagttttgaaatcatgaaattgctaagggattgtgcaaatattaatgatgtcagcataaaatagtatgttatagagatattaagaaaagcagcaaagtgaagcgatataaactttggcagtgttattgagcagaccttttacacacttagagtatgcctgtatttactcaaatgtttgaaatacagggcacrctggtaaatgccyactcccacccagctacatgcatatatatatgaatagcccatttcaattcttcggatctaatgtaatcaccactcaggggtcacagcagrccccacttacacatggagaccacaggccacagggaacctggtggtagtgagggaagtctgtaacataagaataactttattttaaggaaaacaacttcccatgggggcccatgaagaagaacgtggaatgacacacaaaaaatcctctccttctcttcactgagaatacccttctggtcagaaattgggaagagaacattacagactrgaatatggagccacaccaaatgtatctttgygatacatctaaatggaagggaataaatgagatggaaactgaacaaaccactctgaaaagatcatttgtaggtgtgtgtaggcagggggtatttatgggtgggaaaaggtgctgtgattcttaaaatattttaaaccaatgagaatttaacttttgagaaacgtcttttaaagcatgaatcccttttatatttattttaagaagcttctgatcactgttccattgagaaactgaatgttttcaaatcattaaaagcaaatgacaatcagccatcacatttcccagtttctagcttcctccccttattctgyagaccttcataaagtcttgcagcctgggtgatgaatcggtccacactaaaatatgtgccttcctactttttatggtgttcgactattttaatcatatgatgtatgtctttggtacactggtctgctaacaggtgaggtgtggtaaagaaagcattgattttgaaatccatttccttcgttttgaaataaagatgtttctctttcagtggctttgaatatgtaaaagcagatcaactstagtttatggtggcattcagaggccatgatttgattatgtatttgaaacctggaaacaatttttccatagtaacaatattataaattgttaaactcccaggtgggcacacacctgtgtatttagaggcattggcatctgggtatggggtgttttatatatatatatatatataacatatatatatataacatatatatataacatatatatataacatatatataacatatatatataacatatatatatatataacatatatatatatacatccacctcacttgaacttcacagcaagccccatgaggaaggtacattcatcctcaatttatggttgaggaaacttgacaactattgcactagtgaactgaagagctagggtttggcttaagccctgatctctcctttcttcttctgtgcttttctaatggtagatgagtcctggctgatgtacccggaacagtgcccaggtagtgaaaaagtgtggggctagcagggaagttggagggccagatgaagagcttactctctctttctgggtcagggtggaccctaaatggcattctaaaacaggtagtttggttttggtaccttctcttctgacaccccctattttctcctttccttgatctccttcatgcagcttaaaggtcatcattagtctgggtgctaatccatattccagagttacttcttctgaatcttccccaggccttttggtcaccagtcttattcctttagtacaggcccattcctttagtacaacattgtcaactagctattaaacagaatctcattaaatcattcttccttaggtgcgaatgactgakggcttttgagggctttatatgctctttaaaaatattagtttcgataaactaaaaagtctgscttctattgaagtcttctaattataaagttgacatgtgctcattttagaaaacttggaaaatacagaaaartacactaaaaagaaaactaatgtcacccataaccccactattcagagataatggctattaaccattttggtgtttttatttctatctctctctctctctctctgcgcgcgcacgcgtgtgtgtgtgtgtgtgtgtgtgtgttattgttgttgttgcattctaatggaagcaacgacggagactctcaggcagtgaygtggaagttagttgggggctgggtgttggtagggacagaaagacaaaatgtcattttggagccttaccatctagttggtaagtatcatgagatscattttacagatatggactctttcctagtcacagctaataagcgagggagctgagatttcaccctaagctgttgtggttaaagcccgcacggctctgcttttaagtagagggctgcttgcattttaraaaagacagatgttgtcttgttcagttcctaactattcccccactgaattttttatatcagtggcatcsgacacacagaaggagttcagtaactgctgattgagctgactttgcagacagacagaggtgttaatctgagaattgcccgggagacattcatatagaatagaaactggacttgcattggctgcatttctgtaatgatctccctttaattcagtcttttggaacctcaaaaccctttgcaagctgggccaactctatcaattatgtaattaaaaccctctttaaaaccacatgattagcctagaagagatgcttcaggatatctggttcacacttttggctgaaagattcttgcactcagagcagacttattgtcctttctgtctggatgaaaagacaaggcaggggctgtaacagagcctcattcctctgagaacacctgcaccaatagaaaattgtctaagtgtcttttaactgagataaacctacaataaaytggggtttgcatttaccattgggctcaactttgtttttgcctgagttactttccccctgctgagctcgctctttctttccagctttttcctcttactcattcatctcatctccacctaaatttgtrtatctattgagttctgagaataagacccctcaaacattgaatgcatgctatttaggttgggaaagtcaaatgcttttccacacagggctttaatgaatagaaggcttaagtagttgactgagtgtagttggttgtttcctcttctctgtccttcagttactgggaagcttttagctctgggattttacaggggcatctttgcccccagaggggcaaggagagtcagggctctttactgaagtatgttaattaaatggttgagcccaggaggttgaggagcaaacacatgtaagtctctagattcataagcatcaataggcctggcctgtctgctggatttaccctttagtcatccattaagcattttttggtgctatttgccaattaggtttcatctgcagtatctcttgtagttaragatgcttgggggagggggcatttattttgttcctgttttttcttaaatgtcttaagagctctttcaagcctctagaaaccagctatttaaacacaagtgatttcgtttcactctggacatggagtgaaagcttctatccacagtgaccagatgggctttgggatagagtattggacagtaagcagacaaggagccactggtaaacagcttttgacacaacagttttggttgtcatagtgactgcttgggtcaacccagctcttcatcgtcagaagcatcgaatgtcagaaattcaaagagagcaaagcccaataacattgaaccacagcacttcctggccattgcagcaggtagccacctgtctcttctgtctttatgcttgcttgtgcattcagctgatttattatttacagtggcagaaaaaatgcccatgttactttattattatataaatacagtcttagcaaagataattttagaaagatagttcatctgttgattgcttttttgattaatttccccaatatttatcaaatgctcaagatgaaccaggccctgtgtggcctgtgtgggagagagaggtaaacaacagagagagagggagttccagcccttatggagctgatgtcttgtatgaaagacagacattaaacaagtaaacacacaaagaagtggcctccaagctgcaagctgaagtgagcaggagttagccaggtgaagaggaggggaaacagcttgtaaggcagaaagcaccgcagatgccaaagcctcatgggggcagaacctcagagcatttggggcctggccaaatgccagagtgaccgaagcatggtgagcaagggtgaggggggagaccagacaggcttctgttggcagggttgagtaataattaaccatggaagtcttctgacctcttgcctccatattcttcttatcccttcgcacatttctattgctttgtctttcagcttcagctttcttttccaactgttgtttgggagctggcatgaggacttagatcctggaggtaccaagggatttaaagcctgcactgacaagtttatcaaggaaatatatttaaaaatgtcctaccaataaacaaagacaaatcttctgatgttcaggcacagcaccaatattcaggaataaactggaagtgcataaatgagacagtgaggcagagtaaaactagcatgggattggaaatccccagacagcggatctttttgtggatttacctgtaactctccttcaacctcaggaagtcagctggtttctatgaatctcagtttccactaatataaatgaaggaggttggagactagagcatctctaagtggcttttccaactttaaaattcattctatggctctttagtgtttgatagaaggaaatagtaactaacacattgaatatttactatggcagtttacatatgttagttcacttaattctatttaccctaggattcaggtattactacctctgttttacagatgaggaaattgagccttaatgaggtttagtaacctggaaagatttacagctagtaggtggtggggtgctgagttgagaggctgagttgagagggtctgtctgatcctatagcccatgctctttgcatggtaagtactggaaagtaaacagccatctcagagtatagatgagtgtaaataattaggcaataagcattctttgaagtccagtttcacaccagtcccatggagtcgatcacatggaatgaaaatasttgcatgactatttaagcgtatccagctaacactggtcctgaaaggaactataaaataggcctctcctaatttctgttttgccttccaaataattcaatattcttatgtcatcctcatccttccccttagggaagaagtcatctgatcaattgttctcttcctgttgaggaggagtaacacattccattattaggtgcctgataaacatgtaatgaatgaatggttcatcattaccagtatcataagaatatacagtatgtgtgaagtcatccaaaatacaaatttgaatgttatgtgaactttaatgcaatttaaaaataattttaattgaagttaaaaagtctactatttagttggctatagattcaccaagctcaggctgaaaggaattgcaacaatcatctgagttggcactgtctaatagaaataatgactcagggctgggtgcggtggctcatgcctgtaatcccagcactttgggaggccgaggtgggtggatcacctgaggttgggagtttgagaccagcctgaccaatatgatgaaaccccgtctctactaaaaatacaaaaattagctgggcatggtggcatgcacctgtaatcccagctactcgggaggctgagacaggagaattgcttgaacccgggaggcagaggttgcagtgagccaagatcatgccattgtactccagcctgggcaacaagagtgaaactccatctaaaataataataataaaaaagaaataatgactcagctactcaggagactgaggtgggaggattgcttgagcccgggaggtggaggttgcagtgagccagattgcaccactgcactccagcctgggtgacagagagaaaccccaacttcaaaaaaaaaaaaaagattatgaaagaaacatatgtaattttaatttttctagtagctacattaaaaaagtgaaaaaggggtaaaattaattttaataatatacttcatttaacctaatatgtcaaaaaattaccatttcaacatgtaatcattataaaattttgaattaggcttgctattaaaatcctattaaaattcgaggaccccttaatttgtggctcatctataaagtcttccctgactactctccctctatactgtgtaagatttacttaggctaacagttgggttttttaattatttttaaaatttttactgagacagggtctccttctgttgcccagctggagggctcagtaacacagctcactgcaaccttgacctcctgggctcaagcaatcctcccacctcagcctcctaagtagctagaacaacgggcatgcaccaatgcgtcaccacgcccatctaattttttcattttttgtagagataaggtctcattatgttgccagggctggtctcaaattcctgggctcaagcagtcctcttgcctcagcctcccaaagtgctgggattacaggcttgagccaccgtgcccagccctaacagcccaattttaaagttgagtagtttaatttacctcatttgacataaagttctcccttattttgaagttttaagcaattaattgaaaacatgtcagagtcttaaacatgttatgaaaggatagctagttaaatgatttcattcaatcctcagaattaycaccagccagccattttgaattcatcggctcttyggcaaattgcagaaggcaccagtatctctgaaatgtggcaaaatgacttacagccattgctgatagagcgatacccgggatcccctggaagctatgctgctcgtcaggtgagaacatgggacacaaacctcaagcttgtgtgaatactgtgctttctcatgagggataatgttatggctgaagttctgaggtgtctaatattcagatctgtcatctcctcattcaccaaatagtcaaccaagaaaaatcaaatgactgagagtacatgtctgttctgaattaagtggtacatgttaatgtcaatagtttatgwgtgaaatctctatttggggtacaacattacacagtccttcactcttgaccattcaatagcacaccccgaggctcccaattaagttttcttgaatcctaaacaatgaacagcaacaggcttagggagtccttgcttgaaggttctaagtcaagagtatcattgtactgtcaggccatcactcgccttagggaaattgtattttccctggagggagagttaaggctggtgataagctagccgcatttctccagggcagtgcttctcaaacttctgactctgacacaaagtaaaaaaaaaatgaattttacattttatacacacaaacgtactggcatatttaactgaaacaaaacttccacgaaaaatattcttacagcattttactgcaatatggtcagttctattttattggttcttaaaaaatgctggtcataacccactaaactgatttcaagacccatygattttaccactgttgyggagggtagaacaagctgggccagaccttgaatgcctctttgcctccctgatgtcagtcttcctaagcaatctgaaacctcacctctgaatatctgtttttttcaaactagccccattttaaggggccgcttgggaaggaatgggactggcccttcacatcctcttctgaaactcctcaggcaaaagaccttggcacccactgctgtgcctagattgagaactgcaaggcgcaggtgcccagctcttgagctcttcctttcgatttcagagtctcgctctgtcacccaggctggagtgcagtggcgcgatctcggttccctgcaacctccacctcctgggttcacactattctcctgcctcagcctcccaagtagctgggactacaggcgcacgccaccatgcccggctaatttttgtatttttagtagagacagggtttcaccacgttggccaggatggtctcttatctcctgacctcgtgatccgcccgcctcggcctcccgaagtgctgggattacaggcgtgagccaccgcgtccggctgagctcttcctttctgcccagtgtacagcctctgcctctcaggctagcctagatatccatatgtctgtgtccccattagccttttgtcttccatctgaatagctctggcttctcccaaggaattagacggtagacaccctgcaggcaccttagttctgtctaacctttaggcagagtgaagaataatagcaatgatggctgactttcactgagcagtttttctgggtcaggcactttactgagttctttgcatagatcatctcattcagccttcagaacagtgtgtggatgctattattatctcaatattaggaatttaaaaagatctgaggttgaggtatatgaattaacttgctcaaggttatacttgtaccattgttgaggccagaatccacttgagatctctatcctgtcactggagagctgggaggaatcagctctgcttcgtgcactcaaatgtctccagctctcgatcttctcaagcccaagttggagagtgaggcacataccattcactttaacaacattccctgggccttatctctcaagcattttcttaaaagaaggccagggcatttaattggcattttccaaaagcctcagttccttgttagaaaaaaatctaggtctgtgatgcttactcttcccattcaactcaaccttttttttttcccataccatttgcccagagcgctgtatataaccagaaatgatatgcatacttcaggcctgaggttctttgcctgcaggctctggaaatccatgaacacaataaactttgctagttgatctttagcttcaacagaatacagtatataggataaataatatacatagatattgttgtagttaaaaagatacatattcatttaaaagtgttactgaagtttcagtaacattctccactatcatatgggggtggaggcaaatgagatatttatggacagtattttagaatgtgttgggaactactgctgggctgcctatgcatgggctggctgatggctatgttagatatctcacttagattccattttagaattttttgagaagaaaattaccattaatttttagagacctatcttctaagctgtggaagacaaaggaattctcattttgaaagtgaggtacatgacagagtaattatgagggaactacactaatggccttaatttgactaagattagatcctttcatgtagaactgaattgaaacaaaaatgattgaaccttttttttttctcctgaggcctttttgaacactagatgagatgttttataatttagagtttcaaggttgtaactagagaagatcctcaaatattaaaaaagggtaaacttgatataaaattggtttgtgaattaacttttgtagttaccagtaaagatgtgcattactatgggttctcttttacagaaagagaatattttgggggaaccctgtcccacattatgcgttttcctggtctctgatcaatgaccccaaagctgcctattggattattaggatatttttattttgaggagataagttatttgtaaaacaaataatttgaagataatacatttggggctatttcattgatttataagatagaaataaaaaaattaaaaaattaggatgataaagtctcacaaatgggcaagcaatatcctttgtctaaaagaggcaaactagaaacttcagggggtaaaatcccccacaggtgcacagtgcatctgagccaccgaaactgaatgtcatcaggtacatagatcccaggtgcaccctcagtccagccccctaagaggaggagcccgagggactcatatatggtgcactcaagagtaaagaggtacccgagtcttcaggtggcagatgtccgcatcctgacgacgatgtgtttgcagacttaacacaaatactggaaaatcggcttcctccaagcaaatctggtctactgatgtcattgtttctcagaacctggaaactagaatttatgtttaattaaatgaaacccaggatcattcactagtgttaacctagaataaatccccctaccactctttggaagtagactatcttgtaacagcctctctctcgtgctcatgtcttcatctttgtattttttttctttctctactcagtctccatctatctctgctttatccctatctccatctctctcactttttctctttctccctttttctctcctctccattttaaaacatagatgtatagcaacccaaagtgtgatctatattctaaattgcctttcggcactcctggagggtccagccctttgctgctttggtattggggaaggcagctgytttagagtccctgccacagccacgcactccctgcttacgggtatttgaatgatagtagtggtcgtttggggagttcccctagagacttctggtggggacttgtagactaagtctgaaagccaaaaacaaaacaagggatattggtgaactaattagattatgcagccaatttgatsgtttataaagacgatttatcttagctgctaagataaacaaaaaatagttacactgaacaaaaaagttgcggggctgggtgcggtggctcatgcctgtattcccagcactttgggaggctgaggcaggcagatcacaaggtcaggagatcgagaccatcccggccaacatggtgaaactttgtctctaccaaaaatacaaaaattagctaggcgtggtggcatgtgcctgtggtcccagcttttcgggaggctaaggcaggagaatttgcttgaaccagggagttggaggttgcagtgagccaagattgtgccactgcactccagcctggcgacagagtgagactccgtctcaaaaaaaaaaaaaaaaagttgcttcaggaaaaactcttttgaggatatatgctgattctcttatggattttagtgtcaacaaggtcatcagaaattatgatcaagacctagtaacaagttgagaaataagtttgtgtgtgacttctgagtattgctaacagatatattttttaaaattccaattcattttgtgagcttgcaatctgcaattggtgttgaagaagccattttatggagcattttatcatctggataccagatgttctggagtatatgctttttttttttttaaatgacccattttgtggaattttttttttttttacagtctagggataactcattttcatagtctgcagaaaaactcatgttaggtgcatagtgatttctctctattcaaactattaatgctttgtatcgtatagttttatatattctcattaaatcaattcatatttactgttagaatgaacccatatttactgatagcctactgtgagcaaagcacagtactacaaattgtggagagttatgaatgctgatttcaaaaaaggttrtaaacatttcttttgatgatgtgataagacagcatgtaaatttgcaatagaaaagttaaggtactgcatgcacaatgctatttaggacaaagtccacccactataaaaagcaaggagtctctagctggggaatcatttgtttagttggcttttgcaggaccgactgtaggatcagtgtcctcccactatttaaattcccctttccttggaagcttcctgccgcagttgttttgagtctcttgcctacgtgtcatgtcgcattagtgagcacaggccacatgggacttggctaggatagaaaatcctgtatttcttaggaggaaaaaaaaaataaaagccctcacattcatttccagttattcatttttcattttaaggtccatcccagatctaaactgtctagatctgaactgttagatctgaaatgttggtttttggttagatgttaattgaaggacaaattgtcagttattttgatgttagtttgtcgtttgactttttataaaaataatttaaggcaatttacaatgatgtatatgatacttgaaaaaaaaaaaaaaaagaaacagcctgggcatggtggttcacacctgtaatgccagctctttgggaggccgaggcggatggatcacttgagcccaggagtttgagaccagccccggcaatatggcaaaactccatctctacaaaaaaccaaaaaaacaaaacaaaaaaacccacaaaagttagtcaggcatggtggcatgtgtctgttattccagctactcaggatgttgaggcaggagaattgcttgaaccgaggaggcggaggttgcagtgagctgagattgcaccattgcacttcagcctgggtgactgagtgaagccctgttaaacaacaaaacaaaacaaaacaaaacaaacaaacaaacaaaaaaccaaggaacataggaaagtgaagccaagataaaatagggatgggaaaaggcaaatgaatcagcaatgaactcacctataacttctcacatcgtgaagtctataatatgttctttaaaaaaatacttctagttcctgaagtgatgctactttctgcacctgttgctttcttctgtcagtcactgtgttgccttataaggctcaaggtggccagcagagatggggaaagagattctcttttatatttgccagcatttgcagtgcgtctcaacctgccttgggtgcagagggaaagctgcttgatatgttattatggttcagggttgcttattaattcttacagtgagcggaggtctgaaataacctgaaccaccccctagctatgggagctttctacgttatccttagcaggtgagcatctgtatcttttattagtgttcattacatgtaaagcatttgctggacttggacacatgttatgcacttgggacagaaagagctaccatttgcagttcttgtccttgaagagcttagagatagagacctgtaggttgctggtttacttaattttttaaatatgcctttgtagcctcctagaaatattaaaagtgtacgttactattaccgaactgcatctctgtctcctgacttgtagacatgtccataatatattgttaaaggagaaaagcaaggggagagtaatataaaaagtaggattcttttcctacaaaaacatatgcccctctgccaaatatatgtgtttgtatgctactgtaggtttgcataagcaaggagaagatatgtcgaaagatctgcatcaaactattaacactggttaatattaacaattggttgagattgattagtaaggggaagtttaagggagaggcaagaggattagcttctcctttaaacaggacaaatgctattaattacaataacaatacaaagcaattattaattgcaataatattgctatgaattcattaagtgtgtattccaattttaatttgaaaggcactacttaaaatttcagaatcacagttaacaaatgaaagcyrtttctttagatctaaattttttgtttttttgttttgatcagcacatcatgcagcgaattcagaggcttcaggctgactgggtcttggaaatagacaccttcttgagtcagacaccctatgggtaccggtctttctcaaatatcatcagcaccctcaatcccactgctaaacgacatttggtcctcgcctgccactatgactccaagtatttttcccactggaacaacasagtgtttgtaggagccactgattcagccgtgccatgtgcaatgatgttggaacttgctcgtgccttagacaagaaactcctttccttaaaggtatctgttttctgcttattgattcctaggataaagtamattaacagtaactcagagtgaattctagaatccttggaggaatgagaaggccatttagaaatggagacttttggtacatttttattatgaayattaattgtaagattgcatgattgggaatatcaaccatgggcaataaacctaagatacgtgacaatgcattcattaattggcacctgatttatcagccttgaatgcacattaaattaaatgcaacatttctttgtgaaaaatgaaggaggaagtttgtttcaggtatagtatgagaattgtgttttataatgaactatgtttatttcttcttctttctatggccatgaaacatcacaaccttctgatctgagagatggtggctcttgggttggaggagggagttgcagcaaagtggttctgaagtggagagtgggtaattcagacctatcaagatgaaaagcatgaagcagaaatgcattattgttattatctgtgaatctcagctccattttatgtagcatagcagagcttttgttatgctctcagctcaaaatacttctgggactctcagatgttatttcagtcttggtgttcttaagggtatattggaaaaaagtgctaaactagatgaagatattttgttctgatatcactcataaccaagtaaacacaacaaagcaaaaacaaaaaactttgttctcaggcaacaaatgctttgttccccgctcagagctttatgaagggtccagcctttgatacagtgggggtaaagaagtaaaaagtttatcttgtaatggaagtagtagagatatttggttctatttttgctggatatgctgaaattgaagaaagcaagacttgtttataccctctcagtctccttttcacttcttttttttggtttgttttgttttctgagccttctacaatccctttgtcccatgctttgccctgcttttaactagtttccttccccagcaattggatgaaggagttcaaaagctgatgcaaaagtctaatttttcatatttgcacttctagtataaggacacaaaatgaagtatgacttgaagacattgttctgtgtaatggatgtattttctctgagtgaactcctttgctttttcccatatagctcatatctgcttttggtgaccagaaatattaatagaaaggtctgaatgagttattggattggggtcatcattaaaaaaatttgaatcaacatatatattctcatagtaatcctttctgttagagataaatggtgaggtgggggattttttttaagaggctgtttttgaatgcagactttgagagtatcagatttattcttccagttatatgttttaactaaattggtattgagaagttaagttcttcagctgtcatggattgggtagacggtggtggaaagtgacctgaaagagtgcttgataagtagactggattattcgcaactcttcatagctccacttctctccagtaataggactgtcattacacatccacatcctttgcctggtaactttgctgtgccctcccactgtagccagttgtacttcctcatcccttcactctggacttcattatttgacttgccttagccaatgggatgttagtagaggtgacacaaacaggggctggaagtgtgcttgtgccattgggcttgctcttccgtgtctttgccataaccatgagaatggcatgccctggctagcctgccagtcccagcagaaggatgagacacctggagcagaaccaaccttgctgactgcacagtgaagcagagctgccccagccaaacccattctagatcagctgctccctagctgaccagcagaggttatgtatcccaagaagatacataatggtattttaagccactgtgttgatggggtgttattctattctattattgcaacattagctaactgatacagccttgaatggggaaggactgcagataacccagactgtgtgaacgctggtaattaggcatttgtagtgttaccatgaagaccttcatacatcaggccagtcagattctcctagctccaaggtactaggctgagttactagtaacgaaggccatggctatttttctgccattcctgaaatgaagcaaaaagagcaggttgcctcatgggactcaggatgaatgtccacaacagtttattgctggctaaatgaatggatattaggcgaacagaatgaaagcaaatcgttgtactgatcattggagtctcccagctgttgaagtttcactgaggtacttgaactgtcaagcctgcaagagataaaaactatttccgtttgcctatgccctgggcatgagcagaatgcctcttgtcccaaccggtcccgttctgccctcttgttctgcgattatgttgtctgatttgaagctagaactttcaaggccctttaaacaactggaagcttagaatgtctctactgaagcaagcaccttacaatttttgccaacgagaaaatctgtttaattatttaatgcttattaaaccctgagtgcatttatattgcacaaacacatcctctgcttaatgctctccaggagttatggaggattcaaatcaaattacactgtcctttcctcatggtataattaaggagcaatatgaaatgattagcgtacaaaattaagttagttttcagatgataaagacaatttttttctcttttgaaatcaccgttaaaacaatcagggaaactccattttttgaagaaagtagagaacatctgtgaataggaaccacaatatgaagacagaagttggatggagaaatggcagatgacatatcagagtggagagaagtcacactgtcctggagagggaagaaatggaagaagccagtggtttccttgatagaatcctaaaaaggctcaggaattagagatgtgataagctgaggaaggcagaggtgaggaaggggctggtgtggagagtgtttctaagtctgtctaaggaatatgtggatgtagagattcccaccccacaccaggcaggtaagtgagtgcccccttgtgcctttgccacagatgagaaaatatttttctggagaaattgaaccagggaggttatggaattgagaatagcaagtatacaggagggtgacagtggggcaccccatggaaatcggggagattaggcgaaagcctacacattgaacagtgagatctatagtttctctcccatcttcagcaccagaaagccatcagataggaaactggaggattcttcttcagaccrtgtgaaccaccccgcagaaaaatcccagatggtgacattcagtaatcctcagtgaaaacactggctgggcaccagattgccttgcagtgaagccaaccaatctgtgtctccaaccagcattttaatatcttattctttaacatgaatgaacacaaaggatgaccagacatttgaggacagactccagcatgaaagaaagggcctggagcagtggctcatgtctgtaatcctagcactttgggaggccgaggtgggaggattgcttgaggccaagagtttgagaccagcctgggcaacatagtgaggctccctctctacaaaaaaaaaaaaaaaaaaaaaattagctggttatggtggtacacacctgtaatcctagctacttgggaggctgaggcaggaggattgcttgagcccaggagttcaaggctgcaatgcactataattgagccactgcactccagcctgggcaacagagtgagaccctgtctcttaaataaataaatacttttttaaaatgtaaaaaaaaaaaaaaaaaaaaatagaaagcaaaacaaatcatacaaatttaaaatgaagtgggaggaaatagagcagaaaatgacttaaaggacactgttctaatattcttacagagataagaggagacattatatctatgaaacaaaaccagaatgctgcaataacagaacaattggtcaataaggaggagcttttggaaattaaaatttctattttcaaaataaataaatcaayaaaacagttggatcctaaagtagaagaagtatctttttttagaagaggaatgacaaaaaggagacgattatgacttttggagaataattgtaacaattccagttaggtcatataaaaagtattgggaatgagaatggcactggacttctcaatagaaactttgggagctagaaaacaatgaaattatgccttaaatattttaaataaaaataatttgcaacccagaatcttcagacccagaaaaattaaataggaaaatagaatgaagacattttcagaggtaaatctcaacaattttcactcccatgtactgtatttttgccctagaagttgcttaaagctgtgctccagaaaaatcaagaaagaaatcaaggatgagggagtcatggagttcagctcactgggggtcccatataggagaggcagaaatctgcaggttgatggtgaggggagccccaagataacaaacagataggcagcaggcctagtggtcggtccaggctggagcaggcagcagagggctccggaagggcccattcttaaaaaacaaaaccagacagacatgagaaataaaggtgtgatagtgtctggaacgcttgaccacataatggtgaagacatattaggctcaaagaaaacaaagcaaatgaaagagaggcctgtggtgaggaatggtgggaaacaggtttgcagaggcaggacgaactggattgcgatgtttgtgtacatggaaaaggacagaaagagacagatccccactggtttttggtctgagtaactgcaaggggggttttgccatccatttggttgaagagactgttggtaatacagatttccgggggaacctcaggagatgagttttgacactttgttcgaggtgtctattaacgtctatgtggagatcttcatttggcaactgaaattgtagtctggagatcggcagtgaagtcagggctggagatatattttttggaattgatatttacatgtatgtgtgtgttgtgttgtgtgtgtgtattattataatataatacaatataatataacatataatatgtatatatagagagaccagcctgggcaacatactaaggctccgcctctacaatattattattattattattattttaaaataattatattaaaaattttatatatataacaatacacacacaacacagcacacacacacacacacacaagacaacacacacatacccacacatatatgatttaaagcctcaagaagagatatcaagacagtgagtgagtgtggacagagaagagaagagaaccatggagcaagcccctgaggctctctagtgtgaagagggaagggagatgaagggagccattagtgctaaggtaggaggaatatggtatcttaggaaccaaatgaagcaagtgtagccaggagggagtaattaactgtgttgaatgctgacaataagtcaagagagatgaagactgagagttgaccactggatgtagccatgtagagtcattggtgtcttgacaagagcagtttcagtacacggtggagataaaacccaactgggctaagtttaagaagtgggattggagacagygtgaatagacaactccttcaaggggttttgctataaatgggattacaaaattgggcagtagatggtggagatagtgaggtcaaatattttaagatgagaaaagcaacagcatgtttgttggccgatgggaattatccagcagagatagaaaaattgatgatgtaggagagaaatggtatttgctagagcaatgtccttgagcagatgagagaggataggattttgtgcataagcagggagactggcatctgatatgagcatgacagaaagaaatcaaggtcatcggttgggaatgaagatgggtgaggtggcagggagaggaggaatgtgaaatcctagaagagtgccagagtgactgaactaagaaaatacaaatgacttgccagtcaacatgaaaggccaatgtgaggtttgtggtcatgaactttaagcaaggccagacagtgtggttatatatttttttctctggtgaggtttagctgcacgagtgctggcacaaagtaggtagagtatgtttttgccatgaaagtttgacaaaggcagaaaggggcaagggagttgagggtgtatgctagtgagtgattggcatgattgactggaatttaagccaaatayagagtgaagtgaggacattatgggggtgaaggaccatgaaaaggtgaaacattcagtagattaggggttccagtgggattgaaggactttggagtttagagtaccaggaccaatctgaaagacaggggttattgtcagacggaggaaagtgtaaaatcagttagaatcctagtcactctttttasttccattcaaatactgtctttttcataaagccctccttgacacccccaggattttgcttctcattctatccaatttctagaggactttaatgttacatttgtggctggtggcacattttgccatgcttatgtatttgttttatctctccccaacccaactaaagtataggctatttcaagggaagggctataattattattcttcgtgtctgtagcattcctagggcagactcttgaagctagactcagtacaaaattgaagatgtaaataaggtgagaagcaagaaagatttacagttgtttcaggttggattccccaagaagcgccctctgacatggagtttagtattcaggtcacttattagggagtggccttggatcaacacaggtatcagggaggggaaagaaatggtgttggacggaggaagaagtcgagctgcagtgcaggttcaacaacggcctcagccaacccctgcggagctctggagatatgatggctctttagagagccccccgtacccgtgtaggtcagcactggatgtgggacactcccaggaggtgcagctgaggcaattcctaaagtgactgayggctcttccagcagctgaggcaacacaccctcctgtatgggaagtgggtggtgtatcacacgattcatcacagcactttcattgtttcaaaattctgtgaggagtaagaaaaaatataaaagacttctattttcagagggaatggaagaaggtggtttatatgggtgaagactgtgggaggtgtgatgacttttgaagaggaagtggtgtggaataaattttgccatagkttcacttgctttggtatcttcctttctttatggcacatctatctttttgcccaattaatagaaaatcatgctatttttcatcatcacagtatttttttgctatgtttttattgttgtttttaccagactgtttcagactccaagccagatttgtcactccagctgatcttctttgatggtgaagaggcttttcttcactggtctcctcaagattctctctatgggtctcgacacttagctgcaaagatggcatcgaccccgcacccacctggagcgagaggcaccagccaactgcatggcatggttagtctgggcaatttccctagcactgtagctgtaggctccgcttccaaggaaaaggttgcaaaagccaagtaaagacctaaaaatgccacagcatccttggagcacagtgtttatgatagaacattccttggcaggcattgggtttttgaggaatcccagagctaaaaagaatgattctgagctggctctgtggctcatacctgtaatcccagcattttgggaggttgaggtgggaggatcacttgagcccaggagttcgagaccagactgggcaacataaggggacttcgtctctacaacaaataaaataattagctgggtgttgtgtatgcctgtaatcttagctactcaagaggctaaggcaggaggattgtttgagcccaggagttcgaggctgccgtgagctatgattgctccattgcactccagcctgggtgacagagggagactctgttaaaaaagaaagaaagaaagaaaaattgctggttagaagccatgtttgactgagcttaattaaaatgataaaatcatgtaaaaaattggattacaggaacttcagattcagttgggcccaatgggagcacattcccccagtactgtatggaggtggagagagcaaaccccttctttcaggcctttataagtctgaagaacatggggctttgggaaatggaataaaagaggggtgagggtgaagaatttccttggtggcttcaaagtattaccgtgactccagtgtgactatgacagtttgatgtgttggttttgatgtggcatttttgacatgggggtggggatattttgatgctgccttaaaaccctgctattattactaagtaatgagtgcaacacacagcctcattttcatccccattcctgggcccacactccatccctaatccctcccccgacccctgcatcttctcctgactctgactctcttcccatatttgatcttctttctgtccccrcgtcttcactaaccccagcttggaacctcatgctacccttgagacttcactagccccggtgccttcatccctccctgaygctcaccccatctgtgaactgatagcttattcccagcacccccgcttattcctatccattgccctatcactgaccttcgccctataaaagtmcaaatggtcacattctgtgtcctctgtgaccctaacacacctcctgttggcatttgctctccctcctgttatccattggcagctcctaatgggccaggggaatgtggtcagcatatcattcattcacttgtgcccaagtgcccaaaaagcattcagaacatattcacaagaggagacgcctggttgatcagcagtagaacaaagttatttatttatcagtccaaatatatgaagccacagtgattcatatatttggactgataaataaatttgttgaatgaagatcatttttttccagaaacaaacccttaatagattaaccaaccttgtgaatatgttcctatttcaaagaagcctattttttcctatgatgaatatattgaattttcattyatgaatttwttcatactatgtctttaggatcacacactctgaaaatatttatctaatatgtgttaggatgtatgctaaatatttatccacacattattttacttagataaatgaggaggtcttaatctagtgagtagtcttcagagagtcctcgtgatgagatgaaagagagctataaccagaaggaaactttagagatcagctagtttgagcttcttatttgatacacaaggaaatggagatccagagacmcaatgttatatagctcctgtacaaggaatttttcttmgatactacttgatcaataaatagttactgtccaagtgccttcctttgagagttttatcattacagattaaggataaaatggctaaacagagtggattagaagatcagataggcttggactcctttctgaaaataaatgtatgcttttaatgttcacaaaatattcatccaaatgtcttcttcctaatttatccttagtgatatccttttggagttacatacacaaataatcaatattttgctatttgtccacattacataagcaagatttaaagagttctccaaaataattagcataaaatgttagtaaatctttggttcattcatatagcttgccatattattctcaattactgaaatgcagttaattttgactgattgtatttccctgttgatgaatataaaacacgttttggtgatggtgattaaacattactttttctccctcaggatttattggtcttattggatttgattggagctccaaacccaacgtttcccaatttttttccaaactcagccaggtggttcgaaagacttcaagcaattggtaagcaccactgttattaatgaataaaacatcatttcttgctactgacagatactacatttttaacatttaaaatttataatttggctgggcgcagtggctcacacctgtaatcctagcactttgggaggccaaggcaggcagatcagctagggtcaggagtttgagaccagcctggccaacatgaaacagggctttcatgtttagtagagacggggtttcactaaacaaatacaaaataaatacaaaaattagctgggtgtggtggcgggcacctgtaatcccagctacttgataggctgaggcatgagaatcacttgaacctgggaagcagaagttgcagtgagccaagatggtgccattgcactccagcctgggtgacagggtgaggcgccatctcaaaaaagaaaaaaaaattataatttaagtatatgatttaaatgtgtaatatactttattggctttttttcttgcttaattgattagtttattattcttttcatctttgtagtaagcccagtttattttcctgcatgaaactatattttgaaatggaaacataaaatactacatttcatgtttgcacatccttaaaaatggtttgaaaatatttgaaaatattttcccagagtcctgtttgaagcaggtagaatgcgtttcgagagaaaagtttactcaacaaagcatgctggctaatgatgaatatgatgtccttataatgataccaaaagatattcttcagtttttcttttccatctctgtctttgccatcttctattttctaccttatccagatattattttcctttaaatctagtacagtctctgccaattttccaaagaagcaagagatcaggataaagagaaagccagatcctttgagatttagagtcaaataaatgggagttgactaggccagaccaggtcaggtcaggccagcccaagaaacatacgtatctatggctgaagaggggagcttggggcttggagaaagaaaaggagaataactttgtactaccaccctacccaaaacaaaacaaaacaaaacaaagcaaactcttggcaggcatcagggaaagatgaaaatgagattgatctttattgtagaatccaggccagggggctgctttgaaggcaagaatttcatgctagaaattccttaytagccacacaaacttcttggagcaagatagacttgtattacttctaacagtgggaaaaacactgccatcataactcacacttttgccatgagtaaagaatttgtctagaatcttagagaaacttctgcttgaactttaggtgcatgtcattgacaaatttcatttcctagtttgaaagagttactctaatggtgttattaatataaacttcttgggcttcttccttgcagcatattttccttactttgatggtagccttgagaaactgagtttggctttctttcaaggattttgtgcacttttattatgtcctgtaccagaatgaacttaygccaataacttgcaccttcattcaattttaacccattgtgcccctcctattggtatttacatttcaaaccatatctctagttgtataagaraaagcagtgagctgaggtggcgccactgcactccagcctgggcgacagcgagactccatctcaaaaaaaaaaaaaaaaaaaaagaaaaagttgtgtctcatggtaaaggaattataagtatcaataaacagacaagaatattgtttttggtggtagttagggctttctcaatgtttctagaatcatattacatatgattgattactagttggtttagttttaccttagctagttcctagctatcctaggaagtttcatttggttgtcttataatattcatgtaatctcttgtcatcttgtaacatacaatacatgacttatgtaggccagtggttctcaaactttaaagtgcatcagaatcacctggagggcttcttccacacagattgctggactccagccccagaatttctgtaagtctgagatgggaccagataatttgcatttctgacacgttcctaggtgttgctgatgttgctggtcagacatcacactttgagaaccactgatgtaggtcacactaggtatctctttcccatagagtggccacttgatatacttcatctctactctgtttgagtattccccttttaagccccatatctcatctaaggcattcttcatgcagcatcttggacctataagcatctacacctgcacctgtgttgtccccttccacccacctgtcctctgtttttttcattctctatctcttcactgttctgtggagtttctacctctaaggaggttctcacctgtaagtttagagccacatttgactcttctctcttcctgctccaaagtgtacacatccctgttcaacccagatgtttattgtcatgggtgtggccatgcttgctgttgcataatcttttacaaattatggacacatgtgctaagatttcaaactccttaaataaggatacattatgagtcttgataagataaaaatagttgttcatttactgtataattgtcatctacagaacatgaacttcatgaattgggtttgctcaaggatcactctttggaggggcggtatttccagaattacagttatggaggtgtgattcaggatgaccatattccatttttaagaagaggtaatgtgtgtgtgtgtgtgtgtttgtgtgtgtgtgcgtgcacagcctgattttggagtacaacrgtgggatrtgagaaagtacacagatgatgatgaattatcagctgtctttatgtggtacagagctccctctgcttgaagaatgaccctttctagtttactcaytggagtaatgcacattgttacaagttggttctttcttaataggtgttccagttctgcatctgataccgtctcctttccctraagtctggcacaccatggatgacaatgaagaaaatttggatgaatcaaccattgacaatctaaacaaaatcctacaagtctttgtgttggaatatcttcmtttgtaatactctgatttagtttakgataattggttctagaattgaattcaaaagtcaaggcatcatttaaaataatctgatttcagacaaatgctgtgtggaaacatctatcctatagatcatcctattcttatgtgtctttggttatcagatcaattacagaataattgtgttgtgatattgtgtcctaaattgctcattaatttttatttacagattgaaaaagagggaccgtgtaaagaaaatggaaaataaatatctttcaaagactcttttagataaacacgatgaggcaaaatcaggttcattcattcaacgatagtttctmaacagtacttaaatagcggttggaaaacgtagccttcattttatgattttttcatatgtggaaatctattacatgtaatacaaaacaaacatgtagtttgaaggcggtcagatttctttgagaaatctttgtagagttaattttatggaaattaaaatcagaattaaatgctatgttgtgatgtcttttttatatataaaaatagtgatataatttaatgcatagtccaatttttataggattttgcaaatttaacgttctcattgtaaaaataatagtcaataacaaacattttggaaaatggagaaaagaagaaaactataatcccattatattaacagaatcaccattagttcgctttttagtttttcctcactttttctttttttttttgagacagggtctcactctgttgctcaggctggagtgcagtggcatgatcatggctcactgcagtcttgacctcctcggctcaagcgatcctctcacctccaccctacgagtgattgggactacaggcatgcactacctagctaatttttttgcctggctaatttttttggtatttttgtatggatgtggtttctccattttgcccaagctggtcttgaactcctgggctcaagcattgttcctgtcttggcctcccaaagtgctgggattataggcacgagccactgcatccagcctcctcacatttcttaaatgcagatttttcttataaaggtataatcaaactgtattacaattttttggcctgttttttcctgttaaactatgtgattaccaggcatatatttgctgttttggttttggattgaggtgaggacagaaaaagactgctgaatgtgaactctagagtcaacattaaggtaacacagtagtactgcagtagttgtgacaatttttgtgtagatagattatatggtattcgttcggttagttacttagagcatttttttctggaaatacataggcattcataagttgtctttagctataggaaacaattatctagaaatacaaacttgatcaattaaataattaggaaatcgttcctggcatacagatgaagttagttggggccactgtcttctgtgtgttccctgttcggacaagacatttagtaaatactcagtgaattaatgtgccgaatgacaatggaagtcattgggaaagtaatttacttgctaaaacatagttttcaggtaagaaaaggataaaaataatttcatcaatttgactatgtaaattatatagaatatagccagaattatatatgtatacttaggtattttctatgctatatataacatttatagataaatatatattacatttatatatacttatatataacattacctgtctataatttcatgttggtaaattttacagaattagatttttctaggattcttttttattttctaaatgtccttccaaagtcatgtaaatgaaagtcgtgtgtttgtgaattaatgatattaagagctaacacttagactgagtgctaactctgtgccagacagagtcacatatgctttatatgttttactaacttaatccccacaacaattgtgtgaggtaggtgttagtaagcttactttatgatgctcagagtagttaagtgtattttccaatattacataactagtaagtggtaatagtgggagttgtacccaagaagtctagctctaaagcttatacttgggaaccattctagaatattgcccatttacatgaaaagaactatacagaatattcccgatgccaaatgcaaagcaatagttgtatcttgaaatttttataggtcatttcaaactggggatgcattcttaggtcattgctgccacgattcacctgacaacataggcttcagagacacataatttctatgcagaatgattactctgccgtagtgaaggctatttttgcgtaagtgtgggtatatacaaatcaacacgagtggttccaggctaaagtatctaagccacaaagcaggattaaagggagctgagttttctggattttttggatgagagaaaacatatggaaagagttcagggaaaacacatattttttaacatgagaaaataaatggtctaacagactgatgatattaaaacagaatgaaatgaagttttaatgaggaacctaaacattagtcgacagtactgcatacataattataagcctaaatgataagctcctttggaggcaaaatgaaattaataagagatctactataatctgttgagttcacattagttgaattatttttagaggaggttggtggatatgttgaaatgggataaaagaaaaaataaaaccataagcagcttaattcagtgaaggttttcttcctttgaaaagacatatcctcaaattctactcactaagagtttgcactgatataggaaaagcagccatgatgtcataaacggagacattttaaggcattaacctgatattagtctctgaaatatgctctgtataattcatgtcagtcagaaatattactttctaaaaattatagctgcaaaggcagtgctccataaacatcaggttgcatttggaatttttctatgtgcattttggagcattttactgcccctaagagaacaatttgtacgttttgtctgttattgtcaatcctgcaatatgtagggctatttttcttcttcaagagaaatgagttcaaaggaaaatattcataaaagagtattcataaccttggcatctaaaaaaatcatgagcctgttattgtagctcgagggttgtggctggaagagaaaagacagatccttcaaaaaggagaaatgttttagatggcaaagcagttgtcattaagaacaaagcagcccatgttttcagctccaacttcaaatccttaagcagtttatttcatgaagcttctttcttccatcaaagaaatacattcattatggtgctacagcaaaatcatgtgaaaactgaacgtttcctcaatcaacttggcccagctggaggtgattactttgtgtaaaggagggacgatggacacgattcaagacgcttccatttctttaacgtacaggcagccctgcaggaggcttggtcacagtatattctgcggaaaatcaaggctcagtttctgtgcaagacctgaatctgaggaacgaatgtgggaggggggaatagaagaaataaagagaagatgagggagactattcagggcagctgcagtaatttaaagcaaagctaaagtagaaaatttgggggaaattatttaaatttgctattcatcttaagtcatgaggctgtgctttcagagccagcctcccgctaacttttggcttcaaagatgaatgaacaaaagattgaggtttcactctcagtttcagggccactttttacgtagcctgaaattctaaaagtagttttgaagtggtttaactgcctcaccttacttcccttttgtctatcgcctctgtgtcttttatggtacatcttttccatccctcaaatagtgaaattactgctttgttgcaaggggcagatagcattgtgtaaagctactgctgtgttccaaggggctgaggtggagagaaaaggttgttaggtggttgagccagtagggtggcataggatacccctcaaatgctcctayacatgaacattggccccaggctcctggcaagacatccagcagcaataatttatgacagttttatagagagctgggatgaaaggactgtcttgtgtcatggctgtattcctcagccggaatttggttggcgtacgcacgcaatgtgaagtcatcttattgtgctcatatttcaaaggcaacacatggaacagtgcccactctcctgacatatctgaatttgccagcgaagagtttagaccgtttgtttgagcattaacattaagagcacaaaattgccaagaagggaaaacagcatggcttaaagcaaacaaaacaaaacaaaacaaaaaacccctaaattcacaaaggttacaaaggtaatatgaaaatagatttaaaaactcataaattatcaacagcactggaaactttattctcttacacttactgagcactgtgtggtacaggaggtccttggcactcatggatttaacatttgtggttttggttaacaaagaatgacatgtagtaagtgacatgagctaagagtttggcgtggagaagtaaacgagcatagctgactacgagccaccagtttcactgttgttctctagtcatccttgcagtaacacttgggaagtgataaaccccatttctttgtaaaaatgaagccctcctccaagccagctgctttttctggagatgttattgagaggtctagaaaaatgctggctacagtgagtagctttataagtgattttaatcctttacaaatagataaattaatgctaggaaaagataactttaaaacttcagttttaaaactttatttaatgaggaaaattgtaagcaacaatggtattcaaaagcacttaggatattttcctcgagaatgttaaagctccattttaggttatgttagaatgattccgtatcaagtaactgattgtgatcatcctttcataggtttacccatagagctgtatattagcatcctcattttacaaataagtgaacacagagtttaaattattctcagttgatgctaagactagactctagggaacttaatttctcatacatgacatggctgatttcagctcgattagaggggaccttagagattttctacttcactggcttactggttttcagctacacccagggggcatttgaaaatatgtggtgtgtgtgtgtgtgtgtgtgtgtgtgtgtgtgtgtatgcctttctgtgcttatgtagtggaatgggtggtgaatgtttgtcatgaagactgaggggtgcttctggaatttagtggttaggggcaaaaatgaatgttcaggactgtttgcacactagagaattgtctcaccccaaaagccaatggtgcctccacagcactgagtagttttcaacattctcattttaaaggtttagctatcaagatccagagaggatggatcacttaagattccattggtttgcaagtgacagaaaattcaaacttacctgagcaaaaaacgaaatttatttcatgtctctgacttcagacacagttgaccccagaaccctgtctcttgtctatctgctctgccctcctctgggtaggcattaaacttagggaagtacttccttctggggcaagatggctgttagtagccccaggttcatactcccatcactccagtttcagtgcaaggtgagtacctgtcctctgagcaacagttccacaaagtccttggcctgactgccattggcccaagtggagctctgggacctttgctgattcagtctctgggctggtggatggaatgcactgattgactttggcctgtggctcacgcccctccctatagctgggagaagtgtcagcttcaccaaaccacaggaatgaaggcagggaggaggcggttgtccaaaggaagatctagaaaaagagtgccgtacaagcaagagcaacaaacgtccattacagtaggtaagcgagttgggtgacgtatgtacgatcctaaggcatggtaccacattgcctttctttttttctttttattttttttgagatggagtctcgctctgttgtccaggctggagtgcagtggcatgatcttggctcactgcaacctctgcctcccaggttcaagtgattctcctgcctcagcctcccaagtagctggaattacaggcatgtgccaccatcacttggctaatttttatatttttagtagagacggggtttcaccattttggccaggctggtcttcaactcctggcctcaagtgatccacccactttggcttctgaaagtgctggaattacaggtgtgagccaccgtgaccggcctgcttttcttttatttatatattgtgtggacattataatgtgctgttagaatggagatatacttggtccttcatcgcagttcataaactacagggtaaaggttttggaagaagagcataggagttataaggtagactatgcttcctgcttaaaaatatgaattaggctgggaatggtggcttatgtctataattccagcactttgggaagctaaggtgggagg

SEQ ID NO: 93622 - DNA, 124500 bp, Homo sapiens
  misc_feature (1)...(124500): n = A,T,C or G
aagaatgaacgaaggagggaaagaaggagggagggatgaatggatgcaaggatgagtacatgtatgaataggtgagttgatgggtggatggatacattgattgatggatagattttttaaatcggctcaagtgattgtggggccagcaggtctgaaatcaggagctgaagctgcagccttgaggcaaaatttctccttttctgggaaacctcaggttttgctctcaatgcctccacctgcttagacagggctcactcacatcatcaaaggtcacctcctccacctaaggtcaactgatgatagagattaaccacaaccgcaataccttcagagcaatgtctagatgagtgtggccacgtggacatataaaagcaatcaccacaggtgacttgggagatgcctgttgaactggaaagaaaagccaccaattcgtgatgccctgaaatgctcctgtgggtggcagcaggtggggagtgtggatgtcaggtacaggccgccgtgtctgagcgagggtggactacacactagggagcctctgggccactgggtgacactctgagaagtgtcacttgaaggtggcaccagcgcacttggaaggcattgagtatctgcagtcacagggcccctcctcacgatggaatgtccatacccagcacttcccctggagttctgttgagatgctgaaatgacctcataatcattattatgatgtttctgatgatttctaaacttgagcaaacttaaagcagagaatgcagaggtcttttccagatgtttctagtctttgtcacccaccccagcgaatgtcagggcaaactcagaactgcaaggctgcccaagagtccacctgatcatctggggctgggcagtaatgcacgcagtgtagcacatggtacacttgttttcacccaacaatgactgttctagtccatccccgagggctcttggccttgacagggagctaggcatggaaaccttgtcctggggctgtgtggggtgggctgtagcactagaaggatattcacactgggaagacggtgggaaccagggcctggaggggtgcacagagggagccacccaactgagcagattctagaaggttcagtagcagtttgccaggaaataaagttgaaataagttgatgtctggtgtttgtggagagaaggggctggaagaacagacgcaaagccaccggagatggtggccccaagcccaccccattaggcagggggctgagaggtgcttgcatacagcggtggcagggtccgagctgcggcacattctctgtgagcttcattctctgtgatgagccaggcagacccaaaggcacatgcccaggaggggtctcagtggtggtccaggggccagagctctgccaacagccatgtggaaggaacagtgctcagcacaaggaattaacaggatcctgtgactgctgtatttaaggatggggtagggattgaggtgagaatgacctccaggttggcggaggattgcattagagattctggagaaaaagcgcattttttatggagagcgatgttctagtttctgacatcataacattggaattcttgtgggacatcgaggtggagatgtctggaaagcatctggaagtgagtacggagccccagagcgtgctgcgggtagatgtgtgactccttagtacctaggacacctggatggcttggaaagggtccctagatgaccaaaaaggtaattacgccttgtgagcagggtgcttgcttaaaacggcagacacagcagcgggtgccactttcctaaacacgagtatccatgtaaagcttgtgtgtttgagaaggaattgggtcttttcctcaggttcccgggacagagcttccaaagcccttggaatttccccagggacaggagcgtgtgtattcatgatgagctcccagccatgtctgagctgacgctgatgaaggaacacaggatggaggctgatcactaggactgaccatgcgattgtagggtgaagtgtttgggccttgtgctgtcagcctgacctccctggagagttcaaccccatggacagtgtgtcatcagtcctgcttgagccataaaaccctggtgaaaactctggacaccaaagctcagtagagcttccctgttggtgatcatgtccctgtgccgggtggtgatgggccctgatcccacaggccaggcacagaggctctgcatttgggaccctccctgacctcacctgatgtatttcatttggaggttcagattggtatcaattataatacagctgtatttgtaaccacagcactttcatctgttgtgtgggtggttccagcaggagatggagctggagggggtctcagaaacctatgaatctgtaaccagtcagaagtgtggatggcctggggaccactggacacacaggtagtattaaagtgagggcagccttactgaggtccatccacatctgtaacctgcggggtctgctctagctccaggtacttaacagcaggactgtactgaagtctgcctaggactctgtctcctcctctgctgaatataatgtttgcagctcccacccagcattctgccattatggaaatacagaagaagcattctcacaagcatccctgttctacacaaactcaagagtgacacgtggtaggcagcctctaagatggtccccagtggttctgtctcatgttccttacgctcccagttgatgctctgctgtggcatgtgctggacgcaagagcatctgtggatggaatccagcaggagagatggcgtccagtgtgagctggaacaacaggagggtgtggagaggatccaggaggagtgatggcatctgcatctggacccactggtgtgtgtgcacaggatcctgcggggtgatggctgaacccactggcgtgtgtgcacaggatcctgcggggtgatggctgaactcactggagtgtgtgcacaggatcctgcaggggtgatggcacccggagtctaatctgaacccactggagtgtgtgcacaggatcccgcaggggcgatggcacccggagtctgaaatgaatcctctggagtgcgtggacaggaccctgcaggggtgatggcatcggaatctgaactaaacccactcgaatgtgtgcgcaggatcccgcaggggcgatggcacccggagtctaatctgaacccactggagagtgtgcgcaggatcccgcaggggcgatggcatatggagtttcagctggacctactcgagtgtgtggatagaatcttgcaggagagacgacatgtagaatgtaaactggactgagtggagtgtatggagagaatcctgcaggtgagatggcgtgtgcagtgggaagcggacccactggaatctttgggtgggacccaaactcaaccactgctatgtgtagacaggatctttgaggagagatggcatctgcagtgtgaaccgaacccactggagtgtatggatagcatcttgcaggagtgatgacatctgcagtgtgatctggactgcctcgagtgtgtgggtaggatcctgcaagagtgatggcatgtggagtgagcactgcatccacaggactgtgtggacagcagccttcagcagtgatgatgtctgctgtgtgaagtggagcactgtagtgtgtgggtagggtcctgcaggagagatggcaactggagtgtgaactgcacccacttgagtgagaggttgggatgctgcaggtggatggcatttggagtgtgaactggacccacttgagtgtatgggtagggtcctgcaggagagatggcaactggagtgtgaactggacccactgttgtgcctggagaggatcctgcagaagacaaggcatctgcagtgtaaactgggccactggggtgtgtagctagaatcatgctggagtaacggcttctggactgtgagctggccccattaaagtgtgtgtataggatcctgcaaaagtgatagcctctggagtgtgaatgggacccactgaggtgtgtggataggatactgcaggggtgatggtgtctgcagtgtgagctgcagccctggggcatgtggataggactctgcaaagagacagcatctgtggtgtgaatggcaccggtggaatgtgtagagaggatcctgcaaaagtgatgtcctctagagtgtgaactggacccactggagggtgtggacatcgtcctgcaggagagatggcatctagagtgtgaatggcacctccggagtgtgtggataggagcccgcaggagagagcacatgtagagcgtgaactggacccactgaaatgtgtggacaggattctgcagaagatacggcatccggagtgtgaaatgcaccactagtgtgtgtgcatagaatcctgcataagttttggcatctacagtgtgaactggagtcactggaatgtgtgaataggatcttgcaggagagatgtctgcagtgtgagctggacccacttctgtgtgtggatagtatcctgcaggagagatgttgtctgcagtgtgagctgggcccaccggagtgtgtgaataggatcctgcaggagaaatggaatccggagtgtgagctgcatccgctgtagagggtggataaaatcctgcaggaaagatggcatctggaatgtcagcgggagccaccgacctctgaggatgcaccccgcaggtgtgatgcggggccagttccaaggctgggttaggttttaccctggcttctgtgttgtactctcattctcttcctctttcttctaatacctgctctgggaggcatcaggccatgtccagtgtgcaggccatggagacccacacggcaaggaactggaaccccctgccagcagcctcgggggtccagtccttagatggtgccctgtggtcagcaatgcacctgtgacctccgggctatgtctcgtggtagttgcttttgtgttttaacatagcaacaggaaactagcctattacccaccaatcccattccaggctgctttcaaacgcagctcaggctagaacaccagcacggggacacagctgagacttggggtttgcgacgggaacacgcccatgctgtgcctctgaatctggcaccgtcaccctgtggcctgggttcagcaacttggcctcaccttccttgtctgtgaaattcagactgggtccttgtgagatgattggagagaatgtatgaactatgtgagaacgccacctttgtgcgtatctcacgcagtgtcttccctcctttccaaagtcttctgctgtctctagacacacccgacgtgggggggggggggttccctgggtctcctcctaggtctgtcccaggagggcacgcactgaaggccgcgagaatcccgggggctgcattgcgccgcgccaaggactccacacaggacctttcattttcccaactgtgctgagccaggcggccggcagagagcaggtggctgacaggccccggggagccggaccgcctgggtctaatcttcccgcagactcccttgctgtgcgctttggggcttgggcctcagtttcctcaaaaggaatgaggggcttttttgaacgttaaataatttcctacgtggttgcgggtagggagaaggagaaagagaggagcgcgcctgcgcgcctggaatcgtgcccggatcagagcaagcgctctaaaagtgttacaaacattaaggcgccaactaaaaaacccgtagtgagcgcaggcagaaaccacgggtaagagaagtggagaagcttcgcgtaggccccagggtcccgagccccgagtctcgagcgcagaatcaggggtgccaatgctctcctccgcgcccccgagcgctcgccttggycatgcgggccgccccaccgggatgagggcgctcaggccggacgctggggccccgggttctcgccccgccccgccctcggggattcagaggggccgggaggagcctcgcgcatgtgcacagctggcgccccccgccccccgcgcacagctgggacgtgggccgcggccgggcgggcgcagtcgggagccggccgtggtggctccgtgcgtccgagcgtccgtccgcgccgtcggccatggccaagcgctccaggggccccgggcgccgctgcctgttggcgctcgtgctgttctgcgcctgggggacgctggccgtggtggcccagaagccgggcgcagggtgtccgagccgctgcctgtgcttccgcaccaccgtgcgctgcatgcatctgctgctggaggccgtgcccgccgtggcgccgcagacctccatcctgtgagtgccgcgggggacgccgggggcgcggggtccggggcttcgtggagatccgggagcgcaggggtgatcggaggtggggggcgcggagggtggagggggcatcgggcgcgcggggggcctggggacttgggacgcagaagggaacctccgaagggggacgtggggggacctgggcgcggggacccgctgggcctttgttcgccctgcgggagacgccgaggggcggaacagagcgctgtgcgcgcggccttcgtagccgcctttgttcggaactcggaatccccgcaggactgggaagttgttggagcctccggggctccccccgctcgcctcccgccgccccctctcatgctccgccggcctcccgcttccccctggttcgcggcccctcctccgctcacctttcccccgctcaggacccctcggtccccctccgctccccgagcgcggcgcagccccctccgtcctcccagccccctccgccccgttcctcgtcctgttcgctcccctcctccgctcctcttcctcctccccttcctcctcctcctccccttcctcctcctcctccccttcctcctcctcctcccttcccctcctcctcccccccttccttctcctcccccagcctccgccctctccccctcccccgccccttggagcgcagtgcccaccccatccccccgcgccggggaagcctccccagaggagcctcagttcccgcagccgcggcgcccccgctcccagtgcccccgcatctgcccggagcgtcctctcctggggtgtcctgggggccccgcgcttctcaggggcttttcctgcgcccggagcgagccgggcggccggggttcccgagaggggccgcgcggtagtctcggggcagcccgggtctagatggagccgggactcagagcgggtttctgcctcgggcatttctcttctttcgcttctaatccacgcgagcgtgttcgcagttgcgctatacgtttaaccggatgcgttgcgttggggttgacaccctgtcctgcgggccgtcccgcgtcacggtctccacagcaggaatccccatccctccgccccgcggctccaggtaccgagatgccgccagagttcgctgcaggcctcctgtgttctgaagcgagtcggattcaacattttcgggatctgtgaacgcgggctgcgtttcaggcgccgactctaatttagtcctgtagcgacttttctgcatgccaaaaatagttttcacgtttcttagctgagccagaggactttttggcaccagcaaagagtctgcaaaagttgtaaaaaaattgagtgaacaattcaggaagtgggcggccagtgcgcctacctccgaaacaaagtgctgggacagaccacggctcccaggggtcgccgagtttgcaggctgcttcctggaggccctggggcggggcgggggcscgagttcctctcctcctccgcagagagaccaaggctttctttccagagcccgtgaatggtcagcccaggccggacgactcgggggcatctcactcaacagcagtggacttttagaatggagccgggtgaggtttccctgggtctggataatgtaattcttgctgagccagtggaaaaatggcacctcaaagatttttcccatctggtcagtttcataaagcttgcggtatgttttgccccggaatattaattgcttgttgaaaataacatgttaaaataagtgtcgtaggacacacatggggtcctctgctccgctttgcatggtgtgctcgtccacaaacgcctcaccgaatttgaaaaaggagctgagagtagacgggtgacatcatcgtccactcgcacaacacttcctcatagggtacatttgcatccatttctatcttaaactttcaggggtttttgcagtcttcagtgatacttcgaaatgtcgctgttgagtcacgttgattctgtgaggcaggtagactggtagctgttaagttgatcgaatcccttatagaactaaacactttactggagaaatgaacatacccattttctggcggtggaaacagaagctctgggagagaagcgcagctcctgacgctattcctgtggccaagaggaggagcgtagcgctggtggccagaatggagtcctggctggatgcattgcagccgcgtgatttttagcaagtcccgtgtctcctgggagaacgtgagggtgtagctgtgcggacctaggcacagtggacaggtgtcatgagcgagcgctagtgagtgcagcctggggaggcagggactgagggaagagggagacctattctgcggggatatcctgttgaggggtctctgggggcatggtctggtaggctgttgcttgagatgacacagttctacatgatacatgctacacgtgaagcaacatttcatgtccactttcggctttctcccaggactgtgctctcatgtatatgtgattattttctattacaattttttggtagaaattgggaatatactatatatgaaaatttaaaaaaaaacctgccccaaagttagttggctcatccaaccatcacaccgtccctttgcttttagagactcacctccatcccagtcccccaaaagattaaatcagagccattggaaaacatcttattgctccttcccctcaaatgctccaggagtgtgtttaagcgggtctgatactgggttgtctgatttgtggcttgggggctttggaaaacagtggaataagcccatccgtgactcagtttggatcgacctttgagctccctcagctgcaagtgtgaagggagctctggaatggcaggagcccrygccctgtgctgctcggtyggcggtttggccttgctgytgggtctcctgcagagcgcctcccctctggaggccttacttagttcagctgtgtagaaatggttggtttttgaatacagaatcattctgtacccaacacaatagaagttcatcacaatggtagttcaaagctagtattaaagataaagtatgccgttgtacgccccttcctttcctcctctcaaccccaggctttttggggaggtcacatttgaaacattcttcttcacggtcacgccgctagggtgctggctggacacactggagctaggccctccacgccctcctcctgtcctgccttcctctcttccctggagccgccacggttgaggctatggtcatggattcatcaaaactaacatcctcaccacagtccaggccgctgcaaagccatgagttgtcccaaactgcagttctgtgacagaaaccctgacattggaggggtctgggcatgtggagcttggggtgggctcagggaggtcgcattgcagagaaaccacaggcaggcgcatggcagccagggcggggcctcctctcctgcagaatctccagacagctgctcctcattctcagtttttctcaccatctgctgggtgttaggcccacgccgtgtgctgggtgttgggccacccacagaaaacgagaccggaatcttgccctcatggaatccccagtccagtggggcccccagagagtcagggggcttcctgggagtggtaagatgaccccaggtgtgtgcagtcctggtgggacggggtatggggaaagggcgcacagtgcttgggaccctgcactcttggtggtctggactgagtggaccagcccacctcccgcctgtgttcacatgagcagaaggttccagtgttgctgctctgtgggtctcctcccgcctgcaggccccccaggccctctgggggctctgggagtctatgggctcatagtccataggtgggagtgggtgtttgggccttttaactgacttcctgtgtctaggagactgcgtcgcctgagtgagtcacatgggtcccgaggttcatccttggagcttccctgacctcccttggagaactggctgcctttcggagaggacctctcctcctcacacgcagatagaggtcacagggtgtttgttgcctggcactcagggagccggctggctggtgctgcagaggggcccgcctgccggggactccctggctgtccaccctcagcacttcccatgccctcctcctcctctgcaccctcctgctcccgggaagttccctcacatctgactgcgtcttctgggagtacccgcggtcccgggatgccaggcctctcctcctttgggcaggagactgcagtggtcccgggtgtgagtgggagcctggggcctctccgccctatgcgggatgtgcagatgcrtctgctgggacagtcctgcaggtgctagtgtcagtgtttgccttccatagaacagatgatgctcatgtttgttggcacaacagagtcaaagactttattattgccacgcaaatacatttgaaaagtaccatagagatacttaaaacatttagatgttgataatttatctttgcaaggtggtgggcggaccaaacattttctcagcgtgggagcctgggaggcggctgatcttcagagctctctgtgttctgtggccagaagaggaaaatcttcagtgttcaaaataagcttagagagggcccatccccaagacagtgtgtgttgggacctttcctgggatgtccagtttgccatccagggagtatgtgagacccttaggctctcaccatgactttaacctttgaaaactagtatgtgactacatgagtgccacgtgtctggaaagtgctttctcttgttaggaagtcagagtaattgagctcttctattgttagawcttgccttcctcctctgtgttttttcatatgtcaaggaaatagttgtaaaaagaaagcatatccttctctatgactctgaatccaggggcagctccagsttcaagcgtggcttgatccagggtcgacatgctgtgatattctatcgttttctccccagcgtgggtgacttggcttgcttctctgttgttctgactcagtttccctagttgctgatgattggcagctgtatagttcccttccgacagagctaagtccggtgaaaagagaatgcgtgactcagtgcacaagcagaagtttggggaattgtcttaayggaccagatggtctgtgtggcacgccagttttcaagacgtccatgagtggacaggaggccttgccactgggtctggagcgcatgactaccttccggggccatggaaggcatctgatcttcccggaacacactggccagaagctgatgagggccccttacctggggtaaaacttgggcctttttaagcgaagtgggtgttgcattgtccgggcaggagcctccgtggcacagatccagggttcaaaattaaatctgtaaacagaacaaagacagaattccagtctgcagggcagacgtcatgaatctcaaagcgaggtaagagctggaagatcaggctgggtgtggtggctgatggctgtaatcccagcactttgggaggccaaggcgggcagattgcttgagctcgggagttcgaaggccagcctgagctacatggcgaaaccccttctctaccagaaatacaattagctgggcctggtggtgcacacctgtggtcacagctactcgggaggctgaggcatgagaatcgcttgagcctgggaggcggaggttgtagtgagatgggatcatgccactgcactgcagcctgggtgacagagcgagacctagtctcaaaaaaaaaaaaaaagtttgaagatcaacttgcattatgctgattcccattggcttattatgagataaatacctttctgattggagaatccaggtgtttttcctttgcgcttgacagtaagaagctaaaatagatgcaaatgcatgcagtcctgcccggcccacatcagtgctctgggaggggaactcagggctgggaatcgagtgatctctcaggagtacagagatcttccccgctcctactcagggyctggagctgagaagctaatgctggcctctggtctttagtgaccaacaygtgagctctctcgtacttcccaacgcccaggtttactaattattttaatagtgatagttccatatgcttttggggttcagaagaaaatgtgatttatttaaaagtaccttttttgagggaattcaatttaagagaagaccaactttaccatgtttgatgcttaaatagcygatcaggacattttatatgttagtggtatctctctatgtgggccagtagctccycaggatcaaggctggatggttgaattgttaaactctgcctgctkccagaccacctgcatgtgacttagcacacatatgttagtgggtggctgcatgcttcttttgatgctaaagtaatayaactggttgatagatatttttctaaattcataacactagtaatttttgttttctttgttttaaagtttattttgaaaaataggcattaaggggggcatggaggctcacacctgtaatcccagcactttgggaggctgaggtgggcagatcacctgaggtcaggagttcaagaccagcctgcccaacatggcaaaaccccatctctactaaaaatacaaaaattagccgggcgtggtggctcacgcctgtagttccagctatcgggaggctgaggtaggagaatcgcttgaacctgggaggcagaggttgcagtgagttgagatcgtgccactgaactccagcttgggggacagagcaagactccatctcaaaaaaaaaagaaaaaaataggcattatgtttttccccatctaatttctcttcagatccaaaaggccacagcaaaatagtaaatctaaaagatgtctcagtggaatgattactcatgcaatgtaaactgaagctgacaaaaacgaacaaaaaccatgagtagactgtccgctgtttcgtgggttagattatcctggcgtagatacgagatcagtcatcactgctgtgttcattggtttctttattctggaggatgttgctttccctcctgtttcaagctaagaggatgggagacacagaactccaaggagactagcccggaggcccgaggtgaagaatggcagccgtcctccgggcgtctgagggccttgggtgttctggtgtcttgtttattccagatctgactgcctcctgcgtcatctgcccgtggaaagcagggttcatgccctgctcctgtccagatgccctgcacatctgagcagcccggagcaccagggcagggtgtttacgggaaagcaggctgcggtcagccccacacactctgtcctaccgggctgttgtatgctgagccctgcagagctttggaggctttaggaggagccttcgggagcatctgtcttttgttctacagttaaatcagaaggagaggcttgaccagtgactgttacctgatttgacctttgtccacatgagmtaacaaaactcttatcagacataattgacattttaaaagggcacatacttaaagtaggcttgctgagttttgacatccgcctccaaggtgcaagtaatcctcctgccttagcctcctacttttagctactcctgagtagctgggactataggcacgtgcccccatgcctggatttttttttttaaatttctttttaattttttattttgtggagatggagtcttgctatttgcccaggctggtcttcaactcctggcttcaagcagtcctcccaccttggcctcttgaagccctgggattacagctgtgagccatgtggctggcttgtaatcagtgatcttttatgttactattgtaattgttttggggtattataaaccacacccatgtaagactacaaacttaatctaaatgttgtgtgtgttctgactgtccactgactggccgtccctccatctctcctccctttccaggccttattccctgagacacagcagtattgaaatcaggccagttgataaccctacagtggcctttcagtgtactagtgaaaggaagagttgcatgtcccttactttaaatcaaaagctataaatgattaagcttagtgaggaaggcatgycaaaagctgagataagtcaaaagctaggtctcttgcatcagttagtttatggaggaagttttagtggtttgggaagaagagcaaaccagccacaacattccactcagccaaagtttgatccagagcaaggccctaactctcttcatttctgtaaaggcagagagttaaggaagctgcagaaggaacgtttggagctagcagagattggttcatgaggtttaaggaaagaagccaactgcataagataaaagtgcaaggtgaagcatcaaatgctgatggagaagctgcagcaagttctccagaagttctagctagtatcagtgattaaggtggccacattcaacaacagatttttaatgtggacaaagcagccttctatgggaagaagatgccatctaggacttccatagctacagaggagaagtcattgcctggcttcaaagcttcaaaggacagggtgaactcttggtaggagctaatgcagctggtgactttaaactgaagccagtgctcatttaccattccccaaccctagggtcttaaggaccctgccaaatctactgtgtttctgctctaccaatggaaaaacaaggcctggatgacagcatatttgtttgccgcatggttctctgaatattttaagctcactgttgagacctactgctcggaaaaaaagattattttcaaaatactgctgctcgtttacaatgcatctcgtcacccaagagctctgatggagaatgcaaggggattaatgttgttttcatggctgctaacacaaaacatctattctgcagcccatgaattagggactaattttgactttcaagtcttattatttaataaattcattccataatactgtaactgctatagatagcgatttctctgattaaactgggcaaagtcaactgaaaaccttctggaaaggagtcatcattttagacaccattaagaacatttttgattcatgggggggtcaaaacatcaacatgtacaggagtttagaagaagttgattccaaccctcatggatggctttgaggggttcagagacttcgtggagaaagtcacagcagatgtggtggaaatagcaagagagctagaattagaaatggagtctgaagatatgagagaattgctgcaacttcatgataaactagaacagagggggagttgtgtctatggatgagcataaaaagtggcttcttgagatgaattctactcctggtgaagatgctgtgaacattgttgaaatgacaacacaggatctagaatattccctaaacctagtggataaagcagtagcagggtttgactcccatttttataggataggcaaatgtgagcctttatttttatttatttatttattgagagatggagtctcactctgttgccaggctggagtgcagtggcacaatcttgcctcactgcaacctccgcctcccaggttcaagtgattttcctgcttcagcctcccgagtagctgagattacagccatgcgccaccatgcccagctaatttttgtatttttaggagagacggggtttcaccatgttggccagaacagtctcagtctcttgacctcgtgatccgcccgccttggcctcccaaagtgctgggattagaggtgtgagccaccatgcctggccgattgacttcaattttgaaagaagttctactgtggataaaaagctatgaaacagcatcgcatactacagagaaaccttttgggaaaggaagagccaatagatatggcaaacatcattgttgtcttattttcagaaattgccgcagctaccccagccttcagcagccaccaccctgatccgtcagcagccagcaacataaaagcaaggttctctaccagccaaaagaagaaaactctctgaaggctcaggtgttttataaaatttttttagcaataaaatattttttaaagtatgtatattttttagatgtaatgytactgcatagttaatcagctatattatagtgaaaatagaacttttgtatgtactgggagaccaaaacattcatgtgaataacttttttgcaatttttaacttatttcagtgatctgggcccaaacctgaaatatccgagcggtatatttctctctggccccaagttttgtgatattgttgtcctacattttatttgtacatatgttataaactccacactgtacttctgttatttcatttaagctgtcagttatctttttagagatttagataaacagagacatgtttttattctttccagtgctgcttattcctctgcgtaggttcatatttcagtccttttacttcaagagctctaaaaaaaatgtcttatagtgcagctctattggtaatcgattcctttagcttttggatgtttaaamagtgctttcyttaccttgccttaatttttgaatgatattttcctgagtaatattctgagttggtgattttctctgacactgctttttttttttttttttttgtcatttgacacagaatcttgctctgttgcccagggtggagtacagtggcaccatctcggctcactgcagcctccgcctcccgggttcaagcgattctcctgcctcagcctcctcagtagctgggattacaggcgcgcaccgccacacctggctaatttttgtatttttagtagaaacgggatttcaccatgttggccatgctggtctcgaactcctgactacaggtgattcacccgcctcggcctcccaaagtgctgggattatatgcgtgagccgcactgcgcccagccgacaccgctttaaaaatgtcctctcacattgtttcccatgaggaatctactgacacccatatcgtgtcagtacaacgtctgtgtgtttctggcygcttttaagattttctccttatccctggtgtggagcaattggattatgatatgccttggtgtggttttctctgtgttttttgtgcttgggtttttaaattttgattttaattttttatttaattttatttttaaatttttggacctgtgggtttacagatttcttcaaatttggaaaatctgggggtgtttcatcttcagatatgttttctgtccccatctttgtctcctctttttgaagattccagttatacgtgtattaggccacagctctctcatccattgcttaattttttgttactgtgcctttttctctatgtgtttcattttgggtagtttctattttttgtcttgaaagtaacaagtctttctttctcaatgtctgatttgctgttaattctacatgtttttcaaatcagacattgtgattttcacctctagaaaatgcgggtattaaaaacaaaccttccatgactacttggtgttttgaacttgtggaataaatacaattttaataatctgctaactctaacatctgtggcagctctgggttggttttaattgaataatttaatcttctcaatagggattgtaatatccttcctttcatgccatatcattttttaagcagattccagacaatggaatttcactttggtgagcactggatatttttgttttcttataattatccttgagctttgtacttggtacagttatatggaaacagtttggttctttaaggtcttgcttttaagatgtgttgggcaggattggagcagtgctttactaaggctcatcgttttcaacaactgaggcaaggcccttccatgtcccataccaactgcctgtgaatcatgaggttttcagtctggctgatgagaacggcactgctcacttctggcccagtgtgtgtgtgaccctgtgatccttctggccccgtgtgtgtgtgaccctgtgatccctactccatttgggtggctcttttctggctgtgggcagtttgtgcagctcagggctcagctcagtgctggaygctctgcaggcccctgggccttttctctccctatcccgggagggctcaggcgtcccatctctgtcctgccaggtctgctgcctggcctcccygggytctcagcrttgtcttctctcttaggcaatgagctggggccrttttctgctggctacatctgttttccatcacacggatcagtgctttgttggctgatgcccagtaacttgaaaacagttgcttcatatattttgtcagtttttttggtttttggttgtttcagacagaagagaaagtcttgcccctataatcccatcttgttctaaagcagacatctctgaattcttctgcaagcaggtgtggtaaaataaataacatcataaaataatgaccacattcacattcccaagctcaaatttaagaaaagatgaaaatgactcaatcctggtgttctccatctgtctttggaatgctgttgccttagtcagggccattcggctttagttggtgtcctgaacaatggcagaacctcagtgccttaaaacagtgtgagttcctgccccactcacacaaaaccccrtgcaaatgttcttggctgggcagctcttcactggaggctcagctctaagccttgggatagctgcgtgttttgtgcctgagctctgtgggatgtgtcaggccgatctgtctccatttcgtctgtggctgcccacttctggcagaggcagaggtgagtagttgtcacaagccaagctgtttagtctggcttggtaagaacatgtttgctctgacattgacccaaggatcccagctgtgccccgcctgaagctccaccatcatccatccctggcctcgaagctgtcacggaaggggagagaggaggttatgtgaaggctctctgctcccacctgctcggagctgatgcgctgtttctgctcccagcgcactggagagacagcacacgtctcaacccagatgcaagggtgctgggatgcggaggtcagctgcstgtccaggaagtggaagtggaccgtgagcttctcagtttttgccatagctgtcccaaagtttaatagcacacaattattgctcgctctcttaaaacttcctctcgctagttcatgtgtgtgtgtgtgtgtgtgtgtgtgcgcacgcgctctcaacagtgttctgttggcaaggatggagcagctctgcctgcttatcacttttcagagaggtctgtgatgttgatattccctttgcttgcttctgtgttctgggacttacagtgattttaccacctcccaacccagcttctaatgtgggctgtagcaagtactaccacagatagttttaaaactctctccctcctcttctcacaggaagcattttgttatcatttggggattaaaggcagtttgtttatgcatcatggcccagtgtgattattgcgctaagggtagaatggtttcagcgactggaaccataggtcacagccggattgcttgtaatctagttgcttaactgaagacttttctctaagggatgggacagatttgggtttgacctcacatgtgccctgggtaattagagaagtaatgggtcaccagtggaggcttagaaggaagccagcaggaatccctaattctcagcctggatcattggcttctggggaccaggagctggatgtttaagtggttttactcagatgtaaaccatgcctcctcccctgcctgtggctgggccgtccgccataccctgagcctkactgcggtgctgccctttagccaaggagccccggctcttcctgtttacttagcgcaattctaaagttgtgtatgaatttgtaagagctttggaaagttgccccactgccttctctcccaggacccctcaactgcccatccctgttcacctcttgtaggtgtggagtttggttgggcacacagaggggtataatctgccaggcctgtttgccacaagggctcagcagctttttctccacaagctgtaagctaagaattatgatgcctgctcttttacccactaattgcatcatccagctttcttttacaacatatttttaaaatatttttatgcaagttacacatgttcatgttagaaaaatttaaaaataaacaggaacaaartgaaacaaattactcacattgctgtcattcaggagaaacattagctgggctttgttctcagatgcacacacacagaagcattcaggcgtgtgtagtacgtagcagtatttgtctacctgttaatatttatctgtcatgtatctattttcaaaaattgggtcatgatacatgttctgctctataatgcactttgtatggttttaaaatctgggaatatattatgattgtgtgtctgttcaataattagaggcctccatcatcattgttaatgaccacacagtatttgtttgaaatgaccaaatctgcctaacagaatttttattatgggtcatttctttgtttctacttttctgctcctgcaaacaatatttccaaaatgtgattgcatgcatttttgtgtgtgtctgtctagattgtttttacggcacatttctagagaaatctttttttaaaaaaaatttcagtagatttttggggaacaggtggtgtttggttacatgaataagttcttyagtggtgaatyctgagatttgggtgcacccatcacccgagtggtgtacactgtatccaaygtgtagacttttatccctcacccccctcccccaccctgctgtaggaacattctgggaggttttgatctgcaccagggatggtggttggcctacggtgggctttccctgttgtgttttcttcctggcccctgttcatattatcctgcggatggatgttctctgtagctgagcagtggtgactgacttactacaggactaatatagaatgcaccttcgttggggagcctgtaatgggtcaggagggagggctgaagggagggtcaggggctgaaggcaccgtctctgaccccgggatggtggaaatacagcctgtgtaagtgctcatgtttctttgctgagtgactgcattttgattcttacaatttgttttttctgcaaatggtttgattttcggtatgccctgagagccaaaccatctagcgtttgtgcctgtcatgtatgtttatttgccagctctgtctttatcccaggttctgacagttcgcaccgtgtggcttgtctgtgtcttgtttgrtctctgcctcacagtcagctgttcttaccagacccatagtcacaccgggccccgcactgggaggagctcacagagcagccagcccagcgccctgcctgctgttccccggggcggagcctggttagccatggtggtcctgttctgcagagccccagaatgctgaataaaagagggctcggcctgtctcgcttctagaggactcgcagggctatatctgtggccacaaaagttttttcaaatcctcctgtttcgcgtgcattcctgttgaaggacactttgtttctgtacattgttgattcactgacattgttaacgagctgtggccgggaacactgtcccccattcctgagtggagcttctccaccacacctgttcctcgtgagggcagcacagccagaacggcaacactgtgctttggggccgttttaaatagcaaaatcaccaacaaaagcacaaaaagtgtgaaatgcgtggccctaaatagaccttgaaaaagaccctgtttacggcaggagagtggaaacaagagggccgttgtcagctttaccagctcagctgtggacctgggtatcaggtgactccgatttttccccattctgcgcctgtccgcagataatggcggaggtgctccaagtactgattttcgaggtgaagtcacaaatttggaatctgcaaataatgcggagggactgtattctccggctggtagctcctagagagaggctctgtgctgagggcccagggaccctgccagcaggtgcccttgccgtgtgaccgcctcaagcgaaaccggcctcggaatctgtgctgcagggtttacattagttgttgagaacaggacagttggctgggtgcagtggctcacgcttgtaatcccagcactttgggaggctgaggcggatggatctcttgagctcgggatttagagaccagcctgggcaaaatggcgagacccgtctctacaaaaaatacaaaaattagctgcacatggtggtatacgcctgtagtcctggctactcacttggaggctgaggcaggaggattgcttgagcctcggaggttaaggctgcagtgagctgtgattgcatcactgcactcaagcctgggcaatagagccagaccctgtctcaaagaagagagaacaaaagaaggaacaggacagtcttgtgcagaatagcacaagacagtgaacagtttagcagtccttaaccaatcttmtttaggggagaaaatatcttgcctttcagactagatcaactctaaagttgttatatttaattatactattaggaagtcagaaagaacacgccacgtggaggccctgctggcaggtgctggggatggagatgaactcagctggctctcggcgattgactcacagggggtctggtgggcagggggttggactccactgacctgtggtgtgacacggtggagactgttcttgagrgggatgggaaggctgcctaactgagggctgaggaaaaatgcacctgcgtggtggagctggcagcaggtgcagggcatgtgccagccttgagctggggtcctggtctgtgctttccggatgtgctcccttgaggacgtgaccgcaccccttgaagcctcggcttccccatctgtaggggtcctgaggagtgaggaaggctgtgcgtgcaaacctcctagcgcacagccaagcacagtagctgctcttgcaatggatgctacttattacgttacggcttgcatggaatcctgcacatttaagtgcgataaactgaaatatgaggccaaagaactttgtctgaaggaggggcagccgctggtccaaggctcaggaggagggagcaggagggacttgggatggctgtgacggggcggtggcggttctccgggtggagggtgggctgtgtgtgctcgcagggcttggtcagcgtcagcggttacttgatatgctgactttagttgaagcagatacttggatgcaaacaggaaattacaaggaagcagagtgttcactgcatttgagaatggcaattttgtctaaccgaccagacctatgtgtttaagaaacatctgattttcccttttgagacaacactttctgccttccgggggtccaggacatgatccgtgagtgtgcccttcccttcccaaagccctgtctttattttttaaaaagcaattctcgatttctaaagtgtcatactcacatagatctatgttaagtctttgctaagaattacggacaataaaaacggaaattcaaaagcaaaaataaataaacaagtaggactacattaaagtaaaagctctgtacagccaaggaaataatcaacaagatgaaaaggcaccctataggttgggagataaatatttgcaaactatttatctgataaggggttagcatctaaaacatgtaaggaactcatacagctcagtaaaacaaacaaaaaacaaacaagcttgctraaatgggcaaaggacttgaatagacatttttcttttttattttattattattatactttaagttttagggtacatgtgcacaatgtgcaggttagttacatatgtatacatgtgccatgctggtgtgctgcacccattaactcgtcatttagcattaggtatatctcctaaagctatccctccccccctcccccgaccccacaacagtccccagagtgtgatgttccccttcctgtgtccatgtgttctcattgttaaattcccacctatgagtgagaatatgcggtgtttggttttttgttcttgcgatagtttactgagaatgatgatttccaatttcatccatgtccctataaaggacatgaactcatcattttttatggctgcatagtattccatggtgtatatgtgccacattttcttaatccagtctatcattgttggacatttgggttggttccaagactttgctattgtgaatagtgccgcaataaacatacgtgtgtatgtgtctttatagcagcatgatttatagtcctttgggtatatacccagtaatgggatggctgggtcaaatggtatttctagttctagatccctgaggaatggccacactgacttccacaagggttgaactagtttacagtcccaccaacagtgtaaaagtgttcctatttctccacatcctctccagcacctgttgyttcctgactttttaatgattgccattctaactggtgggagatggtatctcattgtggttttgatttgcatttctctgatggccagtgatgatgaacattttttcatgtgttttttggctacataaatgtcttcttttgagaagtgtctgttcatttcctttgcccactttttgatggggttgtttgtttttttcttgtaaatttgtttgagttcattgtagattctggatattagccctttgtcagaagagtaggtcgcgaaaattttctcccattctgtaggttgcctgttcactctgatggtagtttgttttgctatgcagaagctctttagtttaattagatcccatttgtcaattttggcttttgttgccattgcttttggtgttttagacatgaagtccttgcccatgcctatgtcctgaatggtaatgcctaggttttcttctagggtttttatggttttaggtctaacgtttaagtctttaatccatcttgaattaatttttgtataaggtgtaaggaagggatccagtttcagctttctacatatggctagccagttttcccagcaccatttattaaatagggaatcctttccccattgcttgtttttgcttttgctgcctgcctctgttcattcctatatatagaaaatcctaaagattccattaaaaactattagaactaataaatttagtaaagttgcaggatacaaaatcaacatacaaaagtcagtagcatttctttaaaccaacagcaaattatccaaaaagggaatcaagaaaacaatctgttatgatagcatcaaaaagaataaaataattaggaataaattaaccaaggagatgcaataactgaatgctaaaaactataaaacattgatgggaaaagactgaagaaacaaatggatggagcattatcttgtgctcatggattagaagacttaatattgtttaactatctacacaacccaaagtgatctttacattcaatgcaattcttgttacaattccagtagcattcttcacagaaacagaattaaagcaatcctataaaatttgcatggaaccacaaatgacyccaaacagccaaagcaatcttaagaaaggagaacaaaatatgaggcattacacttcctgatttcaaattatattacaaagttataataattaaaacattatagtactggaataaaaacagacaaattggccaaacaaacagaatacagagcccagaaatgaactcaggcatagatgatcaactaactttcaacaagggtgccaagaatacacaatgaggaaagggtcgtctctttgtaggagagcagtctgttgaatggcagagtggtgccgtcttgaagcaaaaccaccatgatgatcaatgtttgactcctccataccaaggtgttctgcagcaagatctttaaactgcagcatagataaacactcataaagatgcttatctaacctcctcagtggtcacaagtttcacaagaaagtctgagatgtgaccaactctacatgttttgtcaaaagaacctactataaaaaggatattttctgtgtaagtctctattaaatattgctttctgaccaaaaaaaaaaaaaaacggaaattcagacttactttaaataaaatataaggctgatgttggtagagatggaaaaattttgacttagcacggattgaaactcttagattaatatttttctgtggggacaaaaataagactataacaactttcaggcaggaagatttcttcaytgagaattgttgtgggaaagaaacatggctttggagacaaaatgcgacagtgtctgtgtttcagcagtggaaaacaaaggctgcagtttatctgaagtccttgtcattaaatttatgctccttttcctagtcatagccaagcttccttttgggaataagatgaaacttgttgcatcctggcatgaagcaaatatttctaaaaatctataaccagcagagcaacacttttaacttttaaaatatcaattaaagcagatacagttactcatgattgtaacttactcaaacgtgggatgtttgtattggcatggcaacaggcggctgatgttagtcttgaacatttgttttcttgtgcatgtttttttcattgtataattttcctggatcagtgcccatgtcaccctatccattcacgtttacccatccatccataacccccctttcatccatccattcatccatccatccatccatccatccattaatccattcattcatccatctattcatttattagtccatctgtctgtccatccataaccacctatccatttatccatccattaatccatccatccatccgttcattagtccatccatctgtccattcatccataacaactcaaccatctattcttctatctatccattaatttactcattcatccatctgcccatttattagttcatccatctgtccattcatccataaccactcatccatctrtttatccagtcatccacccacccattaatacattcattcatctattcattcattagtttatccatctttccattcatccataaccacacatccatttattcatcatccatccctccagctatccatccattaatgcattcattcattcacctttccattcattagtccatctatctgttcattgattcataaccactcatccatctattctttcttccattcattaattcattcatccatctgtccattcatccataactactcatccattttccagtcagccatccatcaatgtatccattcattagtccatctgtccattcatccataaccactcatccatctattcatccatccatccattaatccattcattcatctgtccattcattagtccatccatctgtccattcatccataatcacccacctatctatccatccatgatgcgtgcatccatccatccacacatacatctctccatctagctacccacccattcacccatccatccatccctcactactggaatcactgtgaagtgtcccacagtggtgacagcagcaggctgtcaggtgcttgtggtccagaaggggtcaggctgtgaggcacaccgtgccctgcaacactgtgcccctggagccacagccctgtccctgcttcctcgtacccccctcccatattttaagaatagtgttggaagcctagctagagggttatagagaaggagatagctgtggaaggagccccacctgtagacgcacacctcttttctcctaagttcagaatgcactgattttaaaatacaactttcttatattttttgaggggaggttagagaagcctcctttgctgggaagttcctcagagttctgtgtctagcagtctttttcaactggttattgagaaaataaagctccaaagaaartgatttgggtgaatatgttcccagttcttctgaggatcacagccagctagaatctggatgctgggataacccatgcattgcacgcaatggattctgcgttgagattctcctgttctcaatttctcatgggagagggactgccaagccaccaggactctgaggactcagtgccgagagaggagactgcgtcagcatcacagtcctggggtgagggaacggccatgctggctgctgaccggaataacctgaggtaaagtgaagacgtccacgtggagagctttcaagagggactgctttggcttaattttattcttcttacatgttctattttgtgtccgctcgctcagaaacttcctgatagttcatcttcagcccatccattgtcaacacctctcgggttcattatttctcgcttaactctgtcttgtggtattttctcatttataaaactgtcttatttagcactttaaaaagcgtttcctcattcactcatcagcttggcttgcctttctcgccttcctaacaagtgatgtgtatgtgggaattcccctaggttagatcccctttgagtctcttagtaactatttggtataaatatttcttgattccattttatgattcatttcctcagtggaggtcattaaagcacagcctgatttgaggcttttwtttatttatttatttattttgagacggagtctctctctgtctcccaggctggagtgcagtggcactgcaagctccacctcctgggttcacgccattctcctgcctcagtctcccaagtagctgggactacaggcgctcgccaccaagcccggctaatttttagtagagacggggtttcactgtgttagccagtatggtcttgatctcctgacctcgtgatccgccygcctcggcctcccaaagtgctgggattacaggcgtgagccaccgcacccggccaatttgaggcttttagaaaagcaacaagcaaaactcaatctgtttcactagagcctggagtcagttacttcctgggcttggtttgtgaagaggggcttcctgcctgctggttggctgaatcctggatgaatgcccagtgggattaacatgattcatccatttgttttgctcaactcaaagagcacactgggtctttctgaacaggaaccacctcaattaacccgtaccgttgttgaaactattcccgttcagttgtttgaattctgacacttctaagttggcttcatctcagctgcctgccacatttgcaccttctaagtgaaggagccccatcctcagccacgctgcctgcctgcctgtgatgctgaattttatgtcgacttggctgggccactgcacccagatatgtgctgagacattattctggatgtttctgtgaaggggtttttagaggacagtaacatttaaatctggagactttgagtagagccgactgtcctctgtggtgtgggtggacctcgtccagttagttgaaggccttaacggaataaaggctgacctccccggagcaggagggaattccaccagcagaggcggcttttggactggagctgcagctaccatgcttccccggggctgtagcatcagtaagcggccagcatgaggactgctgtcctgggtcaggcgcccacccaggtccaaccagctgcggtccgggaggaccaggtcatgtgacacacattgcgaacactgggttggtcagggttctccagagaaatggaaaccacaggatatgtgtacgtgtgtgtgtgtgtgtgtgtgtgtgtgtgagagagagagagagagaaagagatgcagagagagagagaaagagatgcagagagaaagagatgcagagagagagaaagagatgcagagagagagaaagagatgcagagagagctgtatctgagaggcaaaggtggtcggctgcctccccaggctctggtctggagcaggtggtgtgagaaagcgtggagcgaggcactccctgcagactctggacttgccaagccaccaccatctcagccagctccttaaaatacacctcccttctgcctctcttctcaccttcaaccccacctctctctctgcatccctccctctctctgtgcatctctctctctgcatccctcccctccctctctctctgcatccctccctctctctgcatccctccctctctctgtgcatctctctctctctgcatccctccctccctctctctctctctgcatccctccctctctctctctctctctgcatccctccctccctctctctctctctgcatccctccctctctctgcatccctccctctctctgtgcatctctctctctctgcatccctccctccctctctctctctctgcattcttccctccctctctctctgcatccctccctccctctctctctgcatccctccctccctctctctctgcatccctccctccctctctctctctctgcatccctccctctctctctctctctctctacatccctcccctccctctctctctgcatccctccctctctctgtgcatctccctctctctgcatccctccctctctctctctccctctctgcatccctccctccctctctctctgaatctccctccctctctctctttcacacacacacacacacacacacacacacacacacacacaatgcacgcatgtacacacatcctgtggtctccatttctctggagaaccctgaccaatccagtgttcacgatgtgtgtcacatgacctggtcctcctggaccgcagctggttggaaccgggtgggcgcctgacccaggacagtggtccatgtgctagtcactgatggtcaggcttagcccagccagtgctgtctcctgagaacttgaacttgaaaatgttcagggattaacagctggccgtgggggctgaaactggaggactgtggtgagaatccagagaggccctggaggccgctgttagaggcacaggggtgctagggagccaagcaggcaggtcggcggggaccggcgaggagttcgatgcctcctgcaaggccagtgtcccctcttaggttccatgtaccctcaaggcacacaggctttgtgtggtttatgtaaggattcgtgctggggagaggaccctgagcaggggcacagacccaggagggcctgggacagagcctggctgggttgggtgctgccggctgctgcctggggagggcctttctccatggggtgtcctcttaggggattgccaggctgtggctgaggggtgaaggtgggtggctgcctcccctggctctgttcccacacggggagcaggtggtgtgagaaggtgtggagcaagcccccttccgagtaactcaggtgggaggcatggccgcagggccccaggctggctcgcycgtctaaggagccatgactgcgccagtgcagccagcccctggcccctggcgtctcagctcggctgctgtgcccggtgtttgcctttgcagggaccttgcgtggctgtcagcgtgtcctgggtgtgcccctcacatgccatctgcgaggtatggtcttcggggctgggcttcctccacggccataagaacccctctttgggctggagttgtggcaagttgctggtggcaggtgctgggagctgcccgctctgccttgccctgccctggccatttcttcctcagcctgtttggctgtggcaggccagagctggagaccaggctcaaccagaggactggacatcaccagagaaaggatgcctagaaaggcctggagatccagcagccgtaaagggaccacacacgccctgcccgcgtcaccccgtgtttgctgctctgtgtcaccccgtgtgtgctgccctgtggcaggtttgggtggtaggttagtggagtaggttaaaagagtaggttagggtggtaagttagtggcataggttaataaagtaggtttgggtggtaggtcagtggagtaagttagtagagtagcttcgggtagtaggttaatggagtaggtttgagtggtaggttagtggagtaggttaaaagagtaggtttgggtggtaagttagagtaggttagtagagtaagtttaggtggtaggttagtgacatacgttaatagagtaggtttgggtggtaagttagtagagtaggttaatagagtagctttgggtggtagattagtggagtaggtttgagttttaggttagtggagtaggttagtagagttgggtggtaggttagtggaataggtgagtagagtaggtttgcgtagtaggttagtagagtagttttgggtggtaggttagtggaataggtgagtagagtaggtttgcgtagtaggttagtagagtagctttgggtggtcggttagcagagtaggttagtagagtggttgggtagttggttagtagagtagctttgggtggtcggttagtggagtaggttagtagagcaggtttgggtagttggttagtagaatagctttgggtggtcggttagtgggtagggcaggtttgggtagttggttagtcgaatagctttgggtggtcggttagtgggtagagcaggtttgggtagttggttagtagaatagctttgggtggtcggttagtgggtagggcaggtttgggtaggtggttagtagaatagccttgggtggtcggttagtgggtagagcaggtttgggtagttggttagcagaatagctttgggtggtcgcttagcagagtaggttagtagagcaggtttgggtagttggttagtagagtagctttgggtggtcggttagtggagtaggttagtagggtaggttagtagaggatgtctgtgctgcaggtcagtagagtagtccatgtggttccaggctcaggatcagctattttgtgattctgtctgcattattagaagaccttctataaataagtttcccgcatcaacaatttggtgacctgattcttttcatctattaggtaaattaggtgagtctattgttgcaagtttttcttttgtcaataggagtttacaaagattcaggggtgtgtgaagtcttttccgtttgtgtgtggacccattgtttcctggttgtgtggttaccagtcaggaaaagctgctgagcccagttgaatcagatagccccgggcgagaggcatttggactgatccgcagaaccgagaacaaagaggccttgaatagtggacagacagcagcggaatctctgttcccgtcagactttccaccagccagtttaggcattaatctattgttaggggaaggccaagaattcaccagccaagcaggctttttttctcaggagtggcctcagccaagaggatagtgagggagctttctcatggccagcgtttctagacgtcagatttggggaggccttagcattttaagatcgatggctgtgttacatcagatttgtcttcccatcagtatacagaccttagccaagttaaaaatggggagtgttgagcgcagcagagatcgtgcttaccaaggggctgttgagagtgggtcagagagcagggttttggggacatggggctggatgggggcaaggctagtgacgccttctttttctgcccctgttgggctgtgtgactttaggcacagggacccacttatctgaacctgtccatgtggtgtgaaatgaaggagtggaactgggcttcctttcatcattttccagcccctcatgtttgtccttggggtcaaacaggtgtgtctggagcggttacccctgtactgatggagaaggggctgggagggcgtgagaggtaccaccagggcataaggccccagacaggacctcactgtgggccccaccacgtgattgcaggtgcccgtctctttccgaggaggatgctgcacactgggcctccatgccaaccccttgccccaggtagagggtgtccctgtgcccagcctgcccgccacctcccacgctagtcctccttaaccaccagcttcccactgtacacctcttatatccagtccttgccgcagtcctgggaggcaggcgatgttgccaccctggttttttttttttttttttttttttttttttcctgagatggagtctcactctgttgcccaggctggagtgcagtggcatggtctcggctcaccgcaacctccacctcccgggttcaagtgattcttctgcctcagcctcccaagtagctgggattacaggtatgtaccaccatgcccagctaatttttgtatttttataagagatggggtttcaccatattggtcaggctggtttcaaactcctgacctcaggtgatccaccctcctcagcctgccaaagtgctgggattacaggcatcagccactgtgcccggcccaccaccctggttttatagatacgtacactgaggctcagagaggcccaggcwtctgtccaggaagccacagccagtcaggtggcacaggtggactctaccccaggcctgcctgttgccttgtctttggccaacactccaccacctgccgtcaaattagaaaagaccaacacttgcttggagcagctgggtgagggctatattgtttgcctggaaaaaactatgtctgtgtcatacgcacacattgggcagctgggtgagggctgtattgtttgctggaaaaaactatgtctgtgtcatacgcacacattttggttttcccgggcaagtaccttaaccctgagtatggaagatattcatcctgcagaggttgggctgggcagggaggtgaggcctttccatgagttacctgccgctctggtctctgtgctcagagcctggaaagtggtccactctgcatttccctggctgtttccatctgcagcttgttcggctgctgcaagccagggctggagaccaggctccaccagagagccagccaacctgtggctgacttgctgtggtgcttctgggatgctggggacgacacccgcccggcaccgtggcgtgttccttgagttagaagatacagccccttatttgcacctgtgtcctgttttcataacaggaaggcgtttacagtttctcagcagaagctgagttgagttcccccttctcttcatctgggatttcatttgcatgattctgctgggaattggctcccgctccgtcgctgtttttgtggctgtttctaattagacagatgacggcctgcagtattttcccggacatacttagcgggaaatgtggagttcctgcagttgtttcacgtgcctggttctttagcagatgaccgtcggctctttcccctctcatgaccccactgtccttgcccttaaccccggagcagggtctttctggggcagaatgaaatggccttggaagaagttttcaggaacgcaaaactggccaagtttttctgactggaaggcaggaaaaatactgattttattttttaacacccatggaagaagttttggattatttttcccaaagagtaaactgtatatgcatgaacaaacagatttgtattgtttatttgtaagccggggatggggggagggggctttgtattaatgggtggcgtgttcatatgtcgcctaaaacctgatgctcccaaaagataaatgctagacataggttaatctgggacagggtgagcaagacagggcgccaggccaggctcccagagcctggagagggaccccctacttcctgtgcccttggccaggggccccatctgacccaggcctggtttgtccggcccaagagctatgcactttgcatttctaaatgtctgaaaaaaatcaaaagaagagtaaatatttcatgctgtggacattttatgaaattggaatttcagcaccataaataaaagcttatcggagcttggccacagccaccgggtcgcctcttctgtggccgcattcctgctgcagagacagaattcaggagctgcaaggccaggatctgcacctcaagcaaagatgtccccacctggcctttcagggaatgcacgcactgggcctgctgtgggaggggcatttccctgagcgtggacccgcggtcattgctgggcgaggattggtggtgatgaggaaggggttggaagttctaggaagtgtaactggcagggtccctgctcccacagtagccccatcttcttggcagaggcaagacctgatctcctctcaaaggcatgggagcgagtgggccagggtgccggaccatcgggggacaggggaaccttcccaagagtggctcctggggttttggagggcttgacctgggctggggttgacccctcaactacctacgcaagggtgctgcgggtgtgacgtgtaaatccatagtaatcaagtgcagatgtaagagcaataaatgaggtagttgaaaaaaacagtatcctggatgtggatgggtgttgtggcggggaagtcaccaaaggtgacggatgcgctttcttgaagctgtttatccgaaggccatttccaaagccgccagtgccaatattatcgtaggttgcccaggctgggccatgtttcagggtgacatgaaacttcactgtcccttgagacccacgtgcctggcccgcacaggagagcctgggagcctgtgccttcctggctctgggagctccttcctgcctgctgaggcactcttaagttctcttctcatgtctctttttaagcaataccaaaaaaatggggtcagtgaacaccccaggacacttacggggagatgcagtgctctgcagcaggctgcattgggttgcctggctgcccacctcttacctctcaggggcccggggcctcaggtgcgcccctcagtctgtgcccccatgctccggaggcactgcagtggctgcaaggaccaggagcacacgagcattcggggggaccgaggctcccgcccacccggggtccatttggaggtacagcccctatgcggccaccctgggctatgagggagacagcctctggtgctggagcggccagtggggagaggcggcccccagggctctcctgtcagaggcaggtgccccttctactcctccccagcctgcagtcacccgcaggagtctggaatgggtyttccaggtggggattttgctttggactggaggcaggaagacctctgagccgcagatttcctgggtgcctcctgtcagatccacctgcttcttttcgcagggatggaagcccggaggccaggctgagttaccacagcacaaaactgtagcagggagaggctcagccttctttcttctgcggtaattgatcgttggtgcagaaaattagagttgctttagatctcgctctgcaaggctctggggagcgtgtctgaatcctgagggccctgcttgtgacgcgagagaggtgggagggtggcaggggccttgtgcagcggcttggggactcgggccccaagatcaccaggtctaggaaccaggggccacctgtgtgactcattcatttacttttaattaaaggagtattctttttaagaaaaaatatacaacatactccaaaacggccggacacagtggctcacgcctgtagtcccagcactttgggaggccaaggcgggtggatcacccgagatcaggagttcgagaccagcctggccaccatggtgaacctcatctctactaaaaatacaaaaaatcagccaggcctggtggcggatgcctgtaatcccagctacttgggaggctgaggcaggagaattgcttgaaccttggaggcggaggttgcagggagccgagattgcaccactgcactccagcctgggcaacaagagcaaaactccgtctccaaaaaaaaagaaatctaaaactaagaataacggtttccctgcccaagtctcatccgaccgttttcattttagttctgctgctggccgcttttccaccacaaggccgccatgtgtgacctcctctacttcaggccgtccctggggattcgctgctgggaagaagaggaatttagcaaatttagatttccactcttctcccctttctgcctgtttggaattttgttggttatgtgatctgacatgaaccaggctcctgacatttcaacttgaccctccaaacagttgtcttccacagtctctctataggctgattataaaaagttgaacccagtaaaacaaggtttactgttatgattattttaagacatgatgcattacaaaaaagtgaaacatcaccttaagaagaaaatgatattgtcattaaatcccagagaagcctaatatttaaatattatgactgcatttttacatttgctgattaaactcagaaacctaaaatcgtaataaaaattataatgtagttcttcctttcaatttgtcagtactttgatttacttcccagtcttctttgtaaatagctttctgtcctatgcttttagtattatctcagttccttcttttctgagtctayattaattggagagaaaaaatggcttttttttaccctcgttgatcttgatcratatatattcctcaacattttcattgacaagaattttaaaataatttactggatgattacttgagagttgtgttaacctgacatcttgtcttgggaagctgagatgggagccgctggttgagtgaagcagagctttggatgaggaggacctcctgggtcagcctcctgcctcctgagagagcagttacaagtccaggcccctatttatagggagctgagatctccacagacctgagtgaggatttggttcgtggctcccaaatgcagtgggagctggctgtttaggggcgtcatcaccaccagagagcctccaccagcacttgccttcccccagtggatcctgcaggtggccctccttttattcagcctagtggttcggcaggtgctggtggagagtgggtgctggtggagtgggtgctggtggagcgggtgctggtggagagtgggtgctggtggagagtgggtgctggtggagtgggtgctggtggagagtggatgctggtggagagtgggtgctggtggagtggatgctggtggagtgggtgctggtggagagtgggtgctggtggagcgggtgctggtggagcgggtgctggtggagagtgggtgctggtggagtgggtgctagtggagagtgggtgctggtggagagtgggtgcttgtggagcgggtgctggtagagtggatgctggtggagcgggtgctggtggagagtgggtgctggtggagcgggtgctggtggagcgggtgctggtggagagtgggtgctggtggagagtgggtgctggtggagcgggtgctggtagagtggatgctggtggagtgggtgctggtggagagtgggtgctggtggagcgggtgctggtggagcgggtgctggtggagagtgggtgctggtggagcgggtgctggtggagagtgggtgctggtggagagtgggtgctggtggagtgggtgctagtggagagtgggtgctggtggagagtgggtgcttgtggagcgggtgctggtagagtggatgctggtggagtgggtgctggtggagagtgggtgctggtggagtgggtgctggtggagcgggtgctggtggagagtgggtactggtggagcgggtgttcatagagtgggtgctggtggagtgggtgctggtggagagtgggtgctggtggagcaggtgctggtggagagtgggtgctggtggagtgggtgctggtggagtgggtgctggtggagagtgggtgctggtggagtgggtgctggtggagtgggtgctggtggagagtgggtgctggtggagtgggtgctggtggagtgggtgctggtggagagggtgctggtggagtgggtgctggtggagagtgggtgttcatagagtgggtgctggtagagcgggtgctggtggagagtgggtgttcatagagtgggtgctggtggagagtgggtgctggtggagagtgggtgctggtggagagggtgctagtggagagggtgctggtggagagtgggtgctggtggrgtgggtgttcgtagagtgggtcctggtggagagtgggtgctagtggagagtgggtgctggtggaaagtggatgctggtggaacgggtgctcatctaacatgtgtcacctccaaaggcttcacacctcctaataccaccaccgtgtgctgctgtctccagctgtcccccagaaacgctgagcccccagcggcctgggtctgggtgtttgtagatccatgtgctacggtcagacttgagcaagttcctgaccttcaggcttgggcaacacctgtatttatagacgtggcccacacctaccaagtgagcagcagacggcagctgttcttcggcgtgtgtctcctttgacacagcagtgccatttctaggaacctgtttcataagtatattaacacgcatcacagatgggatgtaccgaaagcttgtcattgcagggctatttataatagtgcaaaactggaggaacccagatgttctcctctccgcagctgcgtgtgctcctctggtgggctgggtggcgggaagggcttggagacagtgtgtgctgtttgcattgggcagcctgggcagccccacaaacaccatggatggggcagcttgaatcacagatttattttctcacagtggtggaggctggaagtctgagatcaaagatgccagcagagttgggttctggtgagggcctcttgcaggtctgcagatgatggcatctctctgtgtcctcacatggtggagaaagagaaacacgctctctgggttgcttcctcttcctagaaggacacgaatctcatgatggggcttgttctcaggacctcatctaaagtgcgtggcctccaaagcctcccctcctgataacaccaccgcgtsggggtgacagcgggaggaccgatgggagccgccttgccggcctcctggggccgggcaggtgcggagtgggagcgcagtcaggagcgcatcttgttcaatggccctgactttggaaccttcagagtgtttgagataaagaaagggaagctccaagctggctccggctgtcccttaggcatgctgcaccccagccctgctgcaccccagccccgctgcaccccagccccgctgtggcttccgttagaggtcctttcctcaccctgtcttctgtggggccgtgcacagtgtccattcagcaaacaccacacaccctgccctygtcagatcaagcacccgcactctggggccctctctgacyctgcagccatagctactcccgggcctcctcctgagcctttcactgcagcgagcgccgtggtcacctgctggtgcctggcctcctcctcaccgaacagcagtgctcgtggtccccacacctgtggtcagcattgcccatgaactgcagatgtgtcgctagtaccaatgagtgagcggcgagcacaggggctgggatattctttgcagttccacgggtgggatcagagccagggcgcagggaccagacggagcctggctcccgtggggaagaccggccaccagctcccttccgcggtgaactggcagcctcagcagatcatgcctgtcaccgtgctgtctgtgaaatcagacaacaccatggtcaagggcgctgcaggactgtgttttggagccagcattctgcatcatcagtgactccttaaaaaaactgtacttgataaaacctgtacacgtagagaggttcttaacaaacccagccgggcacaccagactccacatgctcttggtgatttgtgtctcatacaggaagtgaggtgatccaaatcgataccataaaagatgtccccgtttctatgaactgggcgtgcccagtgcccgtgcaactcagatgcctgggagaggaggttccgtcacaccatggcctggaggtgagggcagctcagggagctctcactgtttcttccttgcggggcgagtcgggggttctgggtgcgtgactgcatcagggacccctctccccttcctctgccatcgtgggtcagggcggaacctccccggcctctgtttctgcctctgtaaaggaggattgagaatcacttgggcttcttatgacttttgtcattctagtcaggaagaggcttcctgcgaagggcggaggctgactggrttcttggtgtttgggtgggattgagcaaagcccttcagtccatccacagggggcctcaggggcaaactycaggcccagaccaaagaggagctgctggaacatgaaagggcgaacctcttttaaatccaggagctttgtcggctaaagcgtcctgctgggttgtaagaagcatgtttccccctcttaactaattgcagaacaatggcagggacagagggtgcgtgatgagacctgggcctgcgccagggcacatgccgacagccagcccagccccacgatctcagctccagcaaggccagctccaaaacaaacaccagctcccgggtttacttggcggggaggtgggaggataacttgagaagtcccattcatcctgcagcttccaggcctgggcgtgccccccttgttctcgggacaaagctcattgttccagctggagaagagctccgctgaggattgcctgcgtttggtttccgttctctcgctttgtgtaactttccagtgccttaagagttcctctttagcccttagggtgctgacgtaagtgtggtaaaacgtagatcctaaatgggctcctcttaaatggtgattcttcttccctttagacagtcaccggcatgctgctaggggaaggatatctgcagatcgtcgctttcggcaccttggtacgaatccctcctctgcaccaagttttaatgaagaacccagagtgtgttcattccctgccttgtgcagggaaatgtcttccccttttttgtcctcttctgtgtagttattgcgtctttgacagctgatagcccctccgcagggatttcttttgttccatttttggaagacttttggcaacctcgtgcttccaaaaatttgggtgaaaagtgtgggttgattatttacacaaaagtcagacatatcacaattaaatcataatttctttctgattacttcgatttgacagtttgatgttcagaaggcgtggatgaggcatctgggattgatgagcaatgcagcatgctctcagattgtattattagtggggcaggtgatgcttagagctgattggtgaacactgcagcgtgctcttagattgtataattagtggggcaggtgatgtttagagctgatcgctgaacactgaagcgtgctctcagattgtattattagtggggcaggtgatgcttagagctgattggtgagcactgcagcgtgctcttagattgtataattagtggggcaggtgatgtttagagctgatcgctgaacactgaagcgtgctctcagattgtattattagtggggcaggtgatgcttagagctgattggtgagcactgcagcgtgctcttagattgtataattagtggggcaggtgatgtttagagctgatcgctgaacactgaagcatgctctcagattgtattattagtggggcaggtgatgcttagagctgattggtgaacagtgaagcatgctctcggattgtattattagtggggcaggtgatgcttagagctgattggtgaacagtgaagcgtgctctcggattgtattattagtggggcaggtgatgcttagagctgattggtgaacagtgaagcgtgctctcggattgtattattagtggggcaggcgatgcttagagctgattggtgatcactgaagtgtgctctcagattgtattattagtggggcaggtgatgcttagagctgattggtgaacactgcagcgtgctctcaggttgtattattagtggggcaggtgactggcttctggcaatgccagcaggatgtaagattctgtggcttgcagtgagaccgtgtccgatttgtgacttaaacagttgttactgcacttgctccctggaggacttgatatcacatggaggcaggactgtgacccagtgaataccaggctgccagtgggacagggaagccccaccctcccagatagatctttaggtgctggacagaccagctcccaatttcatagaataacccgggagctcctaactctcactgaaggtcagagacgctgggacggtctctgggtttgagagcccaggaatcggagggcagggtagaacttgaatctggcatccagtcggatccaagttctcgctctgactgaggtctggagaccctgaagaagctggatcagagaagccagtagccttgacggtgtccaagccacatggatgcctgagcggcagggcctggagtgcctgggggaggccgtaatggacggagaactgctccttgtagccccacactccacgcgggaaactctccaaaagggctggtgacactccacgcgtcccaggtcgtgggcagccgtgccctgcaccctgcgtcccaggtcataggcagccgcacctgcatcccaggtcgtggggagctgcaccctgcatcctgtgtcccaggtcatgggcagccgcacctgcatcccaggttgtggggagctgcaccctgcaccctgcatcccaggtcacggggagctgcaccctgcactctgcaccctgcgtcccaggtcacagggagctgcaccctgcaccctgcgtcccaggtcgtggggagccgcaccctgcaccctgcgttccaggtcatggggagctgcatcctgcactctgcgtcccaggtcgtgggcagctgcactctgtaccctgcatcccaggtcgtggggagccgcaccctgcaccctgtgtcccaggtcgtgggcagctgcaccctgcatcccaggtcatggggagctgcatcctgcaccctgtgtcccaggtcatggggagctgcaccctgcaccctgcatcccaggtcgtggggagccgcaccctgcatctgggctcatggggagtggcacatggctgcctcctacattcacccctcccaaccccagccttcatggagggagtgtcttcagtgggtcatgtgggtttgggagtgaactgagccggtctgcctctccctcaggggaggcccagggcccctgggatgtgtgcagacatgctctgctctcacggctccggggaggcccagggcactgggatgtgtgcagacgtgccctctgctctcacggctctcacgtgatgggcagtgccgggcgacatcagggttgagctcttagtactgttgtctttttttctgtaacttcagttaatttttagttggttactaactagctcgtgtgtgcatcctctcattacatcctcagaatacactgacggatgatgcatcatctgctcttattaatgtcatgtgataatggttgctccccaagacttgtatgaaaagaaagtaagtcttgggacccccaaatcactaagttaaagggaagagtcaagctgggaactgctcaaggcaaagctgcctcccattgtattcaaagccaccctctgctcaccgagacatgcatatctgactgcatcccttggaaaagatcatcagaaactcaagacaktgcagccatttgtctcttatctacctgtgacctggaagctccctcccctcttggagttgcccccccttcacctggagctgcccccccttcacctggagttgtccccccctttacctggagctgccccccttcacctggagctgtccccccttcacctggagttgccctcccttcacctggagttgccccccttcacctggagttgtcccccaccttcacctggagttgccctccttcacctggagttgccccccccttcacctggagttgccccccttcacctggagttgtcccctaccttcacctggagttgccctccttcacctggagttgccccccccttcacctggagttgcccccccttcacctggagttgtccctctttcacctggagttgtcccccgcttcacctggagttgtccttccttcacctggagctgtcccccgcttctcctggagctgtcccccccttcacctggagttgccccccttcacctggagttgccctcccttcacctggagttgccccccaccttcacctggagttgccctccttcacctggagttgcccccccttcacctggagttgccccccttcacctggagctgtccccccttcacctggagttgccctcccttcacctggagttgccccccttcacctggagttgccctcccttcacctggagttgccccccttcacctggagttgtcccctaccttcacctggagttgcccccccttcacctggagttgtcccctaccttcacctggagttgccctcccttcacctggagttgtcccccaccttcacctggagttgccctccttcacctggagttgcccccccttcacctggagttgccccccttcacctggagctgtccccccttcacctggagttgccctcccttcacctggagttgccccccttcacctggagttgccctcccttcacctggagttgccccctccttcacctggagttgcccccccttcacctggagttgccccccccttcacctggagttgtccctctttcacctggagttgtcccccgcttcacctggagttgtccctccttcacctggagctgtccccccttcacctggagctgtccccccttcacctggagttgtccccccttcacctggagttgccccccttcacctggagctgccctcccttcacctggagctgcccccccttcacctggagctgtccccccttcacctggagttgtccccyccttyacctggagttgycccscctttctagactgaactaaattcatcttacatatattgattgatgtctcgtgcctccctaaaatgtataaaaccaagcactttgagaggccgaggtgcgtggatcacctgaggtcaggagttcgagaccagcttggccaactcggtgaaacctcatctctaaaaatacaaaaaattagctgggcgtagtggcgggtgcctgtagtcccagctactckggaggctgaggcaggagaattgcttgaacctgggagacggaggttgcagtgaaccgagatcacgccagtgcactccagcctgggcgacagagcgagactctgtctcaaaacaaaacaaaaccaaaagaaaacaaaaaaaacaagctgtgccctgaagactttggacatttgtcgtcgggacctcctgaggctgtgtcatgggcatgtcctcgaccttggcaaaacaaactttctaaattggccgagacctgtctgagatatttggggttcacacatgtcactggggtggcatctgtgacatgtgggagagtcagcctctgtctcctcttctctcttagagcagctccttgccccgtccatgcagccctggtggggcctgccccaggctgaggctattccctgcgtcctggaggaagcctcggtgacaggggacactgtgccggggttgggggggtggcacctggcagggggagaggatgggcaggaccscaattcccgttgcctggaagccaagatagatcttcactccactcaagcctcctctgctccttctgccttcaggtatttgcgatactccaggatcccacaagaaatgaccctcacagccaaaggattgaggccaggtttctttagctgagggccaggcaggtcctgactaacgtaatttgatctcattaatggtattagtgggcgtgttatgtcttactccgttcaggcgtctctgaggarccataggcggggcagcctgtaaacacagcagcagttaccaattcacccctgcagctctggaggctggaagtccaagatcaagcaccagccaattgggtgtctgctgagggccacccgggttcagagaagggaccttctcctcgtgtcctctcacattgtggacaggacaagaccgctgtcggggttctttcataagggcagtcatcccaccctgggggcaccaccgycatagcctcctcacctcccagaggccccacctcccaacaccatcccttggggattaggtcttagcacaaatttgacggggtgcgaacgctcagtctgcagccgtgggggctcagggagccatgagcactaccactggacccaggcagctggacacccctgaccccatcctgcgtcccccaccccattccgcacctcccaccttgagcccgcttctctgcggctccccttcacccgcaggggaagtaaggggcatcctgaggtttcccacctcagtggtcctacccactcttcctccaaaatacacccttgccctccactctgggcacccatttctcctgcgactgccggtgtgcaggcttgaaactcgtccgtgcccttcatgtcactgtggccgcctgcacgagtggctcaggtcacatatgttaagtacagaagcgagtacattatgaagtcctaatccttcacagacttcagtgggccacgtgagacttcctgacattcaccccaagtgcatggatgtactcacccctgtggtaaagcactgccatctgtgactctcggaacacaagctctgagtgttgcttcagtgatgaaaggcagtccttagtaggaagcactgaagcgattttaggtcaggcaaatgttaatggaaaaccacatggcctggctttgggatgcagcttttcaaactcccccagcctcccactttcagcaagactgggacggggagataggactcagcctcccgcctttcccagcggggccaggtggtggcttctgtcctgtattcatcctgggagagggcgtgtggcatcggttataattccaacctttaaaatcagtaaagcactttgcatatttgcctctctgaagcagcacagtctaagagcctttgggttatattgattttttgttgttgttgagacagagtctcgctgtgtcgcccagactggagtgtagtggctccatctcagctcactgcaacctctgccttccgggttcaagtgattctcccacctcagcctcctgagtaactgggattacaggtgtgcgccaccacgcctggctaattttttgtatttttagtagagacagggtttcaccatgttggccaagctggtctcgaactcctgacctcaagtgatccacccacctccgcctcccactgtgcctggccttggttgtgttgctgtatcctgtgtgttctcactgctgagcaacacgaatgacaaagaaccacaacatcatcgccgtgatttacttcaggaaggcacattcgagttgaaatcctgtaccttaatgaggagcttaaaatgatatttctgccattagcttcaagataatttttaacatcgtgacccaaatgtgatcaaaaatcttaggtaacatgttaagatgcgcaaaatactcaaagaaaaaaaaaatccagacaatggctggatgtggtggctcatgccagtaatcctagcactttgggagcctgaggcgggtagatcacctgaggtcaggagttggagaccagcctggccaacaaggcgaaaccccgtctctactaaaaatacaaaaattagctgggcgcagtggcatgcgcctgtaatcccagctacttgggaggctgaggcaggagaattgcttgaacccgggaggcggtggttgcagtgacctgagatcgcgccactccactccagcctgggtgatagagtgagactctgtgtcaaaaaaaaataaataaaaatacaaatctagacaacaaagataaagtcataataaaaatatattgagaaaaagacaattcacctctgcaatgcatagcttgtggggaatatttgcaggtaacccctggctcttattagttagaaacataggcctatcttacatgactagtgcaagaagaaacaaaaggcaagagttcccatcacatcatgagagtaacttcttacatttcaatgctctcacctgaaattttcattccataattgagataattttcgttctcgaaccgaacgatatagtgtataactttgaatttgttggcaaattggcaaactcttatttwtktttgtttgtttgtttgtttgttttggtgagacagagtttcgctcttgttgcccaggctggagtgcaatggtgctaccttggctcactgcaacctccacctcctgggttcaagggattctcctgcctcaacctcccgagtagctgggattacaggcacccaccaccacgcccagctaattttttgtatttttaatagaaacggggtttcaccatgttggctagtctggtcttgaattcctgacctcaggtgatccgccggcctcggcctcccaaagtgctgggattacaggcatgagccactgtgcctggccaaattcttaattttctatatttaaaaatgaattcaaacacatctgagacttgcgtatgggaaaagtcaagattgttttattttaaaaatcagtattatggaaggtattagaataaactttataacataatctttagtgaccgctttttagaattcataactttggcatgattaaattaagcattaccaagtggtctgtgcattttagtttactgtgaaagggaatctaatggcaaaagtccctggagggaattagattaaaacttggatctccaagcttccttttagttctaaccttcaactattctgtggttctgcagtgacttgtgattttgatattgagtgtaaacctgtactttgatgtttcgttccaaacactacaattcttgacattttttttttctggtaggatttttagtacattaagatttgagaataatggaaacattacagcaaaacaaaaggaaacacaaaaactaccctaaaactccttgacttgaagttcacttgctttttaaatgtaaaatgtaaatgaatctgtgttctgtttttgagactgtaaattgaaaaattcatagttcatgcttaatagttattgcagtcttctctttgaacttgagagggcttgtgttggcgtcgacgttccctaagtaggtcagaggcagcggctctgctctaacacttgggagaactcttgaatgtaagtggaagagtctggtgaattctaccagggaggattaacctcttgaaatgccttcaatgagagcaattttaatgctgagaaaagagccctgggccgactctaattgcatttctagttctgccacttacagactgactgactttagacaaattacctgatctttcttagtttctaaattccgatttgtccaggaaagggatttcttctaacctggatctcattctctcctcccttccctcagtcagccaccttcatgtgctgtgccttagtgtgctcgaccatttccccaggacgtgcctttgttactctgaagtagggggtgaccttgccctacagttatcatttctgggagctctcgagggttccctgtatgcaccgatcttctccaagtgcaggtgctgctgcctagctcagaggttgcctcagatccatgctttgtgtgctcagtgaatgagctgataagacccactggaattgcaggggatgttcacaatggatatttacagagttttgctgtttatgaaggacttttcacacacaaacttgtcgtccttctgtgaccttgttcaccgctgcttactgtcattggtgctttatggtttagggccccaggctttagaagggatgcacccctcacgcttacccaggcaggggtgtggcgtttttatcgcagtctcctggggctttggccttggcttcagcaagagttcatggatgccctgcctgatgttagccctcagtgttcatctgtgttccacttgctttagtaatcacgccacttataggtttcccagaactttctacaatctgtctccatgctcatcatgccaacttacttcatagagggcgtgccagagccccttgcttgttgggagaakggtcctgcagctgcggagggcaggtgacccagtggtccactcattggcatgtggcacacagctaggaccacgccgccacatctgccagggtccctctccagtaccctcagccccctggggagacgtcactgcaggaggacggggtgggagcacggagccccagggaagagccaaggaaggcttgttgaagtgctctttcaatctttaaaatttgggggaagtttttcccccccgttaggattatttgtggaactatttattatgattgttaaaataataattctgtttgtcaagctgttgagtcatatgtaggtgcataatgcagggatcaaatgcctccccacagtcttrttctgcccagacatgtgcaaagcttattttaaaaattgtaaagtggggagcacttacatgtggcacttaaatttaagtactttttaattggagagtttagctttacatttattgtaagctttatgtcaatgatgaccagtaagctaaggatcagacgtggaaatgcagaggaaacaagcaaatgcctgctactagtgtttatgagttcgcctgtgtgtgcaaatgcttttcctatatctcctcacacgcacacttaaaaatatacatagtgtgtatttgcrttatatcttcagcattcccgaagaacaatgacttccaaactttaccttgcttagaatcacctggaaatcttatttgaacccacgttactgggaaccactcccagagtttctgattctggagatttggggtggggcccagaatttgcttttctaacaggctcccaagcactggtgctgtggaacagacccctcctgagctctctagaatctcgcaagtgagaaatgattcaggcaaaaatcagcccttgtatttgtcttcgtgaccttgaagttggggttcatatttgaaacgaacgttggcttcttgtgtctgtggtgtcttcttgccctgagcttgtctctcagggatggagccacaagaacctggaccctctgccctttctgttgctctggagcaggagggtttctgaggcagctgcaagtcccctccagtaacacgtgtgcagatgtagctgtgttgtaagtcagcccatcccaaacacacggtccggtttggtgacaatctttctagctcctttcatgtgctgtggtatcagacagaaaatgtaaacacacacacatgcagatgaatatgtgtggtataactattggtgtatgagtgtttcttcatctctgttcctcagattagatcatttctaatgttgagtagctcccaagtcctctcccctctgcagtattcaatatgttaagtccatgcaatgagcttttcatttcagctattatatttttcagttctagaatttcagtttggttctttttttatggtttcactttgtcttctaagataaccccctttgcagtaaaggggaccgtttgttttaccctcttcatagtagaagtcttttttggtgctctgccttagagcatggtgggaggtctaactgctgtgagcaggttgtgaaatgatccccttaacctagaccagtgccatccacagaaatgtgatgagaactacttatgtmatttaacattttctggtcactttgtgaaaaaactagaaataaacagttaattttaaaaatgttttattgaactctgcatgccaaacttgtacatgtttcagcatrcactcaatataaaattttatcgaagatatatttatgttctrtttgtttgtaggaagtccttgaggtccagtgtgagttttgcacttttactcaacactggctacctctcaggtgttcagacacagggcacaggggcctgtggatgggacagcacctctctgtccatcactctaggccacctctcaggtgctcagacccagggcataggggcttgtggatgggacagcacctctctgtccagcagggcacaggggcctgtggatgggacagcacctctctgtccagcagggcacaggggcctgtgaatgggacagcacctctctgtccagcagggcacaggggcctgtggatgggacagcacctctctgtccagcagggcacaggggcctgtggatgggacagcacctctctgtccagcagggcacaggggcctgtggatgggacagcacctctctgtccatcactctaggccacctctcaggtgctcagacccagggcataggggcttgtggatgggacagcacctctctgtccagcagggcacaggggcctgtggatgggacagcacctctctgtccagcagggcacaggggcctgtgaatgggacagcacctctctgtccagcagggcacaggggcctgtggatgggacagcacctctctgtccatcactctaggccacctctcaggtgctcagacccagggcacagggacttgtggatgggacagcacctctctgtccagcagggcacaggggcctgtggatgggacagcacctctctgtccttcactctagaggttttggtggcaccgacttcagatctggggaaaggcctgcatgtcaggaaggtggttttgtggctcttcctgctgtcttcccaggctccaggagccaagtccacatcttgctttccagcttccacgctgttgccgctgcctcctctgtggcttgcgtgtgggttcccacggggaatgaggagccagaataagtggggctcactccatcckctgctctggaggagcagcttggtttctggatcagatgtggtcagagttgatttttgctctaagctgtgatgcgtggctcggccttccgggacagcctttcttacctgttcaaatgctgggaagcccctcagcttgctgtgtctcaggtacgggagcttctttgcaattgtttgtttatcctgaaattgcagctggtcagaattctctccttatctgtacttgatctgtgtcttccgtatggagtgagtgggcatcctggatggctgctttcccctcccgtgtcttcctccagcaccgcctcccagtttcgatgcttctgactttcagcagctcctacgtggagagtccgtggagccactagtgatattctgaatatgaatgtaaattaaaatctcatctgtttagaggggagcatggcggtgcagggggagggtgcgtgtgaggagactgttggtggacagtgggtatcactgaggaaagcgaacccgggtgcgagggcacrgcgtggaatgatggccaggagggccaggtgggcagaggggggccgccttccccttctcctccaggagaacttgacccacagcacaggggcggcgctgggagggacacatttcattcactgacatctaggctggatgctgttgctgtcagtgacacagatactttttttgaagtatcttattgaaccatgaactagaaccaattctacaaactactgacagtgattacattggcataggataatcagattccttagaaggttataaacattttatgttatcataccctaatgccctgaccttacctatgataccctaatgaccaaacacctgaggcactggggctgagcatttcaacatgtggatttcggggagacacagttcaacccgtaccgatccctactggacgatattaaaagagattggacctatgattaaggaatttaatttttctaagagtatttgataaagaaattggtctttctgtttatttttcagtggtttctatacctgttcaatttatagttttaattcaagctgggatgggctgtctgcaagggtagagccgacgcctctgcatgtctgcacttcccatcgctgccttcaggcctctgacctggctgcctgtgctgcccccaggcccgtggcctccgtggttggggcctcccagcttgctctgcctgagcatcagattagcaggaattgaagtgtttctctttccagcaccagattcagtctctgtgtcgattctggcgtactctctggtctctcatgggctattcggatcctctctccacccccgaaatatgaataaataactgccttaacagtggacrtttaactttactgaaaatgcctgtttggaaccattagggtaaaacccatatgtgagaaagcctattttcccagttagcgtgctgaattcacttttgtggttttgaaacattcagtttaaatctcatgaaggtagcagtttaggtcgttgactaaggaagagcctaattccagctcaggaaatcactggagtaaactctaaggtgtttactcagttgcacaggtggcgtgactctcttcttgaatgtcatcaaacctaacctgtgtttattatcctaagacttatcgacacgacattttccagtgggttgccagagatagggtgcttaggtagtttatgtaatttttctccccataattactgtttttagaaattctgtaatgggttactggtgttccaccattcagacacatattcatacacttactagcctcagtgaaaaagaagattcattgaaggagtgaactgggtggtttaatattttaaatgcattgtcaccattttgaaactaagagcagcaaatgtgtagcgatgtttgtagattttttttcacgtaataatacctttcttgtttcttcacagagatcttcgctttaacagaatcagagagatccaacctggggcattcaggcggctgaggaacttgaacacattgtgagtggaaatattctattggaaactaatagaaaaatagaaatcattacattgtttatctgtaggtagaactcatcatccacaatcagtgggcttgggtggggaaaagtggagcaggaaagtgaggctggaaaatgcccctgaatgccaggactgtgaatgccaggactgtggccactgtgtttctcgtctcatggctgtgtgcctgtctgtggcatgttgattgggacccatgctgaccgctaagcttgtccctggccttcatgtgggtcacttgctctagaatcactcagtccttgctgggtcaggctgacctctgtgtgttcctgcacctcctccgtggcaagattgagcaggacagtgcttcttctgagtgtggagtggacttaagtgagggttcaaggcagtcccatgatgcctggagggagcaggcagggccaagtccagcgttgctgtgcagacctcaggctctgcaggacacgcccagtgcagtggaagctggttcccttctgcaccaggactgagcacaacggtgtaagagcagggtcatggggactgtgggactgtctgggccgcctatccactgttgaccctggagggcaagtggcccggggtctstcaccccaggcccttgtctgtgcgctcgaatggagcacgggccacagggcccacctttcctggcacgtctgtccacccggaccaccctcccaccatgactgccttagcactggccacagtcctggctaaaatagaaaatctaagagacagcaggataaagatacaaactcccttctataggagagaaggaattttttctcygctgtatcaaaaggtagtaactgtggagtggtacggacaccattgctcagcaacgttttcttcatgatggttaaacgcgaaagctgtgttttgtcctgcgggttcagcgttcgttgaatgttgatggcgaggctgtaactgaattgtcaatgtgaccttttccaaggctgtcggaatgttttaacacaacttcgaagtttgttttctgttgttttttaaaattcttatcgactctctttcataggcttctcaataataatcagatcaagaggatacctagtggagcatttgaagacttggaaaatttaaaatatctgtaagttaatgatcagttctttaacctaaaagcttatggtatctagattacttaaaaatagagctaaatttcgtgctgcttatgaattattgtaaatatattcatttaaatgaggttttattttgagaaggtgagtaaacatttagctgggattattaaaatagcttgtcagtgatataaagtgctacattatgtgatttttagtgtttcatcactaagccttagtaaagtggattgcataaaatgaaaatgcacagcctctgaaaatcgctctggaaatgatggtgatgcttccagaggggaaagtgatgacccagtgagttgccgatatgaacagctgacgggtgtgttgcagaaatcagctatcaaaatagtttccggtcgccttgccagctgcaggtgacatgtaaactcgaaataactaaccccggtggagtgtcactaattcctgcagattttcctgtctcccgctaagtgatttcacctcttacttttgtgcagttaaattttatttcacttttaaaaactgattttaatcgatttattttcatttaacatatcttctgctcgttgagatcagttttgcagtttagaaaatgagcttcctgggaagtactggtttagtctcagtcacacacatacttgctataaaattggaaaggtgacgaagtgtgtgtcgtgtgcttttagaagagtattcttttaagacttagtcactttccaaagagagctatttttaataaaaattatttcagccatttttgttggaaatttttatcatatgtgaacctaaacatgtttaagttattttgatttttttttattttactttaagttctgggatacctgtgcagaacgtgcaggtttgttacataggggtacacgtgccatggtgctttgctgcacccatcaacccgtcatctaggttttacactccacatgcattaggtatttgtgctaatgctgtagttattttgatttttaaaacaaagtcgtcttgttattgttgatgtatactctgaaatctgttttgattctagctgtgtctgtgactgttaattacagagctacctttaactctgtttattaaaatatattccctctgtgcgatatttgtcagtgttacatacatcctttttccctccatcattgtggcataggatgttaatttttaatttcatataaacatgatgaagcctggtcccacatttctatttctaaaatgagaggcaggccttttatttgtttatttaccctttttttttttttttttttttttggtattttgaatgttgtgcaagttccagaagagggcttttgtttcctggaaagtagatccagtcagctgatagccagcattccttgtgtgtgtatatgtgtgtttaataggtttaacaggttttttaatattttatttcattttttgtcactggttttgaattattaagagcaacttagtatgcactcagcaaacacgttcaaagtggagttgttggggatgctctgttttcactgatctcttttcaataaccctcttccgacctcatctgctgcacagccggctctgagcgcccacactccaaactcttccctctctccctcggtaacaaactgcggtgtccctggtggtggaggacacagatcactggggtggaagaagcacaggccagtggtgaaggggccgtgggtcatgactcagaaacggactaaagaccagggcagtggagggaagctgtccagagaggcccggggaccctttcacccagcagctgcagcctccgcttctcagctctcattggtggagtacatttgataagtgctgatttaggaaactgtgtgagagttaaatgctgtgatttcacctgtgtacaacctatatgcttaagagctctcctgaaatttattcattatttcagccttctatattgagtcagtaccaaactatacttgtagaggttgagtagttcttatttcttggaactccaattacttctagtaaggcataagccttccctttagttcacattgcttaatgaaattatttcttgagacagttaggactcattcaagggtcaactctatgatgaagtagaaaatcacaatttattattatggtcaatactcaccctttttttttttttttgaggtggagtttccctcttgttgcccaggctagagtgcggtggtgtgatctcggcttactgcaacatccacctcccaggttcaaaggattctcctgccttagcctcctgaatagctgggattacaggcgtgaaccacgatgcctggctaattttttgtatttttaatagagacggagtttcaccattttggtcaggctgatctcaaactcctgacctcaagtgatccacccaccttggcctcccaaagtgctgagattacaggcatgagccaccacggccagccaatactcacctattctcatgaaaacaaattacgttccaatgtctttataaacacacattcacacatgttagtttgattcagttgtcctgtgtattctttaaaaagattccctttcattttttaaaatgggtctaaagcgatgttctcattgatactttgtttttgtttttctttttaaataaatgggcacagaaaattacatttaaacttgccttctgtagaagtatagtaacaactmccatgtgaacaatggttaatgtgtgcaggggccatattgtaagagctttatatatatacacacacattaatttcaacaacttctgtccattttagagaagaggaaactgaggcccagtcattacgtggaagttcaaggattcccacgtatgcggcctagagaagtaacagccttgccaggcctctgctgcgggcactgggctctcggtcgctggggagttctgggtggttcgtgttaaggcttgtaactctttatgaggtcagctctgcaaattcgcagggagggaggacgtgagagccacttagatgggttgtaagaaataaggttagcagggctggtcctgttaaactggatcctgcaccagacattattaattaagttacaatcaaacactcggcccttctggatatgaattatataatattataagcattaagacaaaaaatgttggttatttagtggaacgagtaggtgaaacccaggcataagtaatcaattttgaagagacgtgtctgcctgaatttgaaaagtaggaaaagcgtggattttgacttgcccatctgcctatgtcagagatggagcccagggattctaagaaacggtagtggcagggctccccatgtctgggcacagacrcagattcacagccttcttggggtcccccargctgctggcctagagctgtgttgtgaggcaagctggctgaaggcgagtcatgtccgagatgggtgggcacaatgcgcatggttttgtggctctttttggaattgtgatactttgrtgtggaaattttcatcctccatcaggcttggcaagtgttttctgtgcaggaccagkcctctgtgagctgcgcagtctctactgggaccactcagctcggccacacagcgccagcgcagccccagatggtgcggagtgagcgagtgtgggcgtgttccagcagagcttcatttatggacgctggcattccaagttcacatgttaggaaataggattctcctattgagattttccaccattttacacaaagacaagagccaggccaattgtgtggctcttccagtatgcctctgttgcttctgttttctaagaatgggattctaggggtgagttattcaaggtgcattcggtcttcatattgtccactccccaaattatttctaggtattttggagatgtatcagtatcagttatagaatcttacagccaatgcattatacatgcctgtggaaaatggtttttatcttcttcaggctttgaagcaaatgtattgtcagcaattcattagccatagtctaaggtctgtgagttgcctgaaaaacccgtcgcagtggtttgatcaccttcagttggcaccggttgcttttagcccccttgagatctgagggaagggaagcccttgggagaggcactgtactcaccgtgcagatggtttgtttgcattctaatacagtcattaattgtaaaactgtctccatgtgtcaatttaattcttcttttccgtctgaagtttgacctcctgtctgtgtgctaatgctccccaatgtttcttgtttcagctatctgtacaagaatgagatccagtcaattgacaggcaagcatttaagggacttgcctctctagagcaactgtaagtgccccttctcttcgtgctttagttcttggatgccgtctggctgttttcctcttgtagggaccagtggagtgagctagctgtttgcatgatgcatgactatgctacctgaggtgcggggagtacgtgcatgatgacggaaaaacagggatggrcgagtcatttgccctccgccccgccttccacccagccagccctccacccacccctcaggacgtatccctggtttccttacggcggcaccaggccctgggccatgctttcctgacaccaaggacagtaatatcgatggaatccctgtcacaacttagaggagagacaggcaggcgcccaagtccgatcaaggcatccttcacaggggaaatatccagggtgcccggggaggagagggctctttgcctcrttcactgttcctccttatgactgtgaacacatgaagctgaatttcttcaattgtggtgacattattttggagaaaacctttctttcccttgtagttctagttagtgtatgcagtgtgtcatgaaacgctcttagtttctttggccaacgtgaagtcgtactttgctgtgaagtcagcgtgttgatttttcattacaatgtcctggtaaaaaggaggatttgtcctggtttgtttgctcggccagtcacctttcactcggcaaactgagcccattcctgaggagctgcaatttgtcacggttttaggaatgtggatgaaagcagctgtttgctgtgacgcagcgtgacgtcctcctgccacagctgctgatccgtggtcacgggtcactggctcactggacacagcgatgttgtcagagagtttgaggccaagcggtgcaggggggagaccactctgggattgtgcrtcctgaggacccacggtgctcatgtttccgaaagtgtgtgttgattcaagtgagcrtggacagggcgtgggtagatttgggaggaggtctgtctctacagagaaggacagtgcagctcattgcagaaacacatggacgtatccagggaacacccagatgtagggagagcttgcaaaggagcaagttctcatatccaacaagcgtttcactcagtgggggcgagcaaatcttcatagcaaacagttcttccatcctgagtggatcggaaaatcctcatctggctttgtgctgggtgagtccagtgttatttttaaggaaggaaagggcaagtcaggggagaaacgaggctgaatgaggaagggcatctgtgaatcaccaagtagatgtttgctgaaattttggatgatggggagggcttcttgagctggccaggctgcctttagcacccagggttaggtgagctggggtctctggtgctgcagcttgggttccattcgttaaacgctgtacagtgagcctgagggcagcccgagccccgccctcgggcagggagctgttggggaggggataagcgagtccaccagacctcagtgagagacttgggcaaagggctgtrtgtccagggagggtggcttgtgcctgaccctggcgaactgcaccccttccccggatcggctctacagcccagagctattgaaaacatgcattcctggtgacactgggagaccggaatgcaggaatgcccgggagcccggatgcagtccagggggatctgagtgtccctgatccagaaagaaggctctttgggaagctgtggacacaggtcagaaaacacacctggccagtcaggaaacatgcgtttgaattcaatgatgacctcagtatacttggggagccatttcctgtctttggtcctgtttcctcaattgttcagggaggggtggaggacaccccaggctgcctggggccccagcctctctaagatcctgtgcaccctgggccgtcatttcccgtagcacctgtgcagcaggtgccaagtcccacccactcagccgtccccctggccaacctgcattgcagtctgggtggagggatttttacacccatcgctctccgtggggcttgaaataccccctttccttccctcggtcagtacctcctcatccttctgggctttgcttgggggactccacccctgcctgcctgcactgaagcctygctgagcagctcacagccactgtgccgtggtggtgcctgggtcttacatcggtccccagctgccatgggctgtgaaaggccaaggaccccagaaaaccacaggcgccctgtcagcacactgcctggcagagacgaggctccagggattctgtcgggttcggccttcctcgggacccgcgcgtcaggtgcccgcccgtcatgctcgcccacggcggttttccttgtcttcctgctccagtttttccttccctcacgtttcccattcgtgcgcggagtgctgagcacagacctgtcccggggcaaggggcagggatggtctgcgtttgggggccctccggctgcaggtgtccgcagagactcagtgtggcctgtgtgggtgctgcctggggagctggccccgggacggggcgggccctggcagccgcactctggtgccctggtggtgacggtgatctcaggatgtccacagacctgattctcaggcgtgcgttctgaggagtcctcctttctgtggagttatgaagacctgtgaacgctggcatgctgcttctttgctcattttggcctcctgaagaagtagtcactgaaaatgtgtgctggttgcaggggacacctgagtgggcaggaggggtctcccagcagagcaccccagggagaagactgactttgtgtttgacttaagaggaaaaaacccacttttcaaaatgagaaatttcgtattcaggaaaaattagaaagaatgagttatatcaaaaggtataaattgttgaagtatggtaaatggaaagaaatagaaacactgggtattctgtacaatcaacgacacccgaggaaagatggtctcttatttaatgcttcaggactgatggagaaagttgtgtgacattctttttgtgtttcctttgtggtcttgaaggatatctttgtatctgataatatactctgtgtcaaagtatatgatgatgcccctgccaaatttatacacgagttaaaagatttgagggaaggtattcacctatttatgtatgtgctatcattaaagttatccttttgatttttgcttttttccatatattttggaagtgaaaatggccgagtcaggccaggccagcactgcccttctcacgcggtgtcaaggacctcagtgagcacctctaggcctccctcgcccttatccagtcactagggtggacatctgtgcctagtgttcagttgtatttatkgaatcatttgataattttatgtattkttcatacaatgtaggaagtctagtgagtgagctatctattgatatctgaatttgaaatgactaggaaaaaaatttgggcaaaaatctggatctaagaaaataaattgtaagttatacttttttttcttttaactcctctagatacctgcactttaatcagatagaaactttggacccagattcgttccagcatctcccgaagctcgagaggctgtgagttgtgtgttgttccttgcctttccattcacagagcccaagcctcagtcactggcttggttagattaaggtcaatatctaccaaacacctgaaaactgtttcaatataaaatccatatttctagtctaacaatttggaaataggacttataattttctctttaattgagagtgttgataaaacaggaaaaaaaaaccatttcttttgttttcagattcatttgtattaaataaatgtaatcactgaratttttttaaagctgatatatatttgactgcttatattcttttctacacattttaagaaatatttttcaaaattggtttgttataaaatctctttcaacagatttttgcataacaaccggattacacatttagttccagggacatttaatcacttgraatctatgaagagattgtgagtataaaaccttttgtgttttctttgctgcaaagccttctttctctctgttatctattcacctggttctttttcaagtattgtgaaatgttgataacaatctgattctgaaagaatgagaatatatggagggtggattgaatccattagagagcaaaatgaaaaacatgtggctcagacaatgtggcaagtagttaatcctttgataggcaattaagacttaaaaaaattttttttcagatagggtcttgctctgttgcccaggctggagtgcagtggcatgatcacagctcactgcagcctcaacctcccgggctcaagcaattctcccaaagagctgagtagctgggactataggcacatgccaccatgcccagctaagttttgtaattttgtgggtttttttttttggtttttctttctttttttctttttttgtgacagggttttgccatgttgcccaggttggtcttgatttcctaagctcaagcgatctgtccacctcagcctcccaaagtgctgggattacaggcataagccaccatgcccagccattaaagacgatttaaatcgtctttaaattcatcaaattaatttttaattccagcgcatattttactggtagaaataaaaccagtgtggaaagaacctctgtgctatattctgtgtctttctacagcatactaaggaggctgatctttacccttttttttgagacagagttttgttcttgttgccagtctagagtgcaatggctcgatttcagctcactgcaacctctgcctcccaggttcaagcaattctcgtgcctcagcctccctagtagctgggattacaggcgcgtgcgaccacgcctggctaattttggtatttttggtagagacagggtttcaccatgttggccaggctggtcttgaactcctgacctcaggtgatccgcccttcttgggctcccaaactgctgggattacaggcgtgagccaccgcacccggcctccacccattttttaaggcttccaaatatactttttgcttatactgagctatttcttataattaaggcattttaggactggtggagaaagttgtgacattcattttgtgttttccttcatggtcttgaaaccgttagtttcggttagatattactgagtgtattcagtaaactagacctagaaagaaacagaaaatgccaagagacaagcctaactccagagtggtcttatgtgatttgttttatctcttcagtgaaataaagtggagtaaaacatagaccttcagaactatatgtgattttttttttcctttaggataaaaataccacaagccaaactaaaaactacatcctgggtaggaagatgggatgaatacttccatatttgatagataacagagaggagaaagaaatcaccagataaatgctctagaaagtagccaagacaagtttagggcagactggtaacagcctggattatgctgacagctgccttctctctgttctcagcctctctctgggtgtctggcaaggtccccctctcctgtttgctcactttactaaagttgctcaaacactacaaccccagattgagattctgtgatagatttacagagctgcatcaagagarcacgctgtgtcctggctgctgtctgctcggagcagtctctaacctcacatccctgaggggccccaggcggaggaggccacgccagctgccccacctctctagacctcctgaatagccctctctgcttcagagcagatgaaggttgggggtcctatgcttccttgggtgccctgagcagctcgctccaccaggaccgactggccagatgccacatacctgactatgaccatctgggtcttgcatgtgcctgtggtcctgtactgaccttcagctgtgggcacaggttgggtrccctgggcacgtggctgacactgtccccctcacagcctcctcacctgagagctgtgcacctgctcacgggggaaagggtgattctggtcgtgaggccagttctgtgttcctgtcgcctctgggctcatgtctgggagaacctcggatgggaggtgtagcctccccttcccctcctggagccagcgtcggcccctagagatgccctcacgctgccgccctggtgagcacctctcgggatcccatccccatctcgggggtgccctggggccacctcattgagggttaatagtgagcacgtctgttgcaggacttttccctagttcagcgaaagatggggtccttgttacatggccacaaaaatttaggctcgcagactatttgaagagtgagaaaaatgggatttattgggcaaaaaggaaaaaaaaaagggaaatagagaccctcagcaaagcaagatagtgtgtttcctgccatgggcttcctgcctcacagattgaattccacccaggaagaggagggccaggcttctccccgccgcaaatggcacaaacctctgtgggctccaccccagtgtgcacccctcccagtgcacaggccggctggaggggcctggggaccccttcccacctggctgtctcacatccagctgccagcctcttccaacccttgccctgtagcctgtgtttgctacctggaactcctctgtcccccagacaacttcttccccgtgtgcggagacaacacttttcccagggtgcaggcacatcctgcccgtgttccccttgttgggacaggatgtgccactcactagaaactttccaggtcagcttggacctcaggaaacttaggtgtgaaccccagccaggagatgcagccccccttcccacactgcctgggaagcctcaggccggagggagatgatgtagaactgtcctgcccgtgatgatgggcgttgagtgacagtggtggttttgtggctgtggttttcatgttactgatttctgtgagtggctcccacctggtctccttcacaaacttccctgacctgtgccgctggcacactccctcgccttgagctcgacacccgatgcctgggtgtgcacaagccctatgctactcacgcctctacggttagtgccttgaggggcactgtgcacccctgggctcttcctggtgatgtgtgtgtctcgacatcactccctgagtcgggcaccggggctcagattccaccacgagacgtgtcccatccccatgtcgcaagcctggcaggcctggcacatgtttcccgacgcgggacctggaagccctgtctgatggatggatggacaagcccagccaccccatgtctcaccggctgcatcttccttcccacaggcgactggactcaaacacacttcactgcgactgtgaaatcctgtggttggcggatttgctgaaaacctacgcggagtcggggaacgcgcaggcagcggccatctgtgaatatcccagacgcatccagggacgctcagtggcaaccatcaccccggaagagctgaactgtggtgagtggcccgacacgcacacaccatccacacactcacaccatctacacacacaccatccacacacacaccatctacacacacaacatccacacaccacacacacacatttacacacacaccatttatagacacacgcgcagacacaaaccacacacacgcacatacacgcatacaccatccacacacacacataccatttacacacacaccatttacagacacacacgtagacacaaaccacacacacgcacatacacacacacaccatccacacacacaccatttacacacacaccatttatagacacacacatgcagacacaaaccacacacacgcacatacacacacacaccatccacacacacaccatttacacacacaccatttacacacaccatttatagacacacacatgcagatacaaaccacacacacgcacatacacgcacacaccatccacacacacacagcatttatagacacacatgcagacacagaccacacacatgtgccatccacacacaccatttacacacacaccatttatagacacacacacgtgcagacacaaaccacacacacacacacgcacatacacgcacacaccatccacacacaccatttacacacacaccatttatagacacacacacatgcagacacaaaccacacacacgcacatacacacacacaccatttacacacaaaccatttatagacacacagacataaaccatccacacacacacgcacatacacacacacaccacacacgcacataccatctccacccaccatttatagacacacatgcagacacaaaccacacacacgcacatacacacacacaccatttacacacaaaccatttatagacacacagacataaaccatccacacacacatgcacatacaatccacacacacaccacacacgcacatgccatctacacacaccatttatagacacacacatgcagacacaaaccacacacacgcacatacacgcacacaccacacactcaccacacacacatgcacacaccatccacaaacacaccatttatagacacacacacacacacacacacacacacacacatgcatgcacatacacggctgtttattttggtaaggtgaaaggatctccctgtgtgatggttttgtaatacgacaaaaatacacagtttttttttttaagtttcttctagctcagttcttgctggagctatgtcaggggcagttagaactgagcgccggcctggtggctgggggtactgcaccactcaggtttctagcctggggagcaagagaggcccagacccctgtgcagccgcctgcctgcgctgcttccccaccccggacccagactccgccctcagctccgcagggcactggctgtcaacagctcccagaaacggccctcagtggaaggagctgccccacctgcgtccctgaagggagggccctcggtgctcaggggggcccagggacctgtgttgcccagcttggcagctctgctgagctgtgcgagaacctgtgaatcagccgaggccctgtcgttttcgctgatgctcctatgggtgttcattccagatggttttccaagaaaccgactcatggccttccgtaatcacagtgctgaggttgtgcccttggagactttgtcatacttttactccttactccaatttggctgtcagtgattattcttgttttttataatagctttatcgaggcattgttcccgtgccagacaattcaccccgttcaggtgtacagttaggtgggttttagggtgtctgcagggttgtgcagcctaaataatgaagaaagcagcgaaagcttattttgattttgtggtgatggggagccatgggagggtttacggaacgttgggatgatgtttatattctagaaggagctttctggcagccctcgggagagggaatcggggagtgtgtgagggaggcagggaggccgggtaaggcctgagtggtgagaacctctgtgaagccaagggctctagtgctgcagaggagagagaagaggaggcacggttcccagagtgacgggagcacagggagggctgggcagagccgccccagcctcctgacccgggctgtgcaatgctggggagacggaaggaggcaatcctggaggagcccttgctgacagccccaagttgggtcgagggccttggttttggttgccgggcagaatggcagcactgagcagagccrtctccgctgcacacacacacacactcgtacccgtgcttgtgtccgccccactgcaggcactcacttgtacacacctgtgtgtggttgtgtttttcttctcgtgatgctcacagaatgtacatggagacagattcgcacactgaggtgacgaggcagagatggaagcctaggcctgcccttggtgtggttccctcatggctgctgaggggagccttagagaaggccgctccctgtgygggcctggagctccggagcagccaccagggacgggagcctgggagccgtcagccctcgaggaaggcctgggagccgtcagccctcgggtggccctyggatggccctcggaagccatgtggagtcacgggcacgcaggaggcaggagaggccattctccccttgcccagggtggagggtgaagggcggggcagctgtggaggagggaggctgggagttgctccagctgtggtgtctgccacctgcctgtgcttttagaggcttattctttcagggacgctttagctacagagtactattttttgtcttttcttcagtgaaaatagcgacccgtggcgtatccactccgcacaggtgtttggctttcccagagggcctcgaggggacgccgaaggctgtcatttggggctgtctgcccaactctgagccagcctgtctctagggtgctcagaacatggcaccctgaggcatagacatcatgtagatccgcaccatagacggggctgtagagaagccagtctggcacttttgtgggggatgtttgtggctgaattacacctttgggcatctgtggtttccttttggacacagagaactcagcgtgtgttgtcatttattttcatgtcatggtttagactaaaaaggtttccattttctggttgggcacagaaaggccccggatcacctccgagccccaggacgcagatgtgacctcggggaacaccgtgtacttcacctgcagagccgaaggcaaccccaagcctgagatcatctggctgcgaaacaagtgagttggggccaaacagaaatgcccctgtgcatctctcggagttacactcagacacccaaaccacacctcactcccyaccaaggcccacgtccacttttcctcctccacgtagggaaaagtacaaaggagaaactatttctgctccttttccggtcttacatggcagggggtgtgacgacgtttctgccaggmtggggccccttccccactctctcctgggcagcacaggggtgccctggctgggcaacgcgtcactgcggcccttcccggtgggagggagggagagcatgctggttgttctctccctgcctgctgacgtctggcagcagcctgtttgctctggtcactgttgttggcagccttgacctggggcattgtgaccaacctgagtgggtgcgggaggggccctgacctctgctgggacggcgtcctcaggagcctggagcgccatgcagctgctgacacaggttcgctcagctcccgtgtggatctaacttgtctcccaaacaaaggaagtcttctcttgtgtccacaaacatgctgtggacctgttaaggctaagacggccctggctgcggctgtcagggtgacggagggaagtcctaccgctgaccattacatgcgtcctggcagcgagccccacctgtgagccaggtgtggggagcacccctgcsctgctggggtttgtgagctggggctgtgttggttaaggagtgatggagtctagggggagagatgggaggaggtgaaaggcgtgcaaggggggtgggtggggcaggaccygggtgcaggggcagagaggcctaggtgggaatgaggtcagattgccggaaggcacctggggccaaatcactgagggtcctaagttggagtggagcactttcaaagtgaccttttgaaaggaatccttaaaagaaaatcctgaagtaaagccaccatgtcctaccttctcccatctgcctgcgtgaggacagcttctgaaggagctcctcctgccggcccagccccagcactcctgcgctgctcctctctggccatgtttagtcatgaggcagcaagagggatgcgtctgagatgtgagccctgtgatactcgggctcaaactgagtcattgtttgatactcgggctcaaactgtgatgaggcacaaactgagtcattgttccagactccagaggcaaaccgggctgggcttggctctcgggcaaggtggtgtttatagaagagatggacaggagcagggagctggccatccccagtggtcaggaacagaatgggaagatgtgttcatgctgaagaggacatgggaggtttgttccagctctagattttgttatcctcatgactgaaaagtcatattgaccttggctgcagtgccggacaaggagcctgtaaggtgcagtcactctcttcacagcttttgtcttggatggctcccaagttgatgagatttaaaatccagagaacactggaggaattctgcagtattatgttgtgtgcatttaaaagtcagggaagcataaatttggccccagtccatcacacctacattttatatacgaaaaaattgatgcccgcagttgaaatctcacagctaaatatggcagagctagagccaaagccctgaggcctggtgacctgtgctgggctctgccctccaccagctcgagtctcacctgccggctggccttacctaacatccagagtcacctgcaggccaccctcacctgctggctcgccgtgtttctggtgggggggattgggccacatcagagagagtcttgtttatggggcctaagctgacattgcttccatccagcaatccctgtgggtaaggacagattgcaagttgggggattggtgccaggcgaggagagcatgaggaagatttgggagaaggtgggcgttggtctttcgagtgttcccgacggtttggctgcgcgctggcaggtttctgagggcggtcatggggaagtgcttttgcacagtgctggtgctgctcctcctgcatgagcgacccagcttggtccaggctgcacaggctccttaggaaactcgcgtggaaggtgatgaatctcgtgcactgaggaagtgggtttctgtttcacagaggtcttgtctgtcttggtgatctgcaagtaggagttctctgtaggcccgtctgcattctcagagggctccgtgcctggctgttcttactctgtcctcacacttgccatagactgggatctcagtggcatccaatgtcacctctctcctcttcacctgcttctgcataaagggaactaaagtgaagttacaggtggggtgagggtgagaggcggcaggactgagcgttggggtaaaggttgcagcttttcttggctgcccgaagtgtgtgtgatgcagcatggccccaggggaggtccttgctgcccgaggactggccaagccatgcaaaggtggggtcacctgtgtcctggcctcttcgtggtgcagtgccacaggttcctcccagatcccagagggaggccarccagcagcttgcaggcactgtttgttaaaatacagatagagaggtctggcgcacacctgcaatcccagcactttcggagcccgaggcaggaggagcgcttaagcccaggaagctgaggctgcagtgagcaatggttataccgctgcgctccagcctgggctgcagagtgagactctgtctctaaaataaaaaaataaaatacacatagatacatctctggcttttagtaatgtaaaaatgtttctaccctttttagttaattcaccagaaacgaaagaaaatgtttccttggaattttttccgttttgttcattgctttctcctttggaattagaaacactttaaaacatgtagatagattgaacacgtgaatactaaggataagtacctgagtgaatgagatgtgcaaatacacggtccccttttcagaattgcctgttaggtcagggctgccaggaaggaggagaccctggaaggtgagctgttcctcgcacaagttgtgcctgctgcagggctggaaacccctgtgctggggatgggtgaggtacgtctttgtgctttcaacacttgaccagaccatatttctgtctttgtagtaatgagctgagcatgaagacagattcccgcctaaacttgctggacgatgggaccctgatgatccagaacacacaggagacagaccagggtatctaccagtgcatggcaaagaacgtggcyggagaggtgaagacgcaagaggtgaccctcaggtacttcgggtctccaggtatgtggygggcatttcacaccggggttccatccagaattgtcgtccctcactatctgccttctcctttccttgcaccccaaaataagaatgaacattgaagtctgaagttgaagctccagtaccagggttggctcagaaagctttckaagcgcagggtcgtagatgatccatgagcggtgctgtggtccccagttagcccctcatctggggacacactcatagtccacacagccggggcagtccatgctgtgagcccagcccattgagagagggccttgccacaccctgacccaccgaccccaccccccaggcgccatctgaagggacagctactcagccacagccagctgttgccatgtggtaacgaggtctctattttgctaagggcttggattatgtaaaagaaaccacaaatctagatttttatccaatattttcatgtttaagataatggcacctaaatttaaaacatttaaaaactgtctcagccgcatcaagtccagctgtggcctctcatccatctgggccccatcaggttgcaaactctgctctgatccacctgtgttatccatggccattgctcagaagaggagctgggcccttgaagaacagcggattgaggcattgggtgtacccaccatggctctgggaaatgatacagatcagttcatgcctctggacgggtctgcctgtcgtcctgtgcagaagccggtagagtcggagcccttacccagggaggctgcaggtgtaacttcctctctgaaaccttctggctgcctttagcttcagccacaaatcatgccagggttgctgcttccctggtattttgtatttcaggccattatggttataaaaccttttgtttggcaatgtaagtggttttggtgtttcttgtttaaatcccagctccttaattggcctggtctctgcagcacctagtacatcccagcatagacacaatcaacagttatcagtgactgagaattcctggctatcacatttccattcaaaggaaagcccaagratatagtactgctgaatcaaagcccttaatcaaacaacgttccacatgtttagcacaagacatttagcatctttccaaattcagaatgctgtgggcctgtgcagagaagttaagacacagccgctgctcatagaaggagcatgggctgtatttttaaggaattaaaaaatccacaaaatagggagaaaaagttatgtagtactgttaagtatatgttatagacaaaggagaataactatggattatgagtaatgaactacttaggagagttactatgttcataggttgattgattcctagacaggaatatttagccagctctttatggcttgagagttccaaatttcactccttttgatctgaattgttgtgtctttctcaggaacagcagccctatttagtatactagtctgagcatgtgggtgtagctccctcagatacacatgaagagtctcccgccatccggtgcacagggagtcactgcagcatgggggaaccagccctgagaagcccagaagcctaggctgacacactgcagcctgcagtccacacctgcctactgcctgtttttcctaaggtctatgaactgagaatacttttctacaattttaaatgatcaaaacttttaaaagaagaacaatatcttatgaccacatgacagctagaggaaattcaggcgtcattgtctatgattaagttttcttggagcatgaccacacccattcttctgcacaatgtctatggctgcttgtatgctaccatggcagagttgagtagtagcaacaaaacctgtgtggccttcaaaacttaaaacaggaccaatctggccctttacagaaaaaaatggccaactgctgtcacggactatggtaataatatatagtaataggaatagagtgacgtgtaggtctctgtgagacacaaaggggcatatcgcacccagtatcctgaagctctgtgattaggagcatataaaaagtttgcaatttttatctttctgatgaattacatttttgatcagtaacacttctatctctatcagtgctttttgcttcaaggtaaatttgttgtaagataaatacagcagcytctacttgattcgtattggcaggtgtgtcttttcccaccatttttctccgagcctttccatgtgcatatatttgagatgtttaatataaataacatagagctagaaatttaaaaaaaaaatcctaagtttttcttaaagttaakccatttaaatatgtttattgtagttaacaatatgagatttataaattctagctcttattctgaactgtttgtccaaacttttctatgtttcttgctttagttggaaataattatttttcatatttgctccccactacttgtttggacactatgtgcccatttctgttcttttaatggttagcctagaaaattttaaatgcattcttaaattgccaaagcctaaagttagtataaccttcccctctaacgtgcgttcatccctctgagttgatgtgcttggttctgttttttttttaaacctataaacattattattttgttctcccagtgtttgtctggatgcatccatgtggttcccacttcctttgtccttcctttgtttatctcagctcttctgtcggggatcaccttccttctgcctgatgtggggggagttgggcagcaagttcacgtgaggaccggattttggtgaacaacacttaaatgagatttatttctctcttctactgggcactgttccctgggtggggcaggcaggttttgaagttagttctttctcatgccgagggcacagcactgtggggatgcagctgctgttcagttttctggtggacttctcttcatgggcctgtgttgatctgtgtcttgtcttctgtatcacatgaggctcttaaggctaaatttaagttataagggtctgcagatgccctcaaggccgactttgactttggtgttcgtacttctgtgagtagcttcatggtttccagtttgttattctgatagaaatactaatattaaatgtcatttctgtattttttataatttatacttaaatatttgattaacacagcttacatattaacatatataaaaaaggtagaaagtcttcctcctggctcttttcgtcatccgctcaactcctattcccttcccctcttcccaaaatgcttagtagtttctttcctatctatatacaaaaaaatgtaagcatatttgaggcaagtgatttttcttagatgatatcttagaaatctttctagtctttcacttttaatacatgaggtttcttactctctttctttgtatagctgcatagaattccatgatctaaatgcaccataatttatttaacaagttctcttttggagtgagtttagatttttttccaaatctttagctatcacagttgtgtgttatttattcaaaagcctttgggccagatgtcttttgatatccagaaacttggggaaattttcagaagggtagcatagtgtaaaatccacataccagtttagactgtcagcagagccctgtaatcaatgtattaatatcctatagcaaactgtatggatattcacagaaagtagcataaagactataggtagtcttatgctagctagatccagttttgcaaacaaataagttatgaaaaaataatgatttttggagctttctgaattttagcatggcagataaggatggttgacctgaagaaacaacagggcaaaaggaaaacaaacaaaaattatttatttatttatttatttagacagagtctcgctgttgcccaggctggagtgcagtggtaagatctcagctcactgcaacctctgactccctggttcaagtgattctcctgcctcaacctgccgagtagctgggactacaggtgtgcaccaccatactggctaatttttgtatttttagtagaggcagggtttcgccatgttggccaggctggtctcgaattcctgacatcaggcgattgcccacctcagcctctcaaagtgctgggattacaggcatgagccaccacgtctgacccaaacaaaaatttatttggacatatgacattttatgtgcttgtaaaaatatctatggattaagtttctagcagaatatatatatttttaaattttactttaagttctgggatatatgtgctgaatgtgcacgtatgttacataggtatacatgtgccatggtagtttgctgccacctatcaacctgtcatctaggttttaagcccgacaggcattggatatttgtcctaatgctctctgtcccctttcccccaaccccccgacaggccctggtgtttgatgttccactccctgtgtccatgkgttctcactgttcaactcccacttatgaatgagaacatgcggtgtttggttttctgtcyctgtgttagtttgctgaggatgatggtttccagctttttccatgttcctgcaaaggacatgaactcattcttttttatggctgcatagtattccatggtgtgtatgtgctacgttttctttatccagtctatcattgatgggcatttgggttggttccaagtctttgctattgtgagtagtgctgcaataaacataacgtgtgcatgtgtctttatagtagtatgacttataatcctttgggtatatacccaataatgggattgctgggtcaaattatatttctggttctagatccttgaggaatcgccacattgtcttccacaatggttgaaccaatttacaatcccagcaacagcgtaaaaatgttcctatttctctgcatcctcgccagcatctgttgtttccagactttttaatgatcgccattctaactggcatgagatggtatctcattgtggttttgatttccatttctctaatgaccagtgatgatgagcttttttttcatatgtttgttggccacataaatttcttttgagaagtgtctgttcatatccttaacccacttttagatggggttgttttttttttttgtaaatttgtttaagttccttgtagattctggatattagacctttgtcagatggagagattgcaaaaattttctcccattctataggttgcctgttcactctgacgatagtttcttttcttgtgcagaagctctttagtgtaattagattccatttgtcacttttggcttttgttgcaattgcttttggtgttttagtcacaaagtctttgcccatgcctgtgtcctgaatgttattgcctaggttttcttctagggtttttatggtttcaggttttatgtttaagtctttaatccatctttgagttaatttttgtataaggtgtaaggaagggatccagtttcagctttctacatatggctagccagttttcccagcaccatgtattaaatagggaatcctttccccattgcttgtttttgtcaggtttgtcaaagatcagatggttgtagatgkgtggtgttatttctgagggctctgttctgttctattgtctatatctctgtttcggtagcactatcgtgttgttttggttcctgtagccttgtagtatagtttgaagttaggtagtgtgatgcctccggctttgttctttttgcttaagattgtcttggctatacgggctgctttttggtccatatgaaatttaaagtagttttttctagctctgtgaagaaagtcaatggtagcttgatgggagtagcattgaatctataaattactttgggcagtatggccattttcacaatattgattcttcctgtccatgagcacggaatgtttttccatttgtttgtatcctctctgatttccttgagcagtggtttgtagttctccttaaagaggtccttcaagtcctgtgtaagttgtattcctaggtattttattttctttgtagcaatcatgaatgggagttcactcatgatttggctctctgcttgtctattattggtatataggaatgcttgtgatttttgcacattgattttgtgccctgagactctgctgaagttgtttataagcttaaggagttttggggctgagatgttggagttttctaaatatgcaatcatgtcgtctgcaaacagagacaatttgacttcctctcttcctatttgaataccctcttaggagggtgtatatgtccaggaatttaccgctttcttccagattttctagttcatttgtgtagaagtgtttgtagtattctttgatggtagtttgtatttctttgggatcagrggtgatatcccctttatcattttttatcctatttgattcttctctctttctttattagtctggctagcagtctatctaatccatttgtcaaaccgattaacaaaatatgtattttgttaatcttttcaaattaatccagctcctggattcatttttgtttgaagggtttttcgtgtctctgtctccttcagttatgctctaatcttagttatttcttgtcttctgctggcttttgtttggcagggtcatttctgggcaatagagtgtgcacatcttcagtgtcagtatgcacggccacgtccctgcaggtgggctgggccagggtgtgctcccactgccagcatgggagagttctgtttccacacaaactcacacatgaaacacattcataattgtatggacttttttctggatttaaatttgaaaaatattatttcttgcttacttttaatttgcattttttgtgagtaaatttgatattttgtatactctaaatatacttccctaacaataatttgtgccaataagaactactagcaaggtctaacaagattgacataatgtattttatttagaaataagaaacctccatggagttcggcacatgttttaagaaaaagcgcttcctaattagctcttcctaaccgatcatggttgctcacttttctcacgtggcctgcattttgtttgacccgaggctgtgaaccatttttattgtctgcacatttctttaaaaagaaaatatgcagttacgttgtgtttgttttgcctatttcggtggtaaatagaattaatagcctgacataggaaaaatcaagcaaaaaccatgtcaaaccgggagaaattaattgagaatttctgtttaattgtgacagctcgacccacttttgtaatccagccacagaatacagaggtgctggttggggagagcgtcacgctggagtgcagcgccacaggccaccccccgccgcggatctcctggacgagaggtgaccgcacacccttgccagttgacccgcgggtgaacatcacgccttctggcgggctttacatacagaacgtcgtacagggggacagcggagagtatgcgtgctctgcgaccaacaacattgacagcgtccatgccaccgctttcatcatcgtccagggtgggtatccatcctctgtgccagagccagggctcagccccatcctcacccctccactagctcgcgctgccatacccacagacgctccatagaatcttctgccctgtccacttcactcggttgatttttatccattacaccccccttggactaaatacagacgactgcagtttgtagatttttggaacagaaggctctgtagtatgggctctgtgtgctggctgtcgtgtctctgtacctccagcacctggccagcaggagtgtctatcagataagtgagagagagagtgtgtgtgtgtgggtgtgcacacatgcatgcacatgtgcagtaaggtggttgatacaccttgcagacagctttgaatccttccctaaggtcagttttggatgtaatctgggagtattcrtcgttttacgccatctgccatggatttctmcattgcttaattgactgtaaaatgagttattcttgtgaagtgggactttgttggaaaacattcaaacaatacggaagtgcaaaagataaattattagagatgatattagagatagagcaatcatttccttctgctggcctctcttcagccctttcctgtctcactggcaatctgtcgagaatctgcacgcacagcagtgcaactgcgttacatggatttactttttttgtggctgttacttttataaaaatggaatcataccagacaataytattctgtaagttatgtttttcatccagtgataataaccactatcatcatacacagctataccagatggcattttttaagcatttgcaaatattagtttagggtgaggattgagaggaatcgttgtaagtcggcctggtgtccacgagctgcagtgtgkcctcatccgtgccccgtgtgcattgcagctggcggtgtggttgaacggtctttgtgtgctttccagggtgatgctgagaacacacccatccttcatcttctttccgttctgctcccatcttctcctgtgccctctgcctctttctgactcttcgttgtagacattgctcctaatggtcagacgtctgccaagactgtggtcattttcttggtcgcgtttttaccccaggctgttttttacatgtcctgtttygaatgctttctctccggaagctcttcctcagttcactgtgacgcctcaggacagagtcgttattgagggccagaccgtggatttccagtgtgaagccaagggcaacccgccgcccgtcatygcctggaccaagggaggtaagacccaggccggccctttgcctgctccctccgcggccacagacgcaggaagcacacatttccactgtgcccaggcaaccccagcgtgttctggacagggctgagctgggactggattccacaggaccaaggcactgggaagcgcagaggtgtctgcacaycccccgcggcttccygtccatgcatggccgtccctcatggacatcatggcaggaaactctgagaagctctgtcattgcggaagagacttggggttcctgcctttgactccctcacacctgccttgtttcagatagtctctaggatgtgcttttaagtagcctcttgaaggaatctatttgcatggaggatagaattttctggaaacagtcgaggaatatattgaaacagacgaatagcttttgctctgactttgcttcccagagccctcactgtcacctccccattcggcatcatgacctttcatcacattctttgcctacagtcctagccctctttcttcaatgggaaagtcgctgggcatgttactgcataaaggcacagcctggatgggggttggggtgagggcaggagctgaaactgctggagaaggagctacgcagacctcctggttcctgtcctgggatgcaagcagtgaccctgagacatcctggccactccagcttgcaccaaatggccagcccatcccttcagccctctgaggggccccacccagggctcctgaaagtctttggggaggaggcttgtgcctgcatcacacgccctggatttcccttttctcaggcagttatgggcaagaacaggagaggtttatcccggaaaggaacttgctggggcctcgcttggctcttcgtcatctccagcactcaatcctctccctggttctcccagctggccatccaccccgctctgactccccgagtccccatgtcctcctggcsccctgtgtagtgcttttccctctgttctctgccactgtcaacccctctgtctgagttacgggtgcagggacgttcaggtgtcaccatggtgtctgctggggaggcaaagatttgcttatgcagggccaggccaaattatccggcgccccgacccaggtggagacaagcttctgtggtcatgctgtcagtctgagagcaggagttctccatgcgtccgagtgtccagtgtaacgggcccatgcccttgcagggagccagctctccgtggaccggcggcacctggtcctgtcatcgggaacacttagaatctctggtgttgccctccacgaccagggccagtacgaatgccaggctgtcaacatcatcggctcccagaaggtcgtggcccacctgactgtgcagcccagaggtaggtgccaggaggttgtggactgaattgattttctcagatcggttatcaggaaacacagaattcygcagctgacattagtgttactcttcgttataaagcgttggctsttctctctgcattttgtgcaccgtcattgtgcttgtgcccccagggtgtctgcatagtagctcattcaatctctgtccctttagcgggtgaaaacatttgcttatttttcagtgatggttgttttgaacttggataagagtgacttgttaaagtaaaatctatcaggttttttcccttggttaattaagattattttagaaaagggttgtttctaactgccctttctggggtggttatttaagtaacacagtctaatcaagtcagctcccaaggcacagaccccagatgatgtatcatgaggccaaatccagtttctttcccgtctgcccgctcatccttggaccctggtcttcatcttgttctttttggatgtcgcctttgcctgttctctccaatgagaagaatccccacaacctcatatccctcccgatagaatcagcgtagcactgattgtggcctctgcaagagcgaaggcccctggcccagcccccgtgttgcaggcgccctgtgctaactccagtgttagcatgagtggcccccagagctgagtartccaggttgccacagaccctgagcttgtcatggggaccatggggagtggggcagagatgtcgtgcggggaggatagggctggatttccttgcgtcactttggggctgtcctgagactgtgcagacctctagaaggggctcccctctgcctgttgtcagtaggctgttgatgaccggcccgccgggttggctctgtgtttcttgggtttgcccttggcgtccctgacctagcagracgctgggtgcctgtatagagaatgcgggggtgggattcctgaacggctccccagatcccagcactcagccacgctcctgctctttcagaggaggaagctcccctctgtttccttctccgagagtcgggctctccccagagcttgttatcctctgtgggccctgcggcacagcatatgcctgagactgccccaccatcggtgagggactgggggctggaggacatggcagccagcccatcctggaccctgcggctgtctgtctctgagcagggaagacactggytatgctttgctctccttgccctgagaggcggggaggcgggcggatcttccctgggatctttcaggctcccctgccctgtgcagaggctgctgggaggcagagaaagggcccattctgaaactgactgtgagctcccagcatccctgagtgggcctgatggagggcaggggattttgttcttctgaagttttttgatgtaattgactcgttctcctggattstctacatctgccttccagtcaccccagtgtttgccagcattcccagcgacacaacagtggaggtgggcgccaatgtgcagctcccgtgcagctcccagggcgagcccgagccagccatcacctggaacaaggtaggcggtctggtgcccragccagccaccacccagatacaaggtagacgggctggcacccacaccacccactacctggagcaaggtaggcggaccagtgcccacgccccagcctcccctctgctgtggggtatgatgggctggacagctgctgcctgcccacttcctctatagactttctgtagcagaaagaaaaacattcagatcttaagccttgaggtaaaaatactcagggcatccttactaataagaacaaaacaaacttggagcattccatttttttgatcttttcaataacaaaagcaaagaaaaaccctcttatagaactatggtctcatcatcaataaggaagggttttcatcgttatttcatttctttgctgtttttattaagctcagtaggaaaatgtgggtagcactcacacaccatgacccgtgtttckgtgaattccctcccgggagcacagggctggccacactggtccccatggaaggagagtgctcagcggagatggtcccatccyysmmctgcatccctgcactgccctgtgaatctctgtgtccttttcttcctcgccacacacaccccaggcatctgctcttgttcctgcctcagctgggaggtcacctgtccctctgcgtctgcctctgaatccttctttgccctcggcgccagtgccctctctttctgagacattcctaggtctctttgtagggccccccaccatagcgggtgtctaagggagccatcattggtgcctcttctcctcattgtggaaaatcatccttgcctcaagctgtcaagctctgttctcccaaagaatgagatgtgggaagagtttatctcgccagcttggcactgggagaactgaccacatctccttcgctttcsaggcctggatggatctgagcrcagcctgggagcttctccatttgcaaatcctaacaaatggctcccctcccccaaccctaggtcagataacttctgcttcttagtcttatttctaatactgttttcattctgttttgctccaggatggggttcaggtgacagaaagtggaaaatttcacatcagccctgaaggattcttgaccatcaatgacgttggccctgcagacgcaggtcgctatgagtgtgtggcccggaacaccattgggtcggcctcggtgagcatggtgctcagtgtgaayggtaagatgccacatgcccacatctacccacatggtatccacaaagaaagcccgcaggtccctagtgtggtcccaggccagttgacttaggctgttcagaattattcagaagacaaagcacccttgattcccaggtggggacactstcctgatgcatggccgggctgctcgacagcccctcccctccacacaggcacctggaggccctgctgcccatccacggggcagagctttgtcctgcagcctgtccactgggcaatgtcttaccctgcagcccatccactgggcagagctttgctccggggtcatccacatctgtccagaaatgaccaggtgtaatttacagttacaatttggcaaatatggttgcttgaagagattctgattccttagctgcggtttctctctcctcgggctttggccaggaatgctctggaagcatctttcagtgggaacctctaggtgctcgtaggcagccttacatagatccagtcggtggtcctagagccgtcctgactccatgcctgcatctgtctgtttgcatcctggtccgccaccacttccatcccactcaccccgaggcccttggcatcttgtccgggttcttgtaacagaggcccgggtcactctggcccctctttctcaacccacagaccccatgatgcccatgatgtgtccctgacccttctccatgtctcctgtggccaccagggtgacactcacaccctttagctttgcatggagtcttcacagtgtgacccaaacctgcgcctcatcagtggtgtgttccccactcctgctctgtccccctagagttagcaacactctgagaacgcgcacaaaccccccttcacggggtaaaggaccctctggccatcaccccactccccgcaggcgctggccttcccccgggcctccactgtgactctatttttgccttttccactctcattgtgactgatccgccttctccatgggacttgttaacagacaggaagagtgacccccactcagtgccatgaacatggcagacataaatgtgaaccgtaatggaattcctcaaagacttttaagaattatttaggaaaagtcttaagtgaccttattttcccattatatgtagagtgtgaaatgtaaagttgatgtaaaattaagtgtaaaattaagtgtaaaattaagttgatgaaacttaaaaaccagtagattatttaaaattaatatttgttttttgcttgaaaaatgctaccttaacatgaattaattacatctgaaatttaatcgtccacccgtaattccatcccccaaaaataccatcattaatattatggttggattccttttccttttataaaaaggtagataaagaaatgcttttggattatttttctgtgatcattgcttatagaaatacaaattcaacttaaaccattaataagaatgaaatgtgagtcataaaattatataaaattgtatgtctcatttatctacctattggcataaaaatattgcattccaaaaattagtaaatttgggctctgagatacacaccaaaaagtaaggtttctgcctagctgaaattcttttcagccatttgagttgtccatgtatacatacctcaaatatgcaaaatagccaatgagctcacctaatccacatgcctgtgatgtctgttagcggtgaaataaatcaggctggagatgtccatccatagtccggtgtgagcacatgttgtaagaagatggttcagaagggccctcgggttggcccagttatcaccaatagtcgccgccacttggtcgttcgttcagcaaatgccttcgtgggctggactctgtcctcagtgctgagccaggtgtgccaggcactcggctccatggagttagatcctggtggagagatgagtaagaagcagtgagatgagcagtcacgctcagatggtgaggagtccgtgaggaaccgcagggcaaggcatgggccggagggggaagcagaggtggtcagcactcgcctgcgtattgaattctgagcagagggagccgcggggagatggggggtggcaggggcagcctggtctgggagagtagagtgggggggtcctggggtcagaatgagcccgatgccggggggtggggagcacagggctggggcagtcctgggggtcctggtgctaactgggctgcagagctcgactgtccttgcagacataccgggacgccatgaggaagttcccagcagaggagcaccgtgagccagtctgctttcctaagatttggcttgggctgtggatgaagggtccagggcgaggtgtcggggaggatagtggggggtgctgggccaagtgggagaaggagtgcctgcacccgggcccacagctggggtctgcggggctggtccctgggctcgtggccagtagcagatctgagggggcctggcagtagttggcttgcactgtggggggactgctgggctctgccagtgtcacccattgagacccagagacagctggggaggaaccggcttggggaagaagagatggaggagtcctgtttgagcatggaaaagggaaaagcctggagtgggtggtgagagccacgaagtgagctgcagggagaggtcaggacgatggtgtaaatttgaagacaacagcgtgaagtggaaccacacagggagatgctgtggaggaccagaacacccagtcactgtgctggagctgcagcctcagaggccgggcgggcaaggcagaatgagcaaaaagacactgagagtggacgcacgcagacactgtaacagagagagagggggagagagagagagagagagagagagagagagagagagagagagagagagcccacagctgaaatggagtgctcaggaggaagagacaaggagaaaggaaatcacagtgagggggcaagtcccagtgaggagggggcaagagggggcaggttcctgtcaggaagggactaggtctcagtcaggaggggcaggtttcggtcaggagggggcacgtccttgtcaggagagggcgggtcccaatctggagggtgcaagtgcctgtcaggtggggacaggttccagacaacagggggcaggttcctgtcaggaaaggactaggtctcagtcaggagggggcccgtccctgtcaggtgggggcaggttcttgtcaggagggggaaggtttcacacaggaggggctggtccctgtcaggagtgggcaggtcgctgtcaagagagggtagttccttgtcagtagggggcaggtccctgttaggagggagctgctttcagtcagcagccaggtttcaggcaggagggccaggtgtctgtcacgagagggcaggtcccagtcaggagggggacgtcctagtcaggaggtgrcaggcttcagtcgggaggcagcaggtccctgtcaggagagggtaggtccctgacaggaggcggcaggtttcagttaggacagggcaggtccccttcaggagaagacaggtctcagtcaggagttggcaggtttcagtcaggttggggctggtttcagtcaggttggggctggtttctgtcaggaggggcaggtccctgtcaggagggggctggtttcagtcaggagggggctgttcccagtctgaaggtgacaggttccagtcaggggagagcaagtttcagtcaggagggggcaggtcccaggaggaggtggcaggttcccccccagtcagtaggaggcaggtccccccccagtcaggaggggtaagttgcagtttaaagagttcgggtccctgtcaggagggggcaggtcccagccaggaggggccaagtttcattcaggaggggcaaggtcagtccctgtcagcagggggtaggttttagtcaggagagggcagttctcagtcagagggagtagaacccagtcaggaggggacaggtctgaggcaggaggggacaggtttctgtcaggaggggacaggttccagtcaggagggggtaggtccctgtccggagagggcaggtttcagtcaggagggggcaagtccctgtcaagagggtacaggtttcggtccctgtccaaagggggcatgcttcagtcaggagaaggcaggttcctgtcaggaggggacagatcccagtactgagggggcaggtccctgtcaggaggggacaggtttcagtcaggtgggggcgggtttctgtcaggggggcaggtcccagtcgggatggggcagatttcagtcaggagtgtgcaggtgcctgtcatgaggggaccagttttattcaggaggggacaggtttcaggcaggaggggacaggtccctgtcaggaagtggcaggtttcagtcaggagggggcagctttctgtcaggagagggcaggtctctgtcaagagggggcaggtccccatagagggctgtgtcccagcagccaagtgaaagaagcttttttgtaagggtgtgttgggctgtgtcagcgtctgtcaaaagattgcgtatgttgaagaaaaatgaaatcaactttggatttattrgggttcatgtcattgggtgagatggttagagctgttttcatcactaaaaataaaagttggttggaattagtttatagtatttggtaaagtatcaactagggacttactattaagcagaaaagaatgacaagagggaactagaaagagggcagtaactttaggggtagataaggtgtgtgattctgtgtgtgtgtgtttctttggtttggtgtgtttgtgtatgttgtgtgtttgtgtggtgtttggggtgtgtgtttgtgtgtgttgtgtggtgtgtctgtgtgtttatagtgtgatgagtatgtgtggtatgctatggtgttggtatgtgtagtgtgtatctgtgtgtatagtgtcgtgtgtatctatatgtttgatgggctatgtgcgtgttatttataaggtgctgggtgtgttgtatttgtgtggtgtgtatgtgtgtctaatgtgatgtgtgtgtcgtgtgtatctgagtgtagtgtgatggatgtgtgatttttgtgtgtatctgcatatataatctgtgtgtgtgtggtgtgtgcgtcatgtcctatgtgtggcgtgtgtctgtgtttaatgtgctgtgtaggtggcatgtgtcaggagggggtaggtccctgtctgaagggggcatgtttcagtcaggagggggcaggtttcagtcaggagggggcaggtttccgtcaggagggggcagattcctgtcaggagaaggcaggttcctgccaggaggggcagatcccagtaaggaggggcaggtccctgtcaggaggggacaggtttctgtcaggaggggcaggttgctgtcaggaggggcagatgtgtgtgtgtggtgtctgtgtgtctgtgtataatgtgcagtgtgtggtgcatacctctggtgtgtttgtgcaatgtgatttgtgtgtgtggtgtatgtgtgtttgtgtgtacaatgtgatgtgtgtgtataatgtgatgtgtgtggtgtgtgtgtgtaatgtgatttgtgtgtgtataatgtactatatgtgtggtgtgtgtgtggtatgtatctgtgtgtggcgtgtgtgtgatgtgttatgtgtggcgtggtgtgtctctatataatgttctgtgtaggtggcgtatgtgtttctgtgtatataatgtgattgtgtgtggtatgtgtttctgtgtataatgtgacatgtgtgtataatgtgctgtgtgtgtggtgcatgtgtggtgtggatctgtgtgtggcgtgcatgtaatgtgctatgtatagtgtgtgtgtctgtgtataatgttctatgtaggtggtgtgtgtgcgcctgtgtgtataatgtgattgtgtgtgtgtggtgtgtggtgtgtgtgaggagggagtttccctgtgtaatgatacaagtccacaggtgagaagatgggatcatggaggcagcagatctttaaagaggggagtgggttaggatcccggagtccagggaggctgtggcctttgatgagaggaatggacgagatctgctggacactgaggtgtctccacagacatcttgtctgctgggctggccacacagggaggcctcagtccacacctcccacatgctgttgcatatagcrtaagatcttccatgcttcacattataactacttcctgtcttcttcttaggtataacatgatttcaaaagctaaagtctgtaattttcatgctgtctgaaacggcttctagtagaatttgtgataaaataatttgagtttgggtttgaaaaatagaaataacatttggagaaaagtatgccttgtggctaatgatgtagtgtctagacatcattttatgagtaattgtgcagtatttttcctggtaatacgcgactttgtattttcctagttcctgacgtcagtcgaaatggagatccgtttgtagctacctccatcgtggaagcgattgcgactgttgacagagctataaactcaacccgaacacatttgtttgacaggtatcgtggggctgtaaacacgctgaccctcaaatcactgagctttagggtgaaggtgggagtgattaaagaatgcatgcagttctaatatatgaattttgatttgattatctgatgatcaaaatgtttaatttaaaaatcatgaacaacatgggcatctgagttttctgggggttgaaataacagaaggatgtgtgcttttcaaatagaatttggctatgatccacaaccaaaacattctttgaaaatttcaactcattcctttggcttatgactaaatgatttggcaaaaacaaatagtttaaaagtcattagtgtatttgttcaygttgctgattccaaagcagtttttctgcatcttatgtgaaatgcaatatctgtgattttctctattgacttaattaattatttgtttttagtgtcttccggtttttgtctgtttgttttgtttttgttttgttgcctcccacttcggatgaggaaggtatagtacattatgttgtagaaagtagccgtagaaatattaatagcaatgattatattttggggtactatgaattttatcttcagtaatttgtttcattcttcctttyttccccctaaactctggttagccgtcctcgttctccaaatgatttgctggccttgttccggtatccgagggatccttacacagttgaacaggcacgggcgggagaaatctttgaacggacattgcagctcattcaggagcatgtacagcatggcttgatggtcgacctcaacggaacaagtcagtgccaaagccttttcttcctcctccatggcctgagtaacggggttgaacaygcctcagttaagtcacattcctagggaagagttccagcattttctttcccactgtgcttatgaactgtgaaattatttccttaaactgtgattcctcttgagccctacagccctgtcgctctcactttggtttaataggaatctctgggggacgtgaagtcccttggagtgctgatcaggctacagcaggtccacctgccctgagtgggttatgccatcctggccagggtgggttatgcaagcccagtccctctgcaacaaatgagccataagggaggacttggcagcgtgcttgctccctgagtgacgttgtgtcctgggaatgcggtgccacgcgtattaggagggttgttttggaagagtcccgggtctgtgaaaccagctgatgagatcacctcgggctggtgtggagatgctgttgggggaggtatgtcccccactcactctgctctggcactttgccgttgcccagtaaataacagatgcctttacatgtcacgattgtccttgctggtagtagtactattgatgaacccatagaagaccctgactttctcatgtaaaaacatcattttcagcagcagctggttactcatggttctgtacacacacacacacacacacacacacacacacasacaagcacggaggagaatgtaacagtagctgtccctgtgggatgaaagaactgctttataatttttcagttttccaaattgttttcattgagcataacttttacgattagagcaaaaaatgttcttcaatggttaaatgaaagagacgtggaattgagacctgtagggtgatatatgcccgtcttcggagtagagtgttgctctgagccagccccgtcctgttaggttttggagccctgttggtgctgaagcctgggcaccagccaatgtgaagctgtatgttccgcagctcctgcttcctgatcctctcctggcctctcgtggctgggggcgggggtgggggcagggcaggaaatgttggagttggagacctctggatgtttctgcttttctcgatgggtgaaactccagcctcacctcccaggcacattaagcatcagagcccattttgttatttcaacaagtatttattgggcactttctgcttgtcaggtgcagggggagactaggatgagaggtaccaggcatgggtcccagccccttcccaagtccctggtgccagtctcctggtagaaaggccatgttctcttctccagagaatgaagagggagttactaagtgtaatttcttgctactccctacctttcttcatttagttacaggatcagatctttaaacattactgtggcagcccagcaagtgggttctgccgccaccacagaaataaagccatctggaaatgtctcctcaaaggcaggctgttggaagctgttccttgtgaggaattgcatgtccattgtgtgtcattacatgccaattatagaaagatttagactcagggaaagacagaaaggaaagagtaaaatcaccccaacaatgtgaaatcattttatacatttgctgtttacccaagcagcagttaggtgcacatgcaggcactcatttcttcacttattcgttccacctgcctgtcagggcacaccctctatgccagtcattgtcctgggccagggcctacagtcacaaacggaagaaataaaaacctctgccctcaaagatcagaccttccagagaaatgcagatggaaaaccagagagaggcccctgcacataagaagccccagcgagtgacccagagagaaacagcaggcgggaggtgggtggtgccctggctgggatggggtgctgttccccatgggcgaaggtgacacgtgagcagggaccccacaagggcgagggggcctccctggagcatctgaggggaccacacatgcagagtcttggaggtggggcacgttggagcatagtggaacagcaggtggtcactgtggctggaaagggggtgaggaagggctgataaagttaaggagatttgtgctccaccagaaagggcctgggagcgaatataaggatatgtcgttggctgtgtatgaaatgggaaccttagggtttcctgcagagaagcaacatggtttgatgcattttcaagcatcgggctgggtgaccactctgcatggggtgaggacagatgtgggcaaaccagtcctgggaaactggggccagggtcggtgccacctgctctggttggcgggtctggtctgcctctgaaccaatggccaacgccacggaaaaagtgaacattctggaggaaagcccggagaccagccccacagcccagccaggcatttgggaggaagtgcttttcctcctggcactctgctttcttggctctatggatgttcaagattgataattctgtaggacttcccaagagtagctgtgaaaatagggccagatgtttcagctcactgtttcagcctctgggaaaagtcagacagaacagaaccaggggctgaggggagcccggggttcatgttccctgcacagacctttcccacccaacacaccagggtgtgtgtttctgacttattctccccagcctggaaaatgcctcacttccaattctttgcattcttatgtgggtgttatggacaccgctcccccacagaaaaggggctgtctcttgttttctttaaaggtgtccatagtgatacctgtgatcttgacaagcagaaatgggctggagaaactttagaaaaaagaagcagtgatggcttggaactctgtgagtatgtgcacacgtgaaagtgtgagtgtggctctgtaagcatgtttgcatgtgagtgtgtgcatgtgtgagtggaaaacatttaagcgtgcatgtgtgtgtgcgtgtgtgtagcttttcggcaggcatgacatgtgcctggaaaggaggagtgttgaggaaggtgaaggcctaggatgtatgaatatgtggaggaagcactttggcgaacacagagatctgagtgtgtctgaccccaggacgtggagtagctgttgcttggagcaggtgtcttgaaggcgaagactaggatctgaacttaggaagatctctttcatctgtggagtgatggcccaggctaccatgtttggaatttcttctgtagctagtgggcaaagacagaaggtctctgagcaagaaggtgacctagtcggagcctgtgccaggctcatgggagcgtgcgcttgctgtggggagggcgtgtggatgacctccaccaggcaggaggcccttctggaattgaaggccagtgccatggaaatcagtcccaggattctgccagagaaatggagaggagggcgcggcggctaggaacattttgaggtagcgtgaaaggaagtggcactcttttggacgttgagggaacagcatgaagcctcagtggaccgagatgtgcagtgacaggtgtcaggaaatgccctgctyggcagcctgtggagaccgatggtgtgcactcgtgtggaggtgtggtgactgtctcttacacggggcgtttaaagtgaggttggaacagtgtcagcctggactggtcaacgtgggtcgggctccatcggttaggggtctcccagaggagagctgctggttgaaaccatgagactgctaagtggggaggggagacagggcccagaaactggggctgtggagagaatacctgtgtttggggctggaggaggggaggagcagttttaccaaacaggaggtgagcaggtttccagcaggaagcgcttgttgcatggcgcacaacaggtttcatgagctgggggtagatagccccatgtcagcggcagaggtgccaaggggtaccgggccctcacacatcctccaggggaattgagtgcgtcttgcttttctccacgtcccaggttaccactacaacgacctggtgtctccacagtacctgaacctcatcgcaaacctgtcgggctgtaccgcccaccggcgcgtgaacaactgctcggacatgtgcttccaccagaagtaccggacgcacgacggcacctgtaacaacctgcagcaccccatgtggggcgcctcgctgaccgccttcgagcgcctgctgaaatccgtgtacgagaatggcttcaacacccctcggggcatcaacccccaccgactgtacaacgggcacgcccttcccatgccgcgcctggtgtccaccaccctgatcgggacggagaccgtcacacccgacgagcagttcacccacatgctgatgcagtggggccagttcctggaccacgacctcgactccacggtggtggccctgagccaggcacgcttctccgacggacagcactgcagcaacgtgtgcagcaacgaccccccctgcttctctgtcatgatcccccccaatgactcccgggccaggagcggggcccgctgcatgttcttcgtgcgctccagccctgtgtgcggcagyggcatgacttcgctgctcatgaactccgtgtacccgcgggagcagatcaaccagctcacctcctacatmgacgcatccaacgtgtacgggagcacggagcatgaggcccgcagcatccgcgacctggccagccaccgcggcctgctgcggcagggcatcgtgcagcggtccgggaagccgctgctccccttcgccaccgggccgcccacggagtgcatgcgggacgagaaygagagccccatcccctgcttcctggccggggaccaccgcgccaacgagcagctgggcctgaccagcatgcacacgctgtggttccgcgagcacaaccgcattgccacggagctgctcaagctgaacccgcactgggacggcgacaccatctactatgagaccaggaagatcgtgggtgcggagatccagcacatcacctaycagcactggctcccgaagatcctgggggaggtgggcatgaggacgctgrgagagtaccacggctacgaccccggcatcaatgctggcatcttcaacgccttcgccaccgcggccttcaggtttggccacacgcttgtcaacccactgctttaccggctggacgagaacttccagcccattgcacaagatcacctcccccttcacaaagctttcttctctcccttccggattgtgaatgagggcggcatcgatccgcttctcagggggctgttcggggtggcggggaaaatgcgtgtgccctcgcagctgctgaacacggagctcacggagcggctgttctccatggcacacacggtggctctggacctggcggccatcaacatccagcggggccgggaccacgggatcccaccctaccacgactacagggtctactgcaatctatcggcggcacacacgttcgaggacctgaaaaatgagattaaaaaccctgagatccgggagaaactgaaaaggtgagctgaagaggctgtgtgggatggctcgtgtacctaggcacctggaacacctgaactgtggtgtgtgtgttatttgtctctgtgtgtgagttttgttcktgtcgtgcagaggtgagatgaaggtcaagtccatgaaggtcaagatgggaacctgcagcctcccgtggctgcgtggttgtggggagggggcagagccaggggtggatggacggtggagggcccttccaccggcctgttttgttccaagagaggagctttgctgagctgtggcacattttcagcttagagatgagctatacttttctggcagaggggttgactgcagggaaaaatacactgttcgcaccagaaaacaccaaaactgacactgtggctgttgggcagcttcgggttcctgctgttgtatcaggggcagagagagaggcagagcttggtgtctgcagatccgggcccttggggccaccagcccctaaggcttggcctgtagcatcttccatactcactgtgttgcccagacccaggcctgtggggccacctgcccatgaccgccacagatggcgccgcttctgagccacagccttgatcacctgtgggtgcggttctccttgttctgccacaaaggcaaaatgggacgctgtcacccctgagacaagggaagctggccaggtagattaggagacctcggaccctgtggggtggaaaaaatggcaaagttttacaggcaaagcagtgaccacagcactacccaggcctaggactggggtaggatcagggctgccgggtccatagccagtccccttcccaggactcggtgccacagtggggttctcattaactcagaattccccaaagtggagacattcagcggctctcctttttgctagatattcacatcttttactcactaccttttttttcatgttatttctaccagtttatttgctttttgtattttaaggaaatagaaataattgcagccaggcccggtggctcatgcctataatcccagcactttgggaggctgaggtgagtggatcacgaggtcaggagttcaagaccagcctggccaagatggtgaaactccacctctactaaaaactacaaaaattagctgggcgtggtggcaggcgcctgtaatcccagctactcgggaggctgagcaggagaattgcttgaacctgggtggcagatattgcagtgagccgagatcacgctactgcactccagcctgagtgacagagaccccatctcaatcaaataataataaataaaaataaaataattgctcatcagtgttttcccattgtgattcttctcagtccttggattatgaatcagattcacaggtcactgtgtattaggagatgttattcccattcaaaaacattgttttaaaaagaagaaaaaccctttcttcttaagactgtcttcctgtatttgatggactctgcagttgactcctaagttacttaacgctgaagttaggacataccctgttaggatctgacctgtgccttctaggggaaagtgattttttacttgtaatttattgtaagttatgactaaatgaacatgatgtcctattaaatttaatatgttccagtattcatttaaataatgcgcttaaattactggcatttggaagtgtgtgcgcactccgttaatccagtgtaatttttttatcatggttttgctgaattaggactgatgtgaactgtctgtgttttttatgtgcttaaatatcctcctttgttcttgtccaaactgacacagattactctcccagatgattctctcttttgccaaacttatttcaaaacatttcaaaagagctagatgtggagcccagcgccaggtggaccgcggctgtgttgcatgctaggtccctggtaaagaagttaaggatgttacccacacactgagcccctcgtctctttatttatgttttcctgtctcagcccattgctgactaaggggaaatgaaacataaacatgagaaaagatgcatgaccatcggagaccatggggccaggaggacttcacagggcagaggggttgccttcggcagactgtagagattgtgtagttctcatctactttgtgtttcacggccgcacggcgagtggatggcgtggcgttggcctgggctcgcctctgctgcccatccccagccgtgggacattccggaactgcgaggtctcttccctggaggaagctccttggattcaggtggaggctttagactctggtgagcctaaggaatgtgactattccagcccctgtgagtccctcccagcggtgggggacagaagagagcaggcacccagagcaggagcygcccggagcaggagggagtcctctgggaaaaggtgtggacgcttctggtggccctagtgtgctgtcctcagccacagaccagatgctgccagggtcctcccgaccaagtttcactcccaggggacatcttagagctagaagttcaacctgaatgtcattgaacttagaagaaaaagggacaatttgtctttgaaagactaaatgctagtttacataaaattgtgtttattctacggtaagaccaatggccagtgaggacacagccctgtgtgcatcctgttcagtaagcaacaaaatctgtcttgatcctagggttcagttggtggtcactgatttgagttttgtagaaaagggcagtgagaattatagaatatatatatgttaaaaatcgagtagagctttgaatagcagttgaaacaggcatcatctgctgcgtagtcgagttctaagatgagattagctgattcgtagtagaagttgtgacatgttgcttataagcctatatttctaaggaattggaagaagtcgatgaaaatgtttgttcttgaacacataaacctaagttttttgccctatctttgcttagcagatattttctttatggcaaatatattttcaatatatagtagaatcaaatgttattctttaaaaatgtatatacttttaaaaatacacatgaacaataaactatatacatttagctatatatagtttattgttcatatgtttattttaaaaagattggaagggtatacattatgatgttacgtgyggttatccctgaatagttggaaaaggtgtggcttaaattttcttccttatgttttcttggcttttctaaatttgttataataaatgcgtttgtgtgtgtgtgtgtctcacatatataatagaaagtagggaaaatcctttaaagcattgtggagagatgcagcaaagaagtaaatattttctttgttaagtaaaattctaaataatgtaaaatagtgatagaaagaaagaactgtttttatatttgctgtattttttaccaygtgcagctttgttaggtagatttcagttttctctttattttttaggttgtatggctckacactcaacatcgacctgtttccggcgctcgtggtggaggacctggtgcctggcagccggctgggccccaccctgatgtgtcttctcagcacacagttcaagcgcctgcgagatggggacaggtgagcacgtgcaccagaaaggggagcacgctcctaagccaccttcttagggactccagaggagaagagctgtcctggttgagactgagggaggcacgaggccctagtgtcttctgtgtgtccccggttgagaatgaggaaggcactgaggccctggtatcttctgtgcaccgccttgggcttacatgtccttgcagcctcaaaactcaaccacaccaggttcaatgatgcttttcccaccccttcatttataggaatatttctgttcctgtaaacctgttggacagtccatacagctaaaccactgtgggactttagaggagtttgggcttcgggcaagatctttgttttatctctagtctactgttattactttactttaatgtagtggaaaggcagaccctacctattacaaactatttcagcagacctgaaataactgccatgccagttttgttttgtttttttaaagttgcccatcgtctttgttgctagtcagaagagctaacactgtcgttcttttttttttttttttttttttttttttgagacagagtcttgctctgtcacccaggctggagtgcagtggcgcgatctcgactcactgcaagctctgcctcccgggttcaccccattctcctgcctcatcctcccgagtagctgggactacaggtgcccaccaccacacccggctaattttttgtagttttagtagagatggggtttcactgtgttagccaggatggtctcgatctcctgacctcgtgatccgcccacctcggcctcccaaagtgctgggattacaggcgtgagccactgcacctggccaacactgtcatttttacaccagattgtctgcctttggttttgttatggggtaggggatgtgagcagtgtgtgagtccatttttaagtgacacctaatcaaacctagtggtttctgtattgctgtgaactaagcaggggagattttaactcagctcctagtgacctgtgagtctcctgcccttctctgatcctgctttcattttgggggatccaggttgtggtatgagaaccctggggtgttctccccggcccagctgactcagatcaagcagacgtcgctggccaggatcctatgcgacaacgcggacaacatcacccgggtgcagagcgacgtgttcagggtggcggagttccctcacggctacggcagctgtgacgagatccccagggtggacctccgggtgtggcaggactgctgtgaaggtgcgtgccaggggcaccatgtctgttcctttttcatccctggttttggtgactgcttggcgggtgcttaatgacctgcagatgtcatcctaatcttgaaaactgaaaacaaaatattcagctttagatttaaatcgtgctgtatccatgctgagatggactgcggagccaaaaatatgaacaaagttggtgattctgaggaattggcagtgctgtgggagaacattcagaataactaaaacactaagagaaacagaaacccaggcttcagcaagatgtgcccctaatttttccttaaagcctaatgtatgtctagcttccagtacttgtgtagccagataaaagacgaaaatcaaaatatggaagaagcatatcaaatatatcaggttttcttaaaagttaatctgaatgttgtaaatatctgtaacgtaagtgactgaagatagatgttatcaaatatctcgtgaggagccctgcaggtaggaggtggtctcatgattggcgcggggggccctgtagctgagggacgccctgatatcaatcccacagccccggcactcgtgccctggagtgccagctccgtcttccctgcagaggcgtcagtggcctgctgtgtgaggcgatggttctcctggctgagttcctgcttcgcattcctaactcccagtcttggttaacctccatttccattactaatttgaacataattttggctttattcaaactatgatcagatccccataaaataccaaactggggatgtttagaacccaagttgtggagcactcactcttgtggtgagagaagcagggcccaccacaatggggggatctggggacctgcggtgagcgtgaccgggaggtggggccagatcccggcctcacccggcaatctgtggagcttgtggtgtctgtggacacttggtagtttaagaagagacacacaaagtacagacactgtccacatattctccaccacctcatttttcctgaagtaatagttctggccaagagcttatttaatttagtaagcgttgaaatctgcactgataatagagctgtgttttagcagcttcttctaagagagtgcgtgcctctgtgtctgtgtgcgactgtggggtgtgtgtgtggagtgtgtgtacctgtggggtgtgtggggggtgtgtgtgatctaatcctgcatctgcctcctcatctgcaccccccaccacccacacacacatgcatggaagtatatatgataggagaattcacataaaaaataaaattatgcttgctaggtacccaattttccaaattatttacatgcttgttattacatctgttggaaacttatatctgttttttgttttattgttttgttttgtttttgtttttgttttatatcctcactggtttatccaattcaaaatgcttttctacaagcatggtagaaaatttgttctgtttgtagaaaattgttctcttgaaaatgattaggaaaagccaatgatacaaaaacccattttctgataactttaccaggcccctgttagctgcttattaagaagtacagccaggctttctgttcttttgctaagaaaatccaaagtcctttgaaagacttcatctttaaagccagtctttgttccccgcatgttacaagcccctcctcctctcagggcactgtgggagaggcttagctgctgaagcaattgctgacattgtttcttccggacacttttccctcttaaaataccaggcatggccttaagctgacacagcttagagaatacttgataagctttacctgtttttattttaccccaaaagccatatctaaatacagcagaaaaatacgaaaacagaactcagatttgacagaaccaaatgtcaattgctatttacttttcaattaaactttttaaaaagacacattgggggctgggcggtggcacatgcctgtaatctcagcactttgggaggccgaggcaggtggatcacctgaggttaggagttcgagactagcctggccaacgtggtgaaacccgtctctacaaaaatacaaaaattagccgggcgtgrtggcgggcacctgtaatcccagctacatgggaggctgaggcaggagaattgcttgaacccaagaggcagaggttgcagtgagctgagatcgtgccattgtaccccagcctgggcaacaagagtgaaactgtctcaaaaaaataaaaaaataaaaagacacatttaaagcgaacgtccttgagctacaacttttcatcatttgcttcgttgatgcctacaacaagtgctgtgtggggtctgcactaggtctgggaagccagcctgctcctggcttggccagcctgggcagcmcagagcaggtgcaggccaggccgctgagcaggtgtggcccagccgtgccctggggtgtgaggaagagacggccatcctggagggacggaggtcccatcaaagagttctggggttggggctggtgtgcgctttggcagggaccccacagtgcctgggaccgtgtcctggccctgctgcttccctgtcgccctgtaattctaccagggacccaccccagacctgcacagccctgggtggaccccacctgccagtgaggctcattcttgaccccaggtgttgctgggaggggctgcggtagtctgggaggcagctgctgttttatgatgtatttgtgtgcccaggagttttaagaaactctgctcttctctgctcctgagacgatttgtgggtggaagaagcgaggggtccagccagctgggtttactcagaagctgtatagttaactgcggaaataaacacattcagtgggactgtttgtgggctccgctgtgggggcagagggagctttaggtctctgtcttgaagatactctttccagccagtcagacaaatgctagaccagaaggagccrgccgcccttcaagggagacaggaaagctagcatggggtctgaggtgtatgctgcacgtgcctcttctcttctcatagaatttctactccagtggcttcctgagacattagcattttgcaaaggtccatatttgcccttcactttcgtgctctgccacagctttcttgggtggggatgatgtacaagacagactgaacaccccattacttcgttaratagtgtgtccacagggcccaggtgggacacggcactgagggcccctcactcacccggggaccaggagggacacggcactgagggcccctcactcacccggggaccaggagggacacggcactgagggcccctcactcacccggggaccaggagggacacggcactgagggccyctcactcacccggggaccaggagggacacggcactgagggcccctcactcacccggggctcaggtgaggcatagcactgagggcttctcagtccaccacaggttgagaaggaagccactcctaggcagggaggtgtttgggctacattcaggagaagcagggtcaggccgcctcttgtctgacactggggctggcagtgtgacgtagggagtgtagcataattttaaggyactccagagtgcagattgtcatctggccatcggggagggacccccagaaacagcagactctgatctccgaggcagagtgcctgagcctccatctgtgggtggagggaactccgcgagggtgtggttagatggcgtggtgagcctcctcagtgtgcccagctgtcctcagggcggccagcaccaggaggtcatgagggctggggcacaggtggagagaggcttggcccctcagaccaggagagggtaagagccgcagaccagctgccaggttgcctcactgaaatgtgccacagtttgttccacgggcagccagtgaagacttcatagttggcaggatgtgcttaatttccccgaggtcagagccttcagagctgacattctgctttgygcttccattttagactgtaggaccagggggcagttcaatgccttttcctatcatttccgaggcagacggtctcttgagttcagctaccaggaggacaagccgaccaagaaaacaagaccacggaaaatacccaggtatggtggtctctgaggtcaaatgatgtgcagaggggccctcgcaccgygggcgtcgggcagtaggaccggcatcctgctgtgggcctrtggcgaggatggttcctggcagggacgtcccagggcactgggggccaggccgcagcctgcgtcctgctgtgctgcccactcagagcatcaggggckgtgcacacccaggaaaccttgaaatgagacccagctcagagcatcaggggckgtgcacacccaggaaaccttgaaatgagacccgrcgtgacctgccraggttatatttccctcctcctcctttcccctcaccacagtgttgggagacaggrggaacatctcagcaacagcacctcagccttcagcayacgctcagatgcatctgggacaaatgacttcagagagtttgttctggaaatgcagaagaccatcacagacctcagaacacaggtgaggtgcctggcggcctgtgtccccccactccaagattccacagcagcacagccctgccygaaccttctgsrtatarcrttttattcccaggcaactgttcaactgcccacacaggacccagaccctggagccttgggggtgtcatttctgcacgctgggtcrggccgggccatgtgccactggtgtccctgggtttcccagcagatgggggtcaccaggcaggggcaatctgtgtcacggccgtgkgactgccagccaggtgaccttgctggagggaacacaggattaggatgctgtaggagagttcagacatgaagtcctgttcttaagcctcttattcaggaataactctgaatcatctctcccagggcgtggtaaggaggcacttccaggtcagccctccacaactgatccagcctctcygggtgtgargaaagtcctggtgtctgtggtatgaccacagggattttcagacggggctcttctctggcgctctgtggaaatgagttctgtcctctccttcctatcccaggaacttacttctactttcttcagtgcctgtggtgggggttatctctgggattttacgtaagggggtggagattgagacctatggctaaataaaaggaagtgcgctcactccgctggtgtggatgggattcccaaggtgcgcaggtcctggctgtctgcagcacatttaatctgtaagcacagctcctttcctactcacaggactcttagcccttaggtttgggagaaacttccatcatctcctagtgtagccccaaggtaacccccagccacagggagaggtaccctgactactcctgtgcctgccccctcatcccgtgcagctgcaggtcctcctgcctctgcagccttgagaccaggtgcaagtccccaggcagctgtcagagtggacgacatgtggcaggtcctcctgcctccgcaacctagagaccaggtgcaagtccccaggcagctgtcagagtggacagcatgccgcaggtcttcctccctccgcagcctagagaccaggtgtacatcccccaggcagctgtcagagtggacagcgtgtggcaggtcctcctccctccacagcctagagaccaggtgtacatcccccaggcagctgtcagagtggacagcgtgtggcaggtcctcctgcctccacaacctagagaccaggtgcaagtccccaggcagctgtcagagtggacagcgtgcggcaggtcttcctccttctgcagcctagagactaggtgtacatcgcctggcagctgtcagagtggacagcgtgcagcaggtcttcctccctccgcagcctagagaccaggtgcacatcccccagcagctgtcagagtggacagcgtgtggcaggtcttcctccttctgcagcctagagactaggtgtacatcgcctggcagctgtcagagtggacagcgtgtggcaggtcttcctccctccgcagcctagagaccaggtgcacatcccccggcagctgcccaagtggacagcatgcagtgttcactcagctccacctggcactaggagagaagcagagacaaacccaggctgacccttggggtccgtgctggggcctgggtgccctaggggggtccactgggnnnnnnnnnnnnnnnnnnnncctagagaccaggtgtacatcccccaggcagctgtcagagtggacagcgtgtggcaggtcttcctccctccgcagcctagagaccaggtgtacatcccccaggcagctgtcagagtggacagcgtgtggcaagtccttctgcctccacaacctagagaccaggtgcaagtccccaggcagctgtcagagtggacagcgtgcggcaggtcttcctccttctgcagcctagagactaggtgtacatcgcctggcagctgtcagagtggacagcgtgcagcaggtcttcctccctccgcagcctagagaccaggtgcacatcccccagcagctgtcagagtggacagcgtgtggcaggtcttcctccttctgcaacctagagactaggtgtacattgcctggcagctgtcagagtggacagcgtgtggcaggtcttcctccccctgcagcctagagaccaggtgcacatcccccagcagctgtcagagtggacagcgtgtggcaggtcttcctccttctgcagcctagagactaggtgtacatcacctggcagctgtcagagtggacagcgtgtggcaggtcttcctccctccgcagcctagagaccaggtgcacatcccccagcagctgcccaagtggacagcatgcagtgttcactcagctccacctggcactaggagagaagcagagacatacccaggctgacccttggggtccgtgctggggcctgggtgccctaggggggtccactggggaggggggtctgtgaactccaaggtcattcagggcaggccttgtgcacaggtgaccctggacagcatagcagaggcagagggggaccagccaccccacctgtgtcggcaaataccaacrccctrtgccctcccatgttgctgattctgtccacaatgctggacttccttccaccctcaggatgaacgggcagctccctgggtggcagcgctgggtctgagaaatgtggatgttccttgtgattttgcagctgctgacagcacagggtgtgtgccgtctgtggtcatttccctgcaccccatgtgtgcagaggtgttcgtgtatcttggtgactgcagaggcacacacaggccggcgtggtcactgcttctctctggctgtgaattaaagcaggtcagccgcagacacagaggtgacatgcaggtcacctggaacctctgcagaccgtcctggctgccacccctaagtgctctctggcccctgtgccactgttcctgaggcttcctttttttttttttttyycccatggtttcagctagaaagttctaagctttgataacttaagtgccagttgctaatgaatgaggcatgcaggaaagatggctttcatttagaagccgtatctgaggcatttcccaaagtgagtaactgtttggctagttaggtcctagatgtccagctgtcattatgaaatgcagatggtacggtgaggggacgtccacctttttcagcatgatgtgtgcataggtgagacactgctgctgcacaggttggggaccacacacttatggctgacaggagatcaaagaagatgttytaattgacatgagtaagtgggtggcttgctgaagttattcacagccatcatcagacagccttacctgtggctgagcatgctttatgaaggcttattagaagaattgggatatttatgataaataatttgtgttcatttcagacatcacagacagtttaggttcaaatgcaagggacggaaaactccaaatcaggatggttttaatgaggtgcgagtttacttttccctcactcgtggagattgctggaccctccgcagtgcagggtccctgctgtagcttggtgctgtgctgtgggtggcctcttcccaaggtcacctcatggcccaggcatttccggccactgtcaccctgtctgccccccggccctgcaagatgcaagagagggtttgaggaaggagacccttccaggaggcttctgctacccctgtgcatggcacagcggttggaaaggtcaccttgttatggggccccgtgcttccagagaaaagccagtggtgttgttactcggaaaataaggcagacttgactctggggattctgagtgatcatcgttcgttctggtggaagtgtaggtgcaggacgttctcgtcatctggttgaatcttgctcccacagtcctctgagaacgtcgcctttgtgactacggtttttatttgacagcacggtggtgggaatgtcttccattggggcgtgtggtcagctgccgccagtctaataaggacattggagattctgtaaaagttcttcagaaatattccyctcaaatgttgtttattttaaggcattattttcagtgaaataacatcttttaatacaagagcyaagctgttactctgaagtgcccaatgaatgaatgttctttgcattgctgcagataaagaaacttgaatcacggctcagtaccacagagtgcgtggatgccgggggcgaatctcacgccaacaacaccaagtggaaaaargatgcatgcaccatttgtgaatgcaaagtgagtatggggggctctatcttcatgtcctaaggtatacgcaagtccgagagtcccrtgtgaccactcaggtgggtggcccagatgtcagggccaggcccctccccgcctacctgtgcyggcctccatccctccttcactcctatggaagcaccaggcaagcccagctctctgtgcacagaggacgtgctaggaggcccagaacctcagcatggtccaaccccacagagggcgggcagcccctactctgtgcagggccacctggggctgcttgtgtgcactggcttcacctcccaccagctgtggcaggaatactcatgccatggaaacccatgaatggggtagatcagctcctccctgcagagctggtgggtaaacactgacctgcccaccactggcyctgtcccatctccagtcagagctgggggtgttacagaggtcactggagtccctgcaaagggagactggtggcaggtggagggtgccctggtgccggcaatggacagacgtctggctggaaccaggctccgtggaaagcttggggcatagtgtgaggaggcaggatggggaggacagcgcgccagcccgggcacttctcttgccatggccattgggagaggacgcgcatcagtgtccctgagctggtcaggtttgggaagggcagaccggggaagagcaaagccctgtcccttcccccctctctctagtcccatcctgcttcctgacaacgcccacccccagacacagtccgaggggatccaggtgtgaggtgggaggatgtgtccagctggtggtcttggcccctcagggtgagaggaccgtgggcatggacggaagggtgggacgggagcctcagggagacttgttatgggggctcccattaactcatacctgtctgcaactatgaaatcctaagagaaccacaaaatccatgcccacagggcaagtacagcgggcaaggcaggggcctcagggcaaggcctgactcatggccgtggctgacacctgtcccggagctgacaggctttgctcacctgaaggccatcccagagctgacaggctgtgctccgtctctcttctccaggacgggcaggtcacctgcttcgtggaagcttgcccccctgccacctgtgctgtccccgtgaacatcccaggggcctgctgtccagtctgcttacagaagagggcggaggaaaagccctaggctcctgggaggctcckcagagtttgtctgctgtgccatcgtgagatcgggtggccgatggcagggagctgcggactgcagaccaggaaacacccagaactcgtgacatttcatgacaacgtccagctggtgctgttacagaaggcagtgcaggaggcttccaaccagagcatctgcggagaaggaggcacagcaggtgcctgaagggaagcaggcaggagtcctagcttcacgttagacttctcaggtttttatttaattcttttaaaatgaaaaattggtgctactattaaattgcacagttgaatcatttaggcgcctaaattgrttttgcctcccaacaccatttctttttaaataaagcaggatacctctatatgtcagccttgccttgttcagatgccaggagccggcagacctgtcacccgcaggtggggtgagtctyggagctgccagaggggctcaccgaaatcggggttccatcacaagctatgtttaaaaagaaaattggtgtttggcaaacggaacagaacctttgatgagagcgttcacagggacactgtctgggggtgcagtgcaagcccccggcctcttccctgggaacctctgaactcctccttcctctgggctctctgtaacatttcaccacacgtcagcatctaatcccaagacaaacattcccgctgctcgaagcagctgtatagcctgtgactctccgtgtgtcagctccttccacacytgattagaacattcataagccacatttagaaacagrtttgctttcagctgtcacttgcacacatactgcctagttgtgaaccaaatgtgaaaaaacctccttcatcccattgtgtatctgatacctgccgagggccaagsgtgtgtgttgacaacgccgctcccagccggccctggttgcgtccacgtcctgaacaagagccgcttccggatggctcttcccaagggaggaggagctcaagtgtcgggaactgtctaacttcaggttgtgtgagtgcgttaaaaaaaaaaaaaaaaaaagaatccctatacctcatttgtatttttaaaatgcgtgatgttttatgaaattgtgtccattttttaggtattagatatggcagaaaaaccatttccactatgcaaagttcttttagacgtcagtgaaaatcaactctcatacctcatggtctctctttaattgaccaaaaccttccatttttctctaaatacaaagcgatctgtgttctgagcaacctttccccgaacacacagcttcagtgcagcacgctgacctgagtatccaccatgtgccaggcacagtgctgggcacacgaggcaccaaggtccgggccacctgcccgcagcaaggcccagctgaggtggtggagggagcccctgaggtcaggggccgtttcggttcagggtggcaggtgtccagcactggggtatggcgtcgaggcttccatggggtgggggaggccagcttccttctgacaggatgggcgcatacagtgcctggtgtgatttgtgcacaacccgtgttccaggtgcacatcctcccaaggagacacccagacccttccagcacgggccggccaagttgctgcggcggaggcagcatttcagctgtgaggaaggtcattggattcatgtgttttatctgtaaaaatggttgtcttaacttcttaacctcatattggtaagtgattgataaaaattggttggtgtttcatgacatgtggacttcttttgaaatagcaagtcaaatgtagtgaccaaattgtggaagagatttctgtcaaataggaaatgtgtaagttcgtctaaaagctgatggttatgtaagttgctcaggcactcagatgacagcagattctgggttctgggagtgttctgtgcctcttacatgccctggaggcctcatggtctcagtgctgaggcggcacacctgtagcacacctgcgtaatgtgcggtctgggccagtcacaaggaattgtgttgtctaagccaaagggggaagctgactgtgatttaccaaaaaaaattctgtaattcaaaccaaaatgtctgcggaatcaccagtttratactctctgtaatcagaacagtgggcagtgcctgggtgaacgtgtctagcagccactgtgcgggatcgctgtaacaggagtggaatgtacatatttatttacttttctaactgctccaacagccaaatgccttttttatgaccattgtattcagttcattaccaaagaaatgtttgcactttgtaatgatgcctttcagttcaaataaatgggtcacattttcaaatggagaatggctttatttttttttacctgaaaccagtacatgaggctaaaacttttccaggtgagatcaaaagcctgagaagggaaggaggtaggtccaggaagaagccccagaactgtcctagtcactaatcattttgtgactaaatgtgaaaaaattactaaaaataaggtattagataaagttgacttccttttccgaagcagctgggatgctttaacccgactgaattttggcaggtgggagtgagctcttgggaaaaacctctggcaaataaatgcccttgtctcctggaatctttgtgctgtggagaaggacatttctttgtcagagaggagtgtacaagcaattcacacaccgaggtgtctgagatgggcagatgcttttccagaagcaagagcgcaggtcaggagggcacagtgcacggaagacagacactccctttccaggcctgagctatgtgtggctctggggccagaagtcggggatgacatgtgacaattgctgagcccctcaggctgtggttgggtgggagagaggatgctgctctaaaggaaactggaatggatctgagggcatctttatagggcctggaaaaaatactactcatctatgtaaggagaaaaatgaaatattaacgaaaattaaatattatgttgttaaaattgccaaatcatttcaaaattagaatgataaattgagctgctttcatggaatgtttatgaacatgggatgaacactcctcaatcaacaaaagacaaattaggtgcttttctgtcacgagggaatgagtgccatataccaattttaatttaaatgaaatgcctaatgcaaaactagcaaaagttaaccatatgtatcttgttttaataatatgtagaatgcattgaaacattcctattgctttttgttattaacacttaatacctgtttctggtgtgcaaaattatatgtcaaatgacataaatacaggcatacctgggagatattgtggcttcagttccagaccaccgcaatcagtgactatctcaataaagcaagtcatacaatttttttggtttcccggtgcgaataaaagctgtgttcacattacactatggtctattacatgcacaaaagcattatgtctaaaaaatgtacataccttaatttaaaaatactttatggctaaaaatagtgaacgatcatctgagccttcagtgagctgtaatctctttgctggtggagggtcttgtgttggtgttaatggctgctgactgattagggtggtggttgttgaaagttggggtggctgtgtcaattttggaaagtaagacaaaatgaagcttagcgcattggtttagccttactttcatgaaagatttatttgtagtaagggatgttgtttgatagcatcttacccacagaattacttatttcaacattggagtcagtcctctcaaaccctgctgctgctttatcacataaacttatggaatattctaaatcctatgttgtcatttcaacagtgttcacaatatcttcaccaggagtagagtccatctcaagaaaccactcgctttgcttatccccaagaagcaactcctcatccattcaagattgatcatgagattgcagcaattcagtcccatcttcagactccacttctaattctcttgctatttccaccacatctgcagttactgcctccactgaagtcttaaacccctcagcgttatccatgagggcaggaatcaacttttttaacaggcacttctgttagtgtgtatattttgacctgctcccatggatcataaatattttaatagcatctagagtggtgaattctttccagaaggttttcagtttactttgccccaatccattagaagagtcactgtctatggcagctacagcctaatgaaatgatttcttacttgaaagtcaaaattataacttgatccatgggctgcagaatggatgttgtgtaaacattcatctctttgtacatccccattagagctcttgcatgaccaagtgcattgtcaatgagcaataatattttgaagataattgattttttctgagcagtagttctcaagagtgggcttaaaatattcagtaaattgtgccataaacatatgtgctgtcatccaggctttgttccatttataaagcatgggcagagttgatttagcataattcttaaaggtctgaagattctcagaagtaaatgaacattgacttcaacttaaggtcaccagctgcaccagccatggcaagagagtcaccctgtcctctgaagctttgaagccaggcattgacttctcctctccagctatgaaagtccggaatgcttcttcttccaatagaaggctgttttgtccacatggaaaatctgttgtttcatgtagtcatcttcatcagtgatctcagagcttctggagaacttgctgcagcttctccatcagcacttgctgcttctccttgcactttcatgctgtggagacggcttctttccttaaacctcagaatcaacctctgctagcttcagagtctatttctgcagcttcctcaccactctcagctttcacagaattgaatggaattagggccttactctgtgttaggctttggcttaagggaatgttgtatctgacttaccttgtatccagaccattcaaactttctccatatcagccataaggctgtctcacttattatttgtgtttcatcattagtgtgttcactggggtagcacttttaattcccttcaagaactttttcttggcattcacgacttggttgtttggcacaagagacctggcttttggccaatttcagctttcgacatgccttcctcactaagctgaatcatgtttagcttttgatttcaagtgagagacatgtgactcttcctttcacttgaacacttagggtcattgtaggattattaattggtctaatttcaacattattgtgtctcaaggaatagggaagtctgaagagagggagaataacccattcggggcccaaagcaattaatagtaacatcaaagatcattgatcacagatcaccgtaacagatatcatgaaaaagtttgaaatattgcaagaattaccaaaatgtgccagagacacaaagtaagcacgttactacaaaaatggccccattggatttgctccacacagggttgccacaaacctttaatttgtaaaaaaacaaaacaaaacaaaacaaaaaaaacctgtatctgtgggccgggaatggtggctcacgcctgtaatcacagcactttgggaggccaaggtgggcggatcaccagaggtcaggagtacgagaccagcctggccaacgtgatgaaacctcgtctctactaaaaatacaaaaaattacccaggtgtggtggcgggtgcctgtagtcccagctactccggaggatgaggcaggagaatcgcttgaacccggggaggcagaggttgcagtgagctgagattgcgccactgcactccagcctgggcaacaagagcgagactccaactcaaaaaaaaaaaaagaaaaaatgcagtatctgtgaagtgcaataaatcaaagcataaaatgagttgtgcctgtggttttttgtttgtcaaagcattcaccaaaagattcttccatgcgtttagtgaacttcccaaatgttttctgacaaaagtttccggaaggcatctgattggcatccactgagtttcatgcaacagtttttctggtgaaaccaatttatcaccacccacaattctagtcatgacactctagaatctcggagatggaatagatgagtgagcaaagtgtatttgcaaaagagtcatctattcctaagctatcacatgctttaagtttatccaagtccccaccatgtgaccagttgggagcctcagcttgaacggatttaagattatcctgtaattacagatgaggaaaaatggtcctagaaggctggccacattgcaccaggccaccaaacaatatgagagctcatccaacatcagcccagccccatgcgctgttgcacacagttgtgagcattgcacctgcccgataccccagcctgcctgtatccaccccggtttgcacaccactgtgaggaagcacgccccatcatggctccttagctcagtcctgctgaggggttgccattcccaagttgtccttaatgtcctagtggctataacaaaggcaccaaacagccactacagttttgcttttcatgtattcagtgttaagcctttgtgcttaaagtcttccattttaggtttactttcatttatatttatggtaacaaatatgctcacatcccaaacctggggatattgacagtcagttagcatgtttgaatctggaagattcctgaaactccagtaatgactgtttttaatgtttgtgggatttgttaaaaataactcggtctgtgttcaccatcacagtatctggggtttctttgttccaactgtggggactccagagggcggaagccaaggttgaaagcctaacatctccattgtccttcccattatgtcgtgaacgtgtccctaacttaacaaagtgatcctttttccatcataactctggatgtcacccttatggtctagtacaataccgccaagaaaccacagttttcaggaatcactttgcggttactggtttggtgctgcggaggacggaaggaaacactgtgtactcctttatcagttgcaatgactgttcagacatggacagtaaattggtgtggcttttctattaccgtggtttggggaagagaaggaatagaaatcttcagattttcattattattatttttttctgaccttgagcataatcttaagttataggaaaaattttatcttcaatgtgttttatcaaaaacatacctccttaatgattattaacccacaattaaaagccgtaagtggaccatcctggctaacacggtgaaaccctgtctctactaaatatacaaaaaaattagccgggcatggtggcgggcacctgtagtcccagctactcgggaggctgaggcaggagaatggcatgaacccaggaggtggagcttgcagtgagccaagatcgtgccactgcactccagcctgggtgacagagagagactccatctcaaaaaaaaaaaaaaaaaaaagccctaagttaagtactctatgatgttatcgtcacatgcttttaaaattgtctgcatccttcccagcatgcaaactgcttttcttgttgttttgtcctcaagaagcaaactcatcaggacataggattggagcctggctgagtgactagtatgcacctgtttatagaggaagttcctggaaaacattcatgtttgtattatttaaaaattactgcaccagaaattaactcagagaatgaccactggtcatcatttcttatgattcagggtgtgtaggggaagggagcaggatgtttgatgccgtgttgtggccgcacactctgtggagactcgggaccctgagcttgccgggaaggctctgggctgggctgtgtccggcggcctctctctaactcctcggtgccctgcctcccatgccctgcagtcaggaactgctggacccaagactcgaacccactgcctctgaccttgagtcgggtactctcttcattttaccaaatgtagagcaacaacgtgtacattgaattaaaactttgatatccgaaacacggatagaattgcagagttcattggaagcttcgcatccgaaagacaaaatcgtgtaattttaggaacctgagtgcttgtaataaaacgactgcaatttattagctctgtggcctttaccaactcacgtgacctttccaaatctttttttttctttgtaaaccagagacaattacgccgtccaccttgtgagtctgctgtacagatgacctgagatgttcctatcaaagtgcttagctcaggctaggagctgaattctcctttcccggtcatttgagcacagccttgcccctagagccctcaggctcagaga

SEQ ID NO: 93623 - DNA, 54039 bp, Homo sapiens
agaagcagctcctattataatctcccttccagcctcagggccagggatttgagagcagactccaactaagctggtctactcattcttcctctctcctaggaccctctgctatgctcttgaacagggaaaatcctatgaaggaaggaaacagatttggttcggaaactactcccttattgcaatcagctttgtctctgtcaggatcatggtgtgtgtgtgagaggtggatgagacagttaggtaggtgactagataggtgcataggtaggtagataaaattccttagcagcaagcaggtaattctgaaggcagggactcagggatgggtctggatatccattccatgggaggatttctggctcacaggacacggtaccaacggtctttggtcttatacttcagtcaatattaggaatggaacaacaaagaaaactactaaattggaccaaataagagctataaaggagatgtttctaaaggattgtggtttcttataatgtcaaactaggttccctcctaagttccacaccctacagaccattttcctcccaagtttcacattgcaagrtttgaagaggaggcagattggagagttttacgttacatggttacatggaagggaggggctgtctgggttttggttagcctgggaggctttgcgaatatcactcagtactcccattgcttcctgtaaatacaaaggaatccaatggcttccaaaaagagagactctatacaaactaaccattccaccaacatttatcaaggccttggctttgtatgtggcaagcactgtattaagctctggggaatacagcgagtcaatacagagcagtcactcaaagaacccagtcgggtagaggaggcagcccagtcaccagctgtcctcacccaggagaagtgctatgatgactgccacttaccacctgtggcaccaagggcaagccactcaacttctctgtgccttgcttttagcacctgtaagtggagacaatagtagtgcctctccccttggaaggatgtgaggattaaatgaatgaatgtactaaagttcttagatcaacgtaagactcaaagaaagtgccataaaagagtttgtgagccaggcacagtggttcacgcctgtaatctcaacactttgggaggccaaggcaggcagatcacttgaacccaggcgttccagaccagccagggcaacatggcaatatctcatctctagtaaatatacaaaaaattagccgggtatggaggctcacacctgtagttccagctacttgagaggctgagatgggaggatcacttgagcccgggaggtcaagcctgcagtgagctgagattgcactactgtactccagcctgagcaacagagtgagacccttccctaaagaagagcttccacttattggtggtgatattgttattgtggtggttactattgggagaaagcttccctaaccctatgctttcctgaccagaaagccctctcagtggaggttactcactctgaataccaatgaagcaggagctggtcaaatggctgaggggatgagagaagggggagggagaggagagagaatgaggggagggaataggacatagggagtggcacacagaggcacagaggtgtggtggaacacagaaggtatgaaagcagaaattggtggaattcaatcatggaagggaattggaagaggagaatctggaagaaagagttaaggatagttcataagggataaatcataaaaggtctaaagtattatgcaggccaggtgtggtggctcacacctgtaatctcagcacttttggaggctgtggcaggtggataacttgaggtcagaagttcaagaccaggctggccaatgtggtgaaacccagtctatactaaaaatacaaaaattagttgggcatggtggcgcatgcctataatcccagctactcgggaggctgaggcaggagaatcacttgaacctggcaagtggaggttacagtgagttgagatcacaccaccgcactccagcctgggagacagagctagactctgtctcaaaaataaaaaataaaataaaaataaagtatcacgcaaagattttggatttttaaaaaccaatttatagaaaaatcttttccagaaatttgtgaagtgcttactactatgtattgtcaaagtttaactaaacaaggaaacagaaaaatgtgctcaatggtcagtttctgatactaagaatggagaacaaagtggaaggtcccatagggacctagatctggctgtaggtccatggagttgtgttgactgtgactgatttcccatagcttcttttctcagaacctgaagtggctcccctccacccacatggcataataatagcctacattcctaatggcatcaagactgtggtacagtctcctacaatcctccctaatcccatttgtccttacagtcagagccctgacatttggttctggtgtccaccactctctagccagccagaactcaggggacaaattctgattagcttaaaccattcacataattctatcccctttcctattgattggctgaggtatcaatgcgcccttgccacaattctggccagagacataaggggacccagaagacctttgggaaagtcttcctctctctgaaaaagaaacacacaagatggcatggactcttcttcctctgtgtgtcgtgttggtgtttgacacctggaattctgtaccttctagagtcatctaacataatatcttacatagtacggtgagataagtttttgttccattgaaaactgaagatttataacaacttcctgtgaaatatgtagggtggttgttatcatttggtagattaggaagccaaaagaaatgaaggggcatatatgaggcctaaagaatgtgcagaaataaacctaggtctcatgaatgtgtgtgtttctacaataccaggatgcttctcttaaatcttaccaaatacagaccaaaaaatatcaggcacagcttcataaaggtttgcctttgtgctcggacaacaaagcaaggtatgaaggtgaactaaactgtcagattagattaaaatgcctttttgcatttttatcacaatgtataaatcatctgaagctgagctaaaaaaaaatatgacaagatgatcatgttttttcaagatgaaagattccctcgagtctgagtgacatagctactccaacagtaaataaccaataacagagttcccagccagtatgcccaaagcggtgaggtccttggggatgcacccgttgtctcacgctttgaggagcttcctcagttcaccccagtgtgccatacacatgtcaccactatttacatgtggcaacacatgaaatacgtatgggaagcacacacttgtctggccatgtctctccctgtctctcacactgctatctttctcagactctccatttcagtgaactgatctgttcactgtcccacagatgccttctggcttgaggacttgcccctgtgattcctcttgccttgaatcctggaccttcccctgcacatttaaaacaaaaattttcaaatctcacccaaagtgaactcctccagtaaactgttggcttgcataatgaaagttgcatcacacaattaaaccgcttggactgcatatgctaacgcattgcacatgttattctttcctctgcatgttctgtctctccaagtagaccataaataatctctctgaaggctgttggaaagagccttcctcaaaacaaataatttttaatgtctattgatcactgatacttcctactgtgttcttattttctaaactgttctatcttgtcattgctgtgaccactgatatgatatagaaggtcagagcctttgattgtgttttttttcccaaccaaaatgatttctgtgtccacagattcacagaagggaaaaatattattaaaatgggatattaatgaggactgaaggtcttctaaatattctggggatataaaatattcttactcgtaaaggatgcctctacacggaggaagtatccacagaggaaggaaatctttgccattacttcttactgggaacatttactacagatagtcaaattttagtggctatattaagatttggggaagagcagggtacttttaatctcaagccaccaataaacctgacatatttgccagtttagtcataaaacagaaaatcctttgcctaatcaaacttagcttaatagttccttcagaagcaggcagggccaagaggctgagtctcgtgtttctggaataatgtggcatgtgtgtgtgtatgtgcagtgccagattgggacttggccccctggaagtgactgagccaggacagggaagggatctattgaatggtctggggaacagggctggccaagctcatggtccctctgaggtcagccctcccaccctcaaacctcctcccactccacccacccccaggaaccctcccacacactctgggtaaaacacagcttggcaagctctcacatcatggcttggtggctacagtgtgttgatcttccctcaggaccaaccaagaaagctagccttggtgcttctaaagctgccagcctcctaagggagtattcctatataggaatatactttgagaagctgataagacccctctaaatatttgggaggcagcctttgaattaaattatttgcctgctgatgtcaactattagagtgctatttaaaagttaaaacccaagaggcatatgtaaaaggaaataagtcaaatcaatcatttatctcaatatcagagtaattcagaggaactcttaattacatacctccaagagacttgtgaggtcaactccattctatctgctgcccttgaagctcagctggagtccctcaacaccccgattggaggatgaactctagcatagggaattctgagatggagggagggggcgctggttcaggatgcttggaggttctagaaagaactgaggtcacctggaagatacaacgctactctaaaaatgattcaggatggcttttctatgcattctctactcccataggaatcaggggccacctcccaggatggaatctgcctgatgctgtaacagtgttcagctccccaatttccccatgataacaggcaacctccttctgttttgtctacagttaattaatcagtcattgctgacagtaaggctccatcctcaacacaggatattttctgaagcattaatttttgtttcaatagttgatccttgtttggaatataatgtgttacaatgyagtggtacttagtattaaaatcaaaatacctttttattcatctttcaattttaatacttttagcatttcaaccattatttgaagggttacttactgcagtatgtcacatttatatacacacatgcacatgctgcagtgctttcagtttgagccagtgatattttaggccccaaatgctctgaaaaaatagagaaagctctcaccaagctaaggaagtgagcttgcagaccatgcctttaaaaattttcagcttgataacttagtcctcaagatgactaggtttctcttcccccacccctcagttagcatgtgcgaacaaggattcttttgaattcccaggaggggaatgagtttaatttgactggtaaaagtcttcctaataggatacctaatactgtggctcttagaactagctacaaaaatatttcatatgtttatgtctcataatgggtaattttggtttggatttatgtcattttgtctcagtatcacaatttttgaaaaattagttcaaagagaaaaaaaaaagaaaagaaaaaccatggtaaacattgctcagtctcatactcctaccctctctatgctaaaacaggaaatgcatttctgacacttttaaaatgagcaatcacacgtataatcaacttggttaaaacttccttcctggtaactgcaacacttcctctgcatctggatatgaagggagccccagaaaagcggaagaatttagacgcacactgggtaggtttgaatttgttttgttttcaaaaattaaacaaatgatccttcagcatcatcgcctccgctgctttatcaggtattgcttccttctattttttgctctttgtggggtctgactcggaatagtggcacttccttctcggctagattatctgaaactgttgtcggttcttgagatgatactaccaccgaatgtctgtgtttcattgtctagtccaacctgtattgtggatatctacaacgttccggcaatagttttgcaggtgcatcacatttttgtttttgttttgggaggaaaagggagggcacggcagccaggcttcatattcctacaagtgcatgcttcaagattactgtacttacagtgtttccaacatcttctcataaaaggggaaagcttcatagcctcaaccatgaaggaaaccagtgagtattagtcagcctgttttcctctgcatcttataagatcgtttggtatcactgaggcagaagttattgctgtgtatttatatgctgcctaaatttggacatgttttatttcaagttagtgtcaatatcaaygtatcttacagttctcttctttgttagttattctataatgtagcaaaagaccaaaatgaatgttttaagccacaagagacagttctttgggacrgttggtttcacttactaagtataacttcatattttaagagagggaatattggttttaaaagttaagccaagatttgaacataagwttggatcaaatgaaatttgtctttcttatcttcttatcaagctctcctttttggtatacatcaaatgctccactatttcttaaggaaataatgtagttttaagtctaacattagttatttaagagagtaaacgatattttctgaaacattaattttttgtttcaataattgattcgtttagaatataatgtattacaatgtagtgatactaaacattgaaagcaaaatacctaatctttcagtkttaatacctttcaaatttcaattattatttgaaggatttcctattgcagtatgtcctatttatacrtaagtgctttgtgaagggtaggtacttactgaattttgtggaaagagtgagtaggttaatgagaataaatttgtgaatttgtgttacaaaaatgaaaatattagagcaaaaaagaagttaaatgattgggggtcttaacagaaggtcactggagtccagaaatcctgccttccatcctgtagctcctccattattaagtagagacagatcaaatgaatttwaattaattaattawacaatgttaaaattacctaaatgttcctattgggagagtacagccttgggtgactcttctaagatactgccctaatatagcagtgacagccagaatgctgacaaattccatgattcaaaattttacatatctgcaaatggttttgactgtaactttactaattccgatatgttttagctttacaaatgaaatgacttgctttcctaattagaaagaaaaaatgaaaccaagaggcaggaaatttattagggagtagatcctaggtccaggcagtttgaaaacaggcaacgtgaagcaaggctgggtgaggtgtctgggttccaagaagtgtgagacttaacaaagaggaagtaagttaaaggcctgttttcaaagtgagattttttggcatctcgtgttgcaccttgtaaactgggacttgaaccttaactgtactattttagtaatctatatgtttcagtatgtttaagaacaatgtccattctgagccattataatgtgtcatgcgctgtgctggatgagtgttttacctacctctttaaaattttcaaagtatacaaaagtagaacgaccaataagcccccatatacctgtcacccatattgaacaagtattactttatttaactctccctctggggcattcattactaaccagtttgagagatgagaaacaggctcagagattaagcagcccaaatcacccagaaagtaagtggctgggccaggactcaccggcccgactccaaagcccacgctctgaagggctgtagtgcttccagtttaaaatacttggtccctctgggtccctgtgcacatgtacgccgcctatacctcctcttccctcatctcaccagaaaatataaggggaaagtgcctttcttgtgacaaatccctgtgtccctccgctcccaggtcgcatagggcatggagctggagaactataaacagcccgtggtgctgagagaggacaactgycgaaggcgccggaggatgaagccgcgcagtgctgcggccagcctgtcctccatggagctcatccccatcgagttcgtgctgcccaccagccagcgcaaatgcaagagccccgaaacggcgctgctgcacgtggccggccacggcaacgtggagcagatgaaggcccaggtgtggctgcgagcgctggagaccagcgtggcggcggacttctaccaccggctgggaccgcatcacttcctcctgctctatcagaagaaggggcagtggtacgagatctacgacaagtaccaggtggtgcagactctggactgcctgcgctactggaaggccacgcaccggagcccgggccagatccacctggtgcagcggcacccgccctccgaggagtcccaagccttccagcggcagctcacggcgctgattggctatgacgtcactgacgtcagcaacgtgcacgacgatgagctggagttcacgcgccgtggcttggtgaccccgcgcatggcggaggtggccagccgcgaccccaagctctacgccatgcacccgtgggtgacgtccaagcccctcccggagtacctgtggaagaagattgccaacaactgcatcttcatcgtcattcaccgcagcaccaccagccagaccattaaggtctcacccgacgacacccccggcgccatcctgcagagcttcttcaccaagatggccaagaagaaatctctgatggatattcccgaaagccaaagcgaacaggattttgtgctgcgcgtctgtggccgggatgagtacctggtgggcgaaacgcccatcaaaaacttccagtgggtgaggcactgcctcaagaacggagaagagattcacgtggtactggacacgcctccagacccggccctagacgaggtgaggaaggaagagtggccrctggtggaygactgcaygggagtcaccggctaccatgagcagcttaccatccacggcaaggaccacgagagtgtgttcaccgtgtccctgtgggactgckaccgcaagttcagggtcaagatcagaggcattgatatccccgtcctgcctcggaacaccgacctcacagtttttgtagaggcaaacatccagcatgggcaacaagtcctttgccaaaggagaaccagccccaaacccttcacagaggaggtgctgtggaatgtgtggcttgagttcagtatcaaaatcaaagacttgcccaaaggggctctactgaacctccagatctactgcggtaaagctccagcactgtmcagcaaggcctctgcagagtcccccagttctgagtccaagggcaaagttcagcttctctattatgtgaacctgctgctgatagaccaccgtttcctcctgcgccgtggagaatacgtcctccacatgtggcagatatctgggaagggagaagaccaaggaagcttcaatgctgacaaactcacgtctgcaactaacccagacaaggagaactcaatgtccatctccattcttctggacarttactgccacccgatagccctgcctaagcatcagcccacccctgacccggaaggggaccgggttcgagcagaaatgcccaaccagcttcgcaagcaattggaggcgatcatagccactgatccacttaaccctctcacagcagaggacaaagaattgctctggcattttagatacgaaagccttaagcacccaaaagcatatcctaagctatttagttcagtgaaatggggacagcaagaaattgtggccaaaacataccaattgttggccagaagggaagtctgggatcaaagtgctttggatgttgggttaacaatgcagctcctggactgcaacttctcagatgaaaatgtaagagccrttgcagttcagaaactggagagcttggaggacgatgatgttctgcattaccttctacaattggtccaggtaggggatgttggtgttatcaatggaagccttctcaaaaggaattgatttgcatatgcacaggcactccattcrgttgtcatcaaatgccctttgttcagagcttcatcatcggcaaaagtagatatgatgaagctgcctcaaaaagtagtaaactgttccatgtacatttttactgtctcggagggtttgctgacaagggttttgcagacattagtacttcacgtttttaggagaattggccctgtgggaatactttgttctcatttattattttaatgatagattgcacttactgaatgctttcttgtgccaaggctccaagtgactgacatgctttcagtgtattatctcatttaactcttccaataactatgatggaggtcaaattgacatttgcactttttacatgaggaaactgaggtacaaagaggctaagtaatgtgcccaaggtcacatactttgaaagaggtagaccagaattcaaacccaggaggtctccctccagatcctgctcttttcactaccccaaatccttcacaaatccaccaccatatccttcatcagtctggtgtcaggattctggggctagagataaaaggtcttattctctgtgtatgtctgttacagttcacagaataatatctcatatctgggtagagtcttgaaagctcctctctgcagataggtacaggactgtatgtatttctgctccgtttctcatgatgttccctggggtcctgagaggacaagtgatttttctaaggtttagttaagaagttaaagaaagaagggggaacagttcccctgctcactttagcagttctcaacttatattgtactgcttgacaagggaaaagaagtaaaggaatttgaatagaaatgctattttagagcacagccttcattcattaattcaacaacatgtactgagaagactggcattaaatgagtacacacacaaatagatgtttaataccaaattgtgacaaatactttagggaaaactataccgtattatgagaaaacagtccaggggtccaagggacacttaattttgattaagagaccccgggacagttctgagtaagtgacatttgacctgagatctttaggattagccagactaaattttacacactaaactatctaatcactatccgtatttataggaagttctggagttttctgataagcattttggatagcctcaacttaaactctcaatcttcaccttcctgttagatacttgaaacattacatttggctttgttttcatccattaaatatattcagtagttttttcactagttgagatatttgtataacactaaagaattttagaawaattaaagaatcttcagttttctagctctccataacagaaacaacatgaaaaaaacttggatgagctctgttgcaaaccccaaggctaacaggaattatttttcattgtcatgttcacaagtaaactttaaagagctggaaaatgaataatgttctttttagaaatgtgttaaatgaaagaggtcaatacataatattaacattgaatttgtggtcttaaatctgaagaagaatagtcatttgtaaaactacttgagacattttcagctatggctaaatgactcattcctgatcaaaatggtctcctagttgagatctgcactgtctttacagaagtgaaacctgaagaaggtcagaaagactcacatctggcttagaaacttaaaacattgcgaaaatgagtactggtggctaaaagaccacattctcagaattaaggcctttgatgcagctacagtggcacctatttgaccatacttttgaaaagcatttttgtaaacacttgtataattgaaacatgatgaagccactagtgatcatgtccaaactggaaaaccagaggaagaattataaatccttccaagaagcctccagttcctaaaatataaactagaatgtgaatttcttccgttccttaggaaaaaaggatacaccatttctattcataaagtgtatactctgagatatttaatattaagtctttcttcatgtttacatatgacatctatcctctaactttatatatgcttttataataatctgaacaatgtttgttagtgttgctgcttttaaaattatgaactatttcaaacttacagaaaagcacagagaacaatgaaayacctatgcactcacaagatttaattgtgttttttacattttatcagttcttcctcatcagtaatggagctgtactaagtcaatattctctaacatcagccaagtgatatgaaaattactaaacactaaaaatgaagatcaaattatacttaagaaaacataaaatcagggacttttggacagaaagctctgtacacaccacagtgtggcagagggtagtgattgctctgtgtggattgatctagagccactgtttacttgtagttaaggacctgtgagacagttcagtgacttgccagtgagatgccgaaaagggaagctatagggcttttaggatctttccatctaacaaatatttttctccttacgtgtattatactatatctccactgtccattttctttctcacattctctcttaccttccactttatagattggttacagtgtctccatcttccccctctacccctccaacaaaaccagtaagacctaattagagcaaattccctcacctcttcacctttgaatttatcagcagcacatgactgtgagtcaaaagtttcatcctctaatcccagttatgtcatcggctgctctatgatcttaagcaagtggttcagtctggtcctaagtgtcctctaacagacaggattaaacttaagtgactgttaagattttcatctttctagccgtgaagacccagtaaagcagagcaccagttcttctccatttccttttccctgattcaacgacatagagtacagtcctacaaatgccaatgtgttcttcctttaggctgtgaaatttgaaccataccatgatagygcccttgccagatttctgctgaagcgtggtttaagagtaagtacttccattttgataatagcgtgaaattttaagttgccaagaattaactggtagacctaaagcattagtcataataatttcaactttcttgtacctgccctcagaacaaaagaattggtcactttttgttttggttcttgagaagtgagatagcccagtccagacactatcagcagaggttcgctgtgattctggaagcctatctgaggggctgtggcacagccatgctgcacgactttacccaacaagtccaagtaatcgagatgttacaaaaagtcacccttgatattaaatcgctctctgctgaaaagtatgacgtcagttcccaaggtacggtggctatattttctgtgttctctttccaaatgccttcatctccaaatgccattgttcctataattctttttcttcctggaatccaagttgcatcctcctgaaggcaccaagaacacatttttgagttttctgtctgcatggagtaaacaaatttaaagttctccttttacaagttcataatttttaactatatatttacatattcttaactgaaaaattaagcagcattatgcagatgtaagatgtagtttttaagaacagttgcatacacaaagattagatatttccaaatctttacctttttcttcacatctctgaatatgcacatacagttttcaagtttacagtcttataaaatgatgaayttttgagaggctattttaattttttggcatttcttcatctatatatctcagagtgatatatagagatacattcattcttccctatctggggtcctacatctgtaaattcaaccaagcatggatagaaaacatttgggaaaaaaattgcatctgcattgaacatgtacagactttttttcctgtcattattccctaaacagtacagtgtaacaactatttgcatagcatttacattgtatcagatattataggtatctagagatgatttacagtatatgggaggaagtgcataggtcatatgcaaatactataccattttatatcaggggcttgagcattcatggattatgatatctgcaggaggtcctggaaccaatccttacagacagcaagagacgactctgtatctgtgtgtgtgtgtgtgtgcataaaggtaataaacacacacacacacacaccaccttctctctcaagctgtttccaatatcttattcctaccctaagaaaacctgcccctgccctaggaaaattaatcactccttctctgtatttctgtagattttgattgatactacattaaattaaagtctttaacatatcttcctggtctggtaaactgtatcaaccttgaatctagagaatatctctttttcatttttatatacctagacctagcactatggctcattacatagacacttcatgtactcaaccagtattttaaactcctgaatatttaaaatttctttctccctttgattcttacaatgcttcctcctaaaaatgatgatggtaataataatattttatttgcattttaagaaaggaaaacatttgtactgaccctcattctgtcagtcatccagtaatttttaattcacatattttgcctttagaattttaaggctgtcacatccatcttctctacttctctacagaacctaacttcctcttctgaaaagaaattacagaaccctaaccaaattccatgtattattttcttaaaatgtctgttcctcaaatcagatggtagtttaaagtttaatgtgctggaaagaaaactacagtattaattccttagcatcaccctcagagcatacttctctacttggattgtgttggtgtctatgtgttatcccacatatattcacatatttctgtcccctgttgtagtatgtgtacatggttatgttgctcaccttaagcccaatgtatcttgccacctcatatggttagctcctcaaaggcagggcccacccacatttctcctgctctacaccagaacaaatatatagaatgctatgaataaatgtgttctcaggaaatgtaatagataatattgatgatttctggaactcacataactcttgtgtacttttgacaattacagttatttcacaacttaaacaaaagcttgaaaacctgcagaattctcaactccccgaaagctttagagttccatatgatcctggactgaaagcaggagcgctggcagtaggtatcacttggatgtctccatgtggtctttatgtcttgaagatgtctaacgtgcttgctggggcccagtacttaaaagctaatgtttatgcagagacagggaagctggagagtctctggatgggtttctcataagcccttgtctaatcactggttatgaaagcctcaataccagataatttcccttccatattttttaaaatcagcttgagatattctttgtatacaataaaaattgtccatttaaaatgtagaattcagggaacaggcgcggtagctcacgcctgtaatcccagcactttgggaggccgaggcaggcagatcacgaggtcaggagttcaagaccagcctggccaacaaggtgaaaccccgtctctactaaaaaatacaaaagaaaattagccaggcatggtggtgcattcctgtaatcccagcaactcgggaggctgaggcaggagaattgcttgaactaggacctaggaggtggaggttgcagtgagccaagatcacgccactacactccagcctgggtgacagagcaagactccgtctcaaaaaaaaaaaaaaaagtagaattcagtgagttttgagaaatgtatacaattatataaccaccgccacaatcaagatctagaacatttccatagacatgttacagaaaaagttctgtcatgtcccattgcagttagtcctttttctcctcccattctctgtgataatgcaacagatctactttctatcataaaatgccttttctagacttttattaagaggaatcatatagtatatagttttatatctgaattattttactttccataatgcttttaagattcattcatgttattgtatgtatcagtaatttgtttctttttatgacttagtagtagtcccttgtatggmtataccacagtttgttttccattcattttttgagtaaatgtttaacagtggggtagttgggtcagatggtgtgtgtgtgtaattttacaagataccatttttccaaagtggttataccatttaaattccagcaatgtatacgatgagttctagttgtttcacatcctagcaagcacttgttatcatcagttttttttttgttttttttttttttttgagacggagtctcgctctgttgcccaggccggactgcggactgcagtggcgcaatctcggctcactgcaagctccgcttcccgggttcacgccattctcctgcctcagcctcccragtagctgggactacaggcgcccgccaccgcgcccggctaattttttgtatttttagtagagacggggtttcaccttgttagccaggatggtctcgatctcctgacctcatgatccacccgcctcggcctcccaaagtgctgggattacaggcgtgagccaccgcgcccggcctatcatcagtctttttaaacttagccattcaaatgagtatgaagtggtatctcactrttgtttttatttgcatttccataataaggttgagtgtctttctatgtgctcattttccattagagtacattcttctgaaaattttctattcaaatatttcaccagttttttaggtgggttgccttctttttttttttttgagacagagtctcgctctgtcgcccagggtggagtgcagaggcacgatctcggctcactgcaagctcctcctcccaggttcatgccattctcctgcctcagcctcccaagtagctgggactacaggtgcccgccaccacacccagctaattttttttttttttttgtatttttagttgagatggggtttcaccgtgttagccaggatggtctcaatctcctgacctcgtgatccacctgcctcggcctcccaaagtgctgggattacaggtgtgagccaccgcacctggaccttagttttagttatgagagttacttatataaactggatacaaattctttatcagatatacattttacagatattttctgttagtctgtggcttgcctttttattttcttagaggtgtctttcaaagcagaagctttaaattttgattaagtcaaatttgcaactttttcttaaatggtttgtgcttttagtgtcttatctaagaaatctgtctaggactagcacagtgtctcacacctgtaattccagcactgtgggaagccaaggcgggaggatcacttgaggcaaggagtatgagaccagactgggcaacatggcgagactccatctctacaaaaaataaaaaaaaatagccgggcatggtggcacgtgccatagtccccactacttggaaggctgtggtgggaggatcacttgagctcaggrgtttgatactgcagtgagctgtgtttgtgccactgcattccaacctgggctacagagcgagaccctgtttcaaaagaaatgaaaaagaaatctatctaatccagtgcctcagcctggggtaatccctctgtctgccaagggacatttggcaatgtctgaagacattgttgatggttataactgggagaatgctattggcatctagtgggtagaggccagggatgctgccaaataccctgcagggtacaggatagtcccccagaaccaacactatccaccccaaaatggcaacagtgccaaggttaagaaattctggtttaactcaatgtggcagatattttttcttagaagggttatggttttaattcttacattgaagtctgcaatccaatttgagttaatttttgtgtacagtgtgaggtgaaggtcagagttcatttttaaatatgaatatccagatttttcagcaccatgtgttgaaaagactgttttgttttgttttgttttgttttgtttttcctggagaactaccttggcacctttgtcaagtatcaactgaccgtatatgtgtgggtctacacctagattctctgttctgttccactgatctaaatgtctgtccttacatcaataccacacattcttgattatgtttaaataacaaagcacttcatatacgtgtgcttatacaggcaacagtatacttccattaaccccygcatcctttgcattatttttattatgatttcaacttctatatatgttataaatggcacaataagttactatttttgccctaaacagttaaaaaatagacttaacagacttaatagatgaaataatttttaactattcacctacatatttaccatttttggtactctttattgccttatatcggtccacatttccttgagcttctaacatcttttctactgcaagtttgctgacaataaattctttcagcttttgtttatctgaaacactttttattctgctttcatttttgaaaaatattttccctgaatatggaattctagattgactggtttttttctttcagtaacatttttttctggcttgcatattttctgatgatgagtcttatctttgattgtgtctgcataatacgtctttttccccaggctgtttttaagattcttttttatttctggttttcagcaatttgattatgatgtaccctggtatgggtttcctttgtgtttaggctgctggagtctatggagctccttgaatttgtgagtttatagtctatcaaatttggaaatttttcaaccaattttttatgttgcctcttttctctcctctctgagacttcagttacagtaatttagactgctggactctgggctcagtctggatttccttcctctgtgctgtagcctagaaacagcccccaggcagtaatctggggcaattacagggctcacttcatttgtcttccttttcttggggatcacggacctacactgcctgttcaatgtctgaaaagagttttatatattttgcatagttttctagttgtttatggcaggacggcaactcccgtagcagcgaagccacatgagaagatgaggaagttcttcccctgaatgtttaattttatatacaattaccagcaaactggccctatagtaaaagcacacactatccactgtccattatttaaagattggtaggaattatgacatattaatacagtttcaaattgtgtttgcttctttaaatgactacatcacaattttgatctgtggtgaactcacctttgcctgaaacacctaccttttttatgtttaagtgagtaactgccaagccacatttcccctgccttgaatttatttagatgtatgaggtttagggggagggcgtgttgtacctaaatgccagattttccatttatttctgttaaatttcatctgcttagatgtagcctattgcatctgattctgcaataatagtttttttgacattgtggtagcattagaattcttttttcaaattaaatctcagaaggcggacaaatataatagccaggttgctgtctattaaagaggatgtgggagtgtcagagctctgtgtgcgtggggagggtgagatctgccatacctcttaggcacttccaaagactcttgtggttctttggagcacagtttgagaggcactggtttaagagttgtgaattcgctctcacatggcatttccagatttgctcaaaacaacttctgtatttttacccaaatattgaaaatcattctccaactaggactttgtccttgttgtttatagtgatgttttgcaagagaatttgtgtctccaccatgtatattcsttattcattgtgtgtggggaayatgtgactgcttccttacagattgaaaaatgtaaagtaatggcctccaagaaaaaaccactatggcttgagtttaaatgtgccgatcctacagccctatcaaatgaaacaattggaattatctttaaacatggtgatgatctgcgccaagacatgcttattttacaggtatgctaattttaagattgttttcaattatctgaaaacaattctatattacatcaaaaacatgctttctcctrctggctctattcccastctcttctttcaagtgatgaattgtgatcaaatattacatcatagagagttttcacttggggaatttggctgcagactattagatatgcaatctaatgagcattatggttctgtccaagttgcatatctaacactcccaagtagccagatatacctccctcacctaatgtcttttttatacaccccattctaagcttgataacatagaaaatagccatatttatccccagcactcacttcattcctgcccatagacatgtctgcacatctctaggcactcttttagatacatctcctctgatgcacataaacaaatcaagcaaatgattttatgggaaggagaaagatgaacaagtaggtcaccacagaaatcctgcaggtaagtgacaagagtgaagtactgtyagggcagaaggtgaatggtcaatatatcagtgctaattattttcatattttctaacatttctagataaactttagcttcacaagtctgtaaagtaatattctccagattctagwtggtcagtgttgtagaggtaataatttctaatacttaatatggtttatttgaagtagacaaattacattgatttcaaggtagcctatttaaaactggtcatgtttccaattgtaagtttctgtttttacttatttctaatatagaaacaggaatacctttgctttgcctttgctttgctttcaagaatgatctatgttttgtccaggaggtattttagaaaagaaaaagagaaatccttcaaactttttgcaagtttattaaatttcaaataaatctgtagaatattttgaattgtttgaagatggacactttaaaaacacaaaaattaccctgttggtcctctcattttgagtgaaagtttgcctttgccctttatgtactttgtggttttgtttttttttaatttttttaagatgaggccttgctttatcgcccaggttggaatacagtggcacgatcacagcccactgcagcctcaaactcctaggctcaagcaatcctcctgccttagcctctgaagtaactaggactataggtgtgcaccaccatacctggcaaattatattttttgtagagatggggtcttgccatgttacccacgctggcctcaaactccttggctcaatgaatcctcccacctcagcctcccacacaactttcacagtcttctccttttctttcccttcctcataagaaaaccaacagtgtggacctggaaaatagctctctggtcaaaaaaaacctctctgcccttcactcaacaaaaacatagcctttccttctctgggccaggcactagcccacaatctccattagactcttcatccttctataggaatgatcaagattgtgaaagacaccatgacaattgccaaaattgctgggattctaggcacgagccagttaatcgccaaaattgctgggattctaggtgtgagccatcatgcccagcctactttgtttatttgttggggcacatagtttggcagctaagggcaagttatttaagctctttaaggctttgttccttcacctgtagaatgggaataataatcctatccacattatagggcaatgcaaggatcacacataaagcagcaatcagtatatattcgctatcattatcatcattgtagttactgctgctttggttattgcctttgataaatatgtgtaaggatgttagagttttgtggtaaaatagacacaagtaaagcagaacatttgaacagagaggtgatgaaccacagctaaaacccactccaaaagaaatgtattggccaagcatggtggctcacgcctgtaatcccagcactttgagaggccaaggtgggcggatcacttgaggtcaggagtttgagaccagcctggccaacatggtgaaaccccatctctactaaaaatacaaaaaaaattagccgggcatcatgatgcgcgcctctaatcccagctactcaggaggctgaggcaggagaatcacttgaacctgggaggtggaggtggcagtgagctaagatcacaccactgcactccaggctgggcgacagagcaagattccatctacaaaacaaaaacaaaaacaaaacaaaacaagaaatgtatttatcctcttccccaaggtacatttcggaaaacaaaattaacaagctcacaaagaagagaaactttagagtaccagattgaccaataaacgtacagttgttacttatatgttttacatttactcttatattttgtgttactagatatgattgctatttttaagggagaagaaaaatatattaagttaatatatatataatataaacatttctgtgtttcgatgcccagattctacgaatcatggagtctatttgggagactgaatctttggatctatgcctcctgccatatggttgcatttcaactggtgacaaaataggtatgtagttacctcaggagatgaatagacctctcagctcgtttgaaaagattataattccttcagtgtagacatttaataactgaaaaatcataatcttaatctgtataaaaaggaagaaaacatttctatgctggtgaatgtgactctcaatttaatgtggatatattgaaaatacatgaatgcatgattcaaatccctgtgactatacatggaaatgattttagtaagaacttgttccctcctctttccttctccatctctaaactttaactcatttcattacacattaaacttttctctcacaaaaaacatttaaaaatagatggaaagatctgtcacttattttagtattccagaattcacattatcaaagctattacacactctactatcaggtatttttatagacattcagcattagtttcagtcaaacatatgtttattcaagtttctgatctgagaactctacaaaaccatttacatttaaccctgtaatttaaaaaaggaaaaggcacagattgccatctgaggaaggatatgctcagcatataaatgcttttatttattactattcaaaaccagccctttcctcttgtcattctgggatattgaaaacatatcccacacaacttccatatcctccttctttcctttctattcctcataagaaaaccaatagcatagacctggaaaatagctctctggtcaaaaaaaaaaaaaaaaaaaaccctctgcccttcactcaacaaagacatagcctttcctcctctgggccaggtactggcccccartctccatcagactctgtgcatccttctgtaggaatgatcgagattgtgaaagacgccacgacaattgccaaaattcagcaaagcacagtgggcaacacgggagcatttaaagatgaagtcctgaatcactggctcaaagaaaaatcccctactgaagaaaaggtgagctcatgctttttcccagtctaatggctccttacaagttgtcatttatatagcagtastggcttcaagttttcagagaatctgccagtgtcttgcctcctgacatattagtgaagttttttacttgtgaaataatggaggttttaagtaccctcccgtggtgacagcatatctgtgtgaaacagaggcactcagttcaggactccatgagcatttgcttctcttttgattatcaggcatactttgcttaaaatttggttctgtaaaataatctgttagcactttttatggctatctatttttgttgttcagccaagatatttagttaccatgtataaactcttacgtacctgggaaatacaacatacacaacaaagtaatttataatttactgctgaactctaatctaaatggtaaatcatggatgctgaaaatgtcacttccaccattccttggaagtgcatatgctcaatccttcacaagctgtgttttagctgtttggctgtcgtttaaagttctgctgcacaggattagcacttctcatttgcatggttagcagccttttggggaggaaatataatgagtagcacttattaatctgttatacatggggatctgtgaacccaagcatactcttagtggtcacaagcaaaacatgttcacaaatgaaggagaaattaccatgggttctatatagttgttggcaagtgatgcatggagaggaagtgaaccctttgattaaattactgttgccctttgactcttgtttcttcctcatgccattgtgattcactgaatcktcacctaaaatataagcagagcaatgagaaagttggcaattcatagatataatgctaatgaaatcaggcacaactaacttgctctctgaaaatggtttccagaatattctctttttagaagtcatttgtagattcatgatgctttttgtagttagaagacaactaatattcaaatgcattttaattagtttcaggcagcagtggagagatttgtttattcctgtgcaggctactgtgtggcaacctttgttcttggaataggcgacagacacaatgacaatattatgatcaccgagacaggtgagtttatttagtgcagaataaacytttattgtggtaaaatatatataacataacatttactattttaactctaattaactgtaagtgttcagttcagtggcattacatatgttcaccttgttgtacaaccatcatcaccattcatccccagaatttttccatcttccccagctgaaactctgtacccattaaacactaactccccatgcctccctcctttcagaacggagtagtctttaaatggagtttaagactggagcacatatttagaagtcattgtgtagggacactggtgcttcagttactctagagcagtggcccccaacctctttggcaccaaggaccggcttcttggaagacaccttttccacggacaggggtgggggagcaaggatggtttcaggatcattcaagagcattacgtttattgcacacttttttttcaactcacttgccactataaagcctgccaccagatgcagctcaattttcacttgccactcactgagagggttttgatatgtaaggaattgatttattatggtctctgtgcagtgaaacctctctgctaatgttaatctgtatttacagccactgcccagtgctagcatcaccacctcagctccacctcagatcatcaggcattagattctcataaggggtgcacagtctagatctttctcgtgcacagttcacaatagggtttgtgttcctatgagaatctaatgctgcaactgatctgacaggaggtggagctcaggcagtaattcaggcaatggggagcagctgtaaatacagatgaagttgctcacttgcccatcgctcacctcctgctgtgtggcccagttcctaacaggccatggacctgtccatggcccaggggttggggacctctgctctagagagaccacctcacttgaggactaaggtgtgagtgaaggaggaagaggcaggaaatgagtcttaagaaggcaaagttagagggaccgctggaaaactaggagagggtcatatcccagaagctggcgaaggtgggagtgatcaccagtgacagatgttgcagagaaagaacagaaagaactcatagatatccttaaatctccctaacccactccactttagtggttcactgtccactctgacagtagtcagtagtggccaccaaagcatgagatttttctctatgaatttgggccattttaagagtagagtctggaaaaggcatcagatggggacagattgcttacttcctatgagaattaaaagagataatatatttatggacaatagaaatgataaagggctaaacaaataagatgatgattattgtggtggtgatagtagtagtggtagaaattgacccaaaggagactcaaaatgatttgcttctatcatgctgcccaagtttctgagatcagatgagcttagatacattcaggatggtatggccgtagatggctactcaaaaggaaaaggtgaataacccctgcccccaagcagagtgaaacatcagtctatcctgagttgcgtaaagagcataagagagtcttagggataatgatgacatagtggccagagagtttgatttatgtttctaagaataattttgagatgagaatcttatagtggcatctggctgtcatctaaagaacaccagaaggatatcaaaaacatacttggttcaaagaatgttttgtggctacgactttcacacacctgctaagacgaaaaatatcacaaactgacaaacattgtaaaaaatgctttcaacacaagatagctcatttttaggcaactcaaagaaatattttaaggaacaaagtgctgtgccactgtaatgatgtcagatactttcttctcttaaggaaacctatttcatattgacttcgggcacattcttgggaattacaaaagtttcctgggcattaataaagagagagtgccatttgtgctaacccctgacttcctctttgtgatgggaacttctggaaagaagacaagcccacacttccagaaatttcaggtaagtcacctccttcatcgcctgctgagaatagcaccgaagcagatggttcctgcagcactccgcagccttcacctctcactcagcttggaggccagtccagcctctacccctaccctcttctggcatggccaaccctacctcctccctttcacttccattcattcctttcccaggtgcaaaatgacacttctcagtaatcctcccacctaaaaccaaacagaagtagaaatatttcataagcagtgggatgggcaaatgtggaacaccaggatgatgctggcactaaagagggctttcaggaagggtgtctgctgagcaggttagccactagatatttgtctattcaagaccttagctagaagactcaaattttacacatatttttcagaactcacaaaaggttgtgagcttctcttggtttttgctacaggtgaattctcgatgtgccaactgggcttatctcatttttataaggcagaatacccaatatttcatttgaaatcttgttggtttgaccacaagttctactaagacctctagcttttcctgcttacctgtaaacaagctcctacatgagtctgtccatctccctgagagtgtgtagatcaggggagtccaatcttttggcttccctgggccacattggaagaattgtcttgggcaacacataaaatacactagatagctgatgatctaaaaaaaaaaatcacaaaaaagcctcacagtgttttaagaaagtttatgaatttgtgttgggccacattaaaagccatcctgggctacattcgggttggatgagcttggcgtagattctactggctttccattccttcctggtctgtatccagttttgactatcaaatacttcaaataccaaagagaattaaatactggcaaaattaataacttaatgaacataattcataacagttgtaactactactgtaatatacctatgttatagcaatacaaacacaaaacaaagacaaggaataattacttttatgtacatttgccttgggtgccctttaaatagccacctcccttagtacatcttaaacatgatttgctttgcattgcacatctcagacttgctctcttttccctgagtctcttcttgagtccaaggttacccttgggagacgacatgacccttgaagttcagtagaacaggaagtaggatacattgttttgaaacctgtctgttcttgtttgttctcctgactgattttcaatttggtgattacaagacttaccctcccacagttccagtggtgttgtcagagaaactgagatctctgtggccagatggtcttgtgattttttagtgtgtgtttttctgcataaactcaattgagtttcaggctatttccagggacttgacacatttcagtcctgtttttctttaaagttaaaaatcacatgttttgacaacttcctggaacagagaaatggttccaaaaaaaaagaaarccctggaagaatttcaccatttaaaggggggaaaacactcatgtcttctctcctgtcagyggggttcatctgtttgtctgtttgcttcggacaaacagagcagcaatgaactgcaacttaaagatcagacatacgcaaggaatttggcctcattgacgactctccttttttttttttttttttttttttttgagacggagtcttccctgtcacccaggctagagtacagtggcatgatctcagctcactgcagcctccacctcccaggttcaagcaattctcctgcctcagcctccagagtagctgggactacacgtccgygccaccatgcctggctaatttttgtatttttagtagagacagggtttcaccatgttggccaggatggtctctatctctcgaccttgtgatccgcctgcctcggcctcccaaagtgctaggattacaggcgtgagccactgtgcccagccgactctccttctttttgtatatatgttatcttcctttttgccagtaatttttcctagaatgactgcacatctgtcctgttgctgacaacattcccatagaccccctggtgcccatatcaccccgtcagatcycagcagtacttctctttttttgctgttgttgctatttttaagtttcaaaatatgctttcacaaaaaggtttgcagtatagggaggccaaggagaggtttcttcccactatcggcatcttccacccaaagcaacaaacctttgcggtgaggctttgtgcagtctgtcctctcagtctggagtatttctccatccttagtgaccaaagtttgtttctcaagccattaaaaccttttttactaaagcaacgtttaggcagtgtgctccactaaaaacacacttttgtacatttgttgtacttgtgtgtgtccgtgttttggagtactgttaaacatacgtgttaagcatacatgttaaatgcctgtgaatctgtgcacgttgagccttaagcacacatacagcataacaaggtggttgaaaggatgggctttgtagyggagaaacttgagtttgaatgctggacctgcgacttaataaccacatatatgattattattcatcctttcataacatcagtttcttcatctgtaaagtgggaataataagacctacttcctgtgctttttctagggattacttaaatgaaatattcagaatgcttagcccagtgcctagatcatagcagaaaatcaataaatggtagccgccattgttgtagtcatcacagtgtgtcttcaaactttgaaaacttttaagttgagaaaccatttttgaaatgagatctcaggtaatatataaaacaaagtagcatgctctgcttacagagtaagtggggttccaactccacttacacctgttctgcttccccttccccaacccctctctgcttactctctccctgtgttccctcatccttcacaacaggaaaaaaacctgaacaccacagctttaacatacatatatgcagaatttccaaagtttacagcatgacaaagatggacagcagagtttttcatcatttgactatgaccttgtggtaatttttttttcttttacatactgctaagccttccaaaaagattttctgtttcttggttttatgttttcttttagaattgaagttcttcaagatcagggaccacatctctaaattctccaaataatgtctcagaatcttgtataataaaggctgccatttttagggaagctgggaaatgttgtatacatttgcattttgaattaaaggtgtcctcatttccagtgaatcacttattttgaattgataaggttaactaatacatgctgcgtatttgaataacctgttaggaacaatggagaaaaattgacccacttttttgttaagggtggggtgagcctggtccacaaagaaaaacatacctaactagtggcttgagcatggaagtaagaggaactgaaataagctctactgcatcccacctctctgcttcccaagggagctactttagcctaggaccatagtcacacttacttctagaataggggagagttcaggaacaagctataattagatagagaaacacaaaaccaaggcccagcgtttgaacccaggagtatctattagccattggagcagcatcctacaaacaggtgctaaacaaacacatttcaatggtgacaattttgataaattctccacagaaaaatctcccttatgggaggaataaaaaagaaaagtgtttttactcattggtaatttattctagaccatgttattttaaatttcactgaacagttatagaatatatataataaacaaatgtatttatatcattggcaaatgaaatttggcttctaagttttttaaatgtcagaatgtgttttttattgttctcgttgttttgttttgtttgagacggagtctctctctgttgcccaggctggaatgcagtggtgtgatctcggctcactgcaacctctgcctcctgggttcacaccactctcctgcctcagccttccaagtagctgggactacaggcgcctgccaccacatccagctaatttttcatatttttagtagagacggggtttcaccgtgttaaccaggatggtctcaatctcctgacctcgtgatcyggctgcctcagcctcccaaagtgctgggactacaggcgtgagccagcgtgcccagcccygaatgtgttgttttttaaaattttaaaactagtaaatgttgtttattaaaatcaagagccagcaaaatattgaaaataccaaaagacataaaaattcattatcctgctttccaaagataatactgtcaacatgttagtttctagaagattgtaaattaatcagcatttgcttaaaaactgaacttaagaaatagatatgttcgtctcttcaaattgagtaaggctgattaacatccatgagatggtagtttgtcattctgaataaaatctaaatatccaggcttggcctgctaggccctgtgtgaggctgtccctccagcctcatgccacactgttcccctcatctgctccctcatcactgtggccttcctccacatcttcccccatcccagctacccactgctttcttcccagaatgctctgtgctgccctgtggtctcagcataaatgtcattctgcagagcagttttctaaatcaggttccctcctgttaccctttgccacagtcccctgccaggtccttcattgcatgtatcacaaaatacatttatttgtactggttttctgtttgtctttccctatcccaactgtgagctctgtgcagcagggccacatgtgtcctgtgtccctcacaaggggctgagccacggtaagcactcagtaggtgtttgctgagtggagtagtggagggacagcaccttgtaggggaggagctggatcaaactggataacctctggggtgtcttccttccatatcatacattgtattctgtgagtttcacaataactcaggcccagattgacagaccatcatcacatggaaggtaataagccttcaggaggcaggttaacatgcgtacattggatgaggaactaaatccaactgtgaaatctaatgtttcattaaataatacaaatatgtgagtgtaatatggtacatattcacatttttgtagagatttccttattgacataaatcttacatatttctttccagtcagagctgtaccttttgccaagagaacagggcatggagtatatacacatagtgtacattcaatacaggacagtggataaagggcaggaacaactcgttcttttataaacaagcattttggagatgctctgtgcacacagtaggcaccaagcaaatctgaagtcatcaggggagccaaataacacatctacagacaaatctatgcaaagcaggtcgtttgaggactgtctttaaaaggcacttgcccctagatgtcactcttaagaagcattttataggagaaaagtctggagcccattcgttgtgttattttaatctaggatgactgtggaaattttcttgccagttttatcaggcccaccctgtttccagttccgcagtcttatccccatgccagcgtatacccaagcctccaacctggaggctcagccacatgcccagtctctatgcagggtcctgactcaggaggttttyaagaacctttattcaaccagagtccatctcttctgtggtctagctctactcttgggtcccacattgttttaactgcttctgtttcagtttctccaccagaggtctctctgtttgttacccagctgctagaactagggccctaatccctcctgtcatttttcttgctggagacttgagtattctcccaagcccagccacagggaccacagagaccttgtratctgacattcttccaagggctgcagccatctcagcatcatttccggtcactattctctacctccccttcctttgtgtgataaccctcatccttgtctatacttataacctgctaggctggattttctcagcctcctgctctagcctgttatagttaccaggccttattcaccatatccaaaataggacactaattcaacgcacactgactaaatacatactacagtttaggcaccgtgccaggcataaagaaggatcaggtactgcctttggcaaggcaagatattttcccagtttggyccctttcaaatacagttgttccctaattcatcctgattttaaagtagtgaatcttgtccaatattgaacttggcttctgaacattaagcattcatccatcttatatatgcagattatctgtagtgtatcagacactgcattgggcataggtgagacaatagagcatggccccagaacatggcaagaaagctacttacacaactttgtgccaagaaataccttgtgctaagagtgtccacagtggtttgcagagggagcaattaatcctgccctagaggatagaaaagggctattcagagaagcatgtgtttttctcaggccttaagggatgaattcagtttcatttttccaggcagatacagggaagggagggaacatccagacagaaagaacagcacgagcaagtgcatgaagttagaaaagtacatacaatcagtatttaggaacaagaagtatatttacctggtatggatagaaagtggtatttctggaagtgtgtagtagaatttgagtcaagaaaggaaatttgggtccaacttgaagcagtacataggctggattagagaggtggagggtagagcaaagcaaagaagtcatttggagctcattcgattaatcacaaataaccataattaaggtctattataggtcaagcaggagatgaccagttcatctgtcacccataatgtactgagctgataaaggattccgtcttgggatctgcaccccgacccactgactaggccaggctcaggctcccctgtctcagtgtgaagactttcagtactcactatctctccatgttatgcactggaagatatcctcaaagaagggtctgatttcagccatttgtaggagtttgaatatgttggtgtgatatctcccccatatgcagacttgtgcggcttgtcaaactgttaggactttattaagcttgtcaaatttaaattactattctggaaaagatacgaatccaaaactggaaagataataaccttttaattgacatcattctctcaatatttagtttctttcagaacattttgtctaacatagaatattgtcagggacattgtttaccatattacaaaacatactctctctattaagatcttcttgtgaaaattctactggtctcagtttctagaaaagctgtgcttctcctaaatagagatgttttcttttaaattttctgaacattgactacagttaacagattatgtccttttagctagagatatatttgaagacttcctatagcaagtactgtcatgcattgcttaacagtggggatacatacagagaaatgcatcattaggcaatttcgtcattgtgtaaacatcagagtgaacttacacaaacctaggtggtagtcttccacacacctaggctatatgatatagcctattgctcccaggctccaaacctgtacagcatgttacttactgaatactgtaggcagttgtgacacaatgttatgcacttgtgtatctaaacacatctgaacggaaaaggaacagtaaaaatatggaattataatcttatgaaacaactatgatagatgcagtccatggttgaccaaaacattgttatgcagtacatgactgtatataggacttgtgatgtacagttttaaattagcctccttccccaacccattgtggattgtttcctttccttttttcagccaattctaactaatgctattttgacttttgtatctccaaatagtccaccttaaatcctttttggaacaaggctgaaggataaatcacacacacacacacagacacacacacacacccctacgtgcacgctatcagaatattgactaaagtagaatagcttattgtagcatttaggtttctaatgtgcttctagctaaatattcgagaagatgacagtacagcccttctcctggtaaacagagctagtctgagaatcacttttcaagtacttacagataaaaatcytaattcaaactcatcaaatgcatggccaagtaccagacacactcctcttttggatttaccagaaagtgtgctctcatgcactgttaggtctaataatcagtgaccttctctgttttgccaaaataattcctaaagactggctagccaatgcattgatttttattaaaaaaacaaaayaacaaaataaaattctctgcctttgactggaatgatttttatccattgtctccttcctctagcagacagaggcaacattactatttaggaaaagtaagtggaggttccacttcatttctagatgaaaatggaggattttgatgttaagtatttcatgtgacctcagacagtctgtagcagccacagctcatcagtggttaataaattagtagattgtatataaaagtagtttgttttcagtttagtgaactgatagttggggcagttagcaaatcaagtaaaagtttgggccctgaaatgataatgaattcctttgttcccaagacttctaagggcagtagctttgtaaaaacaattctttctgttagtactagatgctataattaaggcatttgaatcaacaatgaaattgagagcagatgtactacgtaggctcaatctatttattagctactaatggagaatgttctagctaatggcattaataataatgtaatgttccccacatttgtagtcattaacaagtgcattaaaccaagtcctcgaagtcagatttttcccttactcttcttctctcaataatacaaatccttcaacagtcagttgagaaggagagaatgaggatgtttgaggtcaaggagaggcagccctggcagaagggaaaattacagccagtaacttctgtgttctgtgttttcccctgagctccccaggccacatcctcatagtccctgaaaccacaggcctctaggccaaggtagtgtcagaacactcccacagaccctgtggctgagtccaaaaggcagaaatgaaacttctgggactgagcgggcagggcaggtgctcggctgtgccccccagggtgagagaaccacctgcaggaagccagtgttgctgtatgcttccatcctgcccacctcagtgggccagcaccatgacagcctccctttgacactggttggagtgaggcttatccccaactccaacctacctcaccccctaggcctttactaagagaccttgtgggcagatggtctagagggacagtgagccccttagcgttgaacagtatgtgtattcaataatgcagctcctcgtggtattgattagtaatcatagccaactacttatgtagcacttaaatctcaccacaacaacatgaaatgggtatcattcttattattcttaatctatatttaaaagaggttaagtgacttctccagtgatatatagtttaccagtaataaagccaaaattagaattcattcagcttgatgtgaatctgtgttgttaaccaccacagcacactgcctttcagcaaaggctgattaaagctgcaccaagtctctaagtgtgtacagcccatcagaatctcgacactgtgtttgacaagcatgggacgtgcagttaaactggggaagaaatttctttctcatagaagagatccttgtgtgtgaaaattagaactatctgaataaattagaatcaacagaaattctttatgtgagtgaaatagccttcgagaaaagcaggacagttatttcctttaacgcctctccttgggtacrgcagggataggtgaattcctgcatcactgcttaacaagtatttactgagcaccagtggattggtgttataataacttggcctcaggttaatttccctccttgaaaatgttctattaaaaagagtttgaccacacagtgggctcacacagcaggggatttatgtggatcccccagtgtatggaaggacagaaaataattaaaaatcagaatgtactctaattcaaaaccaaaaggcgtccccatctatgtccttgtgaaaattgtgcaagttggcaaattaatgaggctgttgcctggggtgaagtctgcacttagcctgtataattactaagaaatgagagagacctcagtgggtcctacggatgagcaaaagaaaataatttccggacataagtggagtcattaagaatgcaagagcactaatgcactggggccacttccaggggacaagtgatggctgggcagcagcagcaacagcccacacaagtctcccgcttcttggtgaacagggaggaaatgcagaggggatggtaggcaagggagaggactgacgtttattgagccttcactatgtaccggcctccatgctgggcgctttatgtatattgtctcacttagaaaatgccagaatattccatgggttttgtattgcttaggatgatgtgtaccctgcccagccttgacatacagaatgacacaagcctgacctcaattatcattgcagttaccctaccacacacaaatgtcacagacaatatcagctaaaagcaaaagaaaactcactattaatattttgtcctataaatttatattcttttttctatataaatattttgtgttaatttaccaaaatgggatgcattgttttatacctacctcttaaacacttttacatgtttattaaatatccttctacagtatctttctagtagttccaggacatgcaattttaagtactttttgtgaatctttttttatcagtcccctattgtaggacattattaatagattgctttcaagtttccacaattttaaaccatgttctaatgaacatccttatagataaatcactgcaaaattattcagtatttttaaagatagattcctagcatggaagttgctgggtaaaaggatatagatgtttttaaagccaggtttattgaggtatgttttacatagagtaaaaatcaccctttcttttatttttggctgggggtacatgtgaaagtttgttacataggtaaacacatgtcacaggggtttgttgtacacatcatttcgtcacccaggcattaagcccagtacccaatagttatcttttttgctcctctccctcctctcattctctcccctcaagtagatcccagtgtctgttgtttccttccttgtgttcataagttcttatcatttagctcccacttataagagagaacatgcagtatttggatttctgtctctgcattagtttgctaaagataatagcccccagctccatccatgttcccgcaaaagacatgatctcattcttttttatggctgcatagtattccatggtgtatatgtaccacattttctttaatcagcctatcattgatgggcgtttaggttgattctgtgtctttgctattgtgaatagtgctgcagtgaatatttctgtacatgcgtttttatggtagaatgatttctattcctctgggtatatacccagtaatgggatttctggatcaaaatggtagtcatgcttttagctctttgaagaatcgccacattgctttccacaatggttgaactaatttacactaccaccaacaatgtataagtgttcctttttctccacaacctcgccagcatctgttactttttgactttttagtaatagccattctgagtggtgggagatggtatctcattgtgcttttgatttgcatttctctaatgatcaatgatgttaagcttttttcatatgcttattggctgcatgtatgtcttcttttgagaagtatctgtttgagtcctttgcccacttcttaatgggattgtttttctcttgtaaatttgtttaagttctttatagatgctggatattagacctttgtcagatgcatagtttgtaaatattttctcccattctgtaggttgtctgttcactctcttgataatttattttgctgtgcagaagctcttaagtttaattagatcccacttgtcaatttttccttttgttgcagttgcttttggtgtctttgtcatgaaatctttgcccattcctacaaccagcatggtattgcctaggttgtcttccaggatttttatagttttgggttttacatgtaagtctttaatccaacttgagttgatgtttgtatatggtataaagaaggggtccagcttcaatcttctgcatatggctagccagttatcccagcaccatttgttaaatagggagtcttttccttgttgcttgtttttgacagctttgtcaaagattagacagtcatagatgtgtggccttatttctgggctctctgttttgctcctttggtctctgtgcctgtttttgtaccattaccatgctgtttttgtagccttgtaatatagtttaaagtcaggtaatatgatgcctccagatttgttctttttgcttaggattgccttggctatttgggctcttttttggttctatatgaattttaaaatagttttttctagttctgtgaagaatgtcatttgtaatttgatagaaatagcattgaattcctttgggcagtatagccattttaatgatattgactcttcctatccatgagcatggtatgtttttccatttgttggtgtcttctctgatttcttagagcagtgttttataattctcattgtagagatctttcacctccctggttggctatatccctaggtattttattctttttgtggcaattgtgaacgggattgcctttctgatttggctcttggtttggctgttgttggtgtataggaatgcgtgattttttacactgattttggatcctacaactttgctgaagttgtttatcagctggaggagcttttaggcagagactatggggttttctagatataaaatcatgtcatctgcaaacaaagatagtttgacttcctttcttcctatttagatgttctttatttcttcctcttgcctgattgctctggccaggacttccaatactatgttgaatagaagtggtgagagaggggttccttgtcttgtgccagttttcaaggggaatgcttccagcttttgcccattcagtataatgttggctgtgggtttgtcataaatggctctcattattttgagatatgttccttcaatacctagtttattgagagtttttaacatgaaagggtgttgaattttatcgaaaggcttttctgtgtctatggagataatcatgtggtttttgtctttagttctttgtatgtgagaatcacatttattgatttgcgtatgttgaaccaaccttacatcctggggatgaaacctacttgatcatggkggattagctttttgatgtgctgctggatttggtttgcaagtatttgaagatttttgtattgatgttcaccaaggatattggcctgaagttttcttttttgtgtgtttctgccaggttttggtatcaagatgatgctgctctcatagaacgagttggggaggagtccctcctcaattttttagaatagcttatataggaagggtaccagctcttctttgtacatctggtagaattcagctgtgaattgatcaggtcttgggcttttttttggttggtaggctatttattactgattcaattttggagctcattattggtctgttcagggaatcagtttcttcctggctcagtcttgggagggtgtatgtgtccaggaatgtatccatctcttctaggttttctagtttgtgtgcatatttgtagtagtttctgatggttgtttttatttctgtggggtcagtaataacattcccttcttcatttttaattgtgtttatttggattatatatatatttaggctactttatatatatattaaggatagttaagtcttcttgttgaattgaacccattaccattatgtaatgccattctttgtcttttttgatctttgttagtttgaaatctgttttgtcttaaattaggacaaacccctgctttttttctgttttctatttgcttggtatattttcctccatccctttattttgagcctatgagtgtcattacgcatgagatgggtctcttaaagacagcattaccattgggtcttgcttttttattcaacttgccactttgtcttttaagtggggcattttgcccatttacattcaaggtcagtattgatatgtatggatttgatcctgtcattgtgctattagccggttactatgttagcttgtttgtgtggttgctttacagtgacactggtctgtgtgtttaagtgtggttttgtattagctgatagcagtctttcctttctatatttagtgttcctttcaaggtctcttgtaaggcaggtctggtgggaatgaattccctcaacatttgcttatctgaaaaggatcttaagtctccttcacttaggaagcttagtttgtctggatatgaaattcttggttgaagatttttttctttaagaatgttgaatataggccccaaatctcttctggcttgtagggtttcagtggagaggtccgctgttagcctgatggggttcccttgtaggttacctgccctttctctctagctacctttaacattctttccttcatttcgaccttggaaaatctgatgattatgtatcttggggatgatcttcttgtgtagaatcttgcagttctctgtatttcctgaatttgactgtcagcttctttagcaagcttgggaaagttttcatggatgatgtcctgaaatgtgtttccaagttgtttgctttatcctcctccctttcagggatgccagtgattcgtagatttggcctttttacataatcccatacttctcagtggttttttttttcatttcttttttttcttttttctttatttttgtctgactgtcttatttcagagaaccagtcttcaagttctgagattcttttctcagcttggcttattctgctattaatacttgtgattaaattgtgaaattcttatattgtgttattcagctctgtcagacccattaggttcatttttataccagctatttcattcttcagttcctgcatcactttattgtgattcttattttccttggattgggttttgccatcctcctgaatctcaatgatctttgttcctgtccatattctgaattctgtgtctgtcattccagccagttcagcctggttaagaactcttgttggagaactggtgtggttgtttggaggacatatgacaatttggccatttgagtcacgagagttcttgtgttggtcctttctcatctctgcatgtgggtgctcctttaaccagttgtagattgagaacagtcaacagaattcttttctggatgttttcaccaggccaaggctttgtgcagggtctttatttgaagctgacttcttgtccctggtttcagagggaggtatgttagtgaggtatttttggtgttgaagctttggggtatgatccagcaggtggcacttaggcttattggtcggttggtagactcttgcttggttgtgtggctcccccatgttaactcmcagttgcagccatgttctctctcaatgctctgaaagtgtgggtttctctcccccttgagtgctgtctgtagatcatgacttggcactcctcggatgcccactgcagctcttgtgtaatctcagtgtttatgttcctttcccaacttggaggcagcagaggaagggactttggtattggttgtggccaagggtcatttgcttgtcacctggggactccaccccagagagatgcaggtcagcagtggctcagtgcaagcagcccaggatggagagtctgtgctgtgggcccaagccaggggtttcctgtcttgtgtcaagcaatgcggggggtgtgtgggatgcacgggagacacactggcctcctctccttgggtcagctgcagcttgctggaggtgtaaaatcaccctttctaggtgtacagttctgtgaattttgacaaatgcatcagtcatgtaaccaccatcacaattaagttatataacatttataagcactttaaagcttttgatgcatgttaatcaaattacctgctggtaacattatatgtattcctatctaccatcagcttataaaatgtgaacattgggtattgtccttaaaagactaaaaaaaaaaaagtccagtttttaggtaaattttccatctcattttaagttactttttttaatattaatgaagttgcattttttttgtaggtttatctgtttttatgtcttacagtgtgaatttttgttatgtttttggcctgtatttctggccaattatctctttcttattgatttttaagaactattagggggctggggttgaaagagtgatctgtcatgtcgcaaatacattttcttttgtcattaagccacttttaatattatgtatagctttttttctctcaaaagttttaagttcctgtagtctcaccatcttttcctcatagagtccaccatggaagtcatcttcataaagtcctttcccactccatgattatttaaatgttttccctttttaaatttaattcatctggaatttatttttggtatatcacatggagtagaattttattttctcccccaaatgatgagccacttgtcctggtcccatttatcaaataatagatcttttccccaccaatttgaaaagccacctgtattatatatcatatttatatacttaagtatgtctctgaactttcccttctgttccacaaaattccttgtctttttgggagaagactacttactggttcgcactgtttttaataatgtagttttataaaatggtttaatatctggtttggcaagtactacttttcattattatactttttcaaaatgttctctcaggccctaattatttcagatgaactttaaaccatatctgagtttaaacacccaataagaatttgtattgaaattttatgtttatagattaatctaagaataatttatatcattataagcagtcttgtcactgagggatgttcaaaaactgactcattgctcttcagagattaaagttttataattttttaagagtataaaaattataaattataaaaattataaaagcataggttctacatgttttatgtgttcatcctaggaatcatgttattgttgttaccattgattttagcatctgtttttgcattttactttccaacttgtggatcctatttacagcattctatttattaatttttataaaaacctagtttattaaaaactasttacagtaatatttgattttttaaagacaattaggtcatttgtaaataataagttttccttcacttttctgattttattttatttatttatttatttatttatttagagacagagtctcactctgttgcctactttggagtgcagtggagtgatctcagctcactgcaacctctacctcccaggttcaagcaattctcttgcctcagcctcctgagtaactgggattacagacacatgccaccacacccagctaatttttttgtatttttagtagagacggggtttcatcatgttggccaggctggtcttgaactcctaacctcaagtgatccacccaccttggcctcccaaagtgctaggattacaggtgtgagccaccgcaccaggcccacttttctgatttcatacttcacttctttttctggtatttcattatttagaattatttttataatttcaaataattcttcacattgtcatattttaatgacatatgaagtaatatattttttaaatcaaaaatagatgttaatgcagtaccttatggtgaattaatccctcagctttagaataaaccttatttggctatggtgtattaatcttttaacattatgctcaatatttattatttgaaatatatatataatcactaactttagttttctttaatatactatctttgtcaagttatggtattaaggttggattattctcatgttgtaaaattgagactcttgcatttttctatgctttggaacaatttaaatggcataaccatacctgttgcttaataagcagacttagctcacctgtatcacctgctccaaagctttttgggggaccatgagccatagcattttttaaagccctctctctcactcagtgttcagaatttgtattaaaatttcaaagttcatttaacaattttgattatcagagtgaaaagctaatgcatctgttttcttagacttgaacagagtataaaataaagatgaaaactaaatctcaaacacatttccatcagtgctttggatttcattagttcttggcaaacattatttacacttacataaagtttattgattccagtatgatgttcaaaagctgactcrttgctcttcagaaattacagaaatgtctaccctcaatctcttgggaaagaaactgaattaaaaaggtagagtaagaaataagctgaaacttgtctgtatcaattagttttccttgagcactccctggatatatgcaactacacggaagtatttaagagattataaaaacagtttctcatcaagtttttcatctgaggcagggaccttgatggtttcttctcatggacaggtaactctatgtacatttcagtacatccctgtaatcttcagcctacttgttagttaccataacaacagtaacagcattttcttcttctttatccaggacatctgtgttaaggcttatctagcccttcgtcatcacacaaacctactgatcatcctgttctccatgatgctgatgacaggaatgccccagttaacaagcaaagaagacattgaatatatccgggatgccctcacagtggggaaaaatgaggaggatgctaaaaagtattttcttgatcagatcgaagtttgcagagacaaaggatggactgtgcagtttaattggtttctacatcttgttcttggcatcaaacaaggagagaaacattcagcctaatactttaggctagaatcaaraacaagttagtgttctrtggtttaaattagcatagcaatcatcgaacttggatttcaaatgcaatagacattgtgaaagctggcatttcagaagtatagctcttttcctacctgaactcttccctggagaaaagatgttggcattgctgattgtttggttaagcaatgtccagtgctaggattatttgcaggtttggttttttctcatttgtctgtggcattggagaatattctyggtttaaacagactaatgacttccttattgtccctgatattttgactatcttactattgagtgcttctggaaattctttggaataattgatgacatctattttcatctgggtttagtctcaattttggttatctttgtgttcctcaagctctttaaagaaaaagatgtaatcgttgtaacctttgtctcattccttaaatgatgcttccaaacatckccttagtgtctgcaggtgttagtggtgtgctaaaagcaaggaaagcgagttagtcttttcagtgtcttttgcarttcaattcttttgtcatgtataactgagacacacaaacacagcaggagaaatctaaaccgttgtgccttgaccttcctctgctggtcttgttccagggttatgaatatgaaaaaatagagatgagactttttgtgtcaactctgtccacaagagtgagttatctagtatgattagtatagctttctccagcatggcagcaggaagtaactacagggcctcttttatgcctgacatttcttcccttcctttttccctgcctccctttttcatcaattgcratgctcccacaactctttacagacttgtgaaatcttcaagaacacctttactctataactcaaaaattagttgaaaaataattacttctcaaggattattagaatcttaggtacttatttgtaaagatgtttagtgacttttttttcaagtatcttattaaaggaggcattctagaaaatatgaattagtttccaaatgccttaattttaaactttggcctgaacagttttttctttttcttaatggaagaagatatttaatatcttaaaaatattccaagttaggaagaacactacttgccttatccatttcccatttaaaggacttttaaactttgacacatccttcagatttcctgaaaatmmttgaaatatcttactttaaaaatattttcatctctgaaatatctcgttatttattggaggtattgtttaaccttagakagaccattaaattatttataaaatattttgtaattacctgtagctaatacattacatagaaaaaaactatgttaacagtgtctctgtttaagtataatcagatataaatatatacttaattttttaattttaaaaatagatacctgtttgactttgaggtagtccagrccttttctytttttttttttttttaatgkgtgcaaaagcccaaaggttcctaagcctggctgcaaagaagaatcaacagggacactttttaaaaacactcttatcagcctgggcaacacagtgagactccatctcttaaaaaaaaaattagctgggtatagtggtatgtgcctgtagtcccaggtactcaggaggctgasgcaggaggattgcctgagcccaggaggtggaaactgcagagagtcatgatcatgtccttacactccagcctggataacagagcgagaccctgtctcaaaaaaataaaataaaaaataaaaacacccttgcctgcgctccattcccaggttataatttaattactgtgggatgagacccagacatcaatatttttctagattcttcaggtgattctaattcacagccagagttggaagccctgcgtggcctttgaaggtctagatgattcttcttccttgccctttgagcttttccccatctcacaggtatctagaaaaaaactcctcttctttggcaacctgtccttttaaaatcacactctacccacctgtacagaagaccatgccctataatgaaatgtttattcctatctataaatggaggataaacattttgtggcacttctggaccaactattccctactattcttttgaagaaaggcaggaagagtactttctaattcagaagaggatgttttcactattctgataaacaatagccaagttcagaccttgtacagattctttttatttgaattgctgaaataatttattgatgatgaaaaaaagattagagaggaatacatttatatttagcttattggcacatgtgcatacatatttcctcttcaaatgaaccagttctttcatttcattatgctaatatatatatataacatatatatgctaatatatatataacatatatatgctaatatatataaacatatatatgctaatatatatatatcacacatatatatcacagttttatatatatatatgtatgtgtgtgtgtatatatatatatatatatcacagttgggcttgattcttccgtattccaaagagcataatttcagttctatagacttatagataaataaaaatcatctttgtgggcttccttcctttactgttcgcagtgaattacatgacgaacaacttctatacctttgaaaatgttctagaactagaatcatcctgctactgggaactacccacagctctatcttcaatgccaggtgaaaacacagatcacaagtcagatgaatcaggccaaagcaacttttatgtatatctaggactggcgacataatttgcagagcccagtgaacagtgaaaatgcagtcccatcattcaaaaattattaagaaattcgagatggcaacagcagttgtcacaccaagcacagtgcccttctgagcatgaggctctgtgtgactgcatgggtccatgagaccagcactgtgtgggtctgaatgatggctttggtgttcagtttagcacacgcggtctaccacgtctgcatgagtggtaaatgtagtgcctgggtcaaaatgttccttctgttcaaatcgaaatacctcatctctatggctctatggctgtacattaggacctagaacagtggcccattgctcttagactggaaccatgtccactaaaataaacctaagcagatgttgtagacctagccccacaggactgcatttagctgcttcagtgacactttgatgaaagtatggagaagtggagacattatagataaaatatatcaattcccagagaaaactcttgacttaaaaacttaactgtagtaaatatatctttttcaggtgatgaattatttttttaaaaaaggttacatataggaattctgcagtataatttggaggctattagtgctatattaatggaaattaattattttttaagtaagtccaaaaaataatctagaaagtaagtttccagagcaaatctgacctagcatttggtatgctaggctctgcttttcatgattttgaaataaatcataattagacttaacaatatggagaaaataaacttgtatttttaagtgttctgttggcttattttctgtttcatccaactcaataattctgataaataaatttggttctagtttggtgcttgtctgcatagtctcaaagattcatttcaggacagctatctggggaacaaaaaacacacaccttggccaggcatggtggctcatgcctgtaatcccagcactttgggaggccaagatgggcggatcacttgagcccaggagttgtagaccagcctgggaaacaacatggtgaaatactgtacaaaaaatctctacaaaaaatacaaaaattagccaggtgtagtggcacatgcctgtagtcctgggtactcaggaggctgaagtgggaggattgcttgagcccagagggtcgacgctggagtgaggcatgattatgccactacactccagcctgggcaacagagcaagaccctgtctcaaaagaaaaaaaatcactattgagggcccaccacctaccagacactgcactaagtactggggattcaaatacggagcaagattgacctagtcccagtctttaccatgtttataatatgttagcgatagctgatacttcataatgggtgcatgtttgttgtgggttgaactttgtcccccaaaaagatatgttgaagtctcaaccctggtgcctgtgaatgtaaccttatttggaaatagtttccaaataaggttataacagatataatcaagttaaggcaaagttatgagagtggccccaacccaagtaacatccaaggtgagtaccatgtgatggaggcagagatgcatctacaagccagggaacaacctggggcaactagcagctggaaaaggcaaggaaggatccgcccctagaagcctccaagggctcatgccctgccagtgctttgattttggacttctagcctctggaagtaaaagaatatgtttctattgttttaagccaccagtttgtggcactttgttatggatctctagggaactaaaatagtgtcagtacccaaaaattttgtggaggcttttattttttagtagggggatcacagagtttatgtaaatacatctcttttctgctgttaacaaaaagatttaattgcatgcaaaatatgtgaagggctaatattcttaatatataaaaaggtctaataattcaataagtaaaagataaataccttatcaaaaaataattcacaagaaaagaaatatgtgtggccaataaacatatgacagcagaccccaagtcatgattgattaaacaaatgcaaattaaagtaagtttattttccctatcagcttagtaaagactggtaaagtccagagtgagtactaattttagagaaagggcactctatcaaactgttgaaagcagtgcaagttgggaaattcatgcatggcattttgacaaaacatcaaaatcaaggtatctattctctgacccagcaagtccacatttaagaatttatcctttagaaattattgcacaagtgtgggaagacttatggtcaaaaataagttgtcaacattctttataataaccaaatttcaaaatagcctaaaagtccttcagtaggagactgaaattacattgaaattacatccatacagtggactcacaatgaagcctttgaaaagataaattagatcaaaatgtattgagatctatgtagatatctatgacatactgaggagtgaaaaaggtggttacaggactgtattatgctccgattatatttgagttaaaatgtaggcttatatatgcatgaaaaggctgggaggatgtatttacaccacactgttaatagtaattttttttttttgagatggagtctcactctgttgccaaggctggagtacagtggcactgtgtaggctcactggaatctccatttgggttcaagcaattatcctgcctcagcctcccgagtagctgggattacaggtgcccaccaccacgcctggttagtttctatatttttagtagagatggagtttcaccacattggccaggctagtcttgaacccctgaccttgggtgatccacccacctcagcctcccaaagtgctgggattacaggcgtgagccaccgtgcccagcaaatagtgattttttttcttttttacctcacatttatttttttccattgagttttaggaaatgactttatattatttgaatttataaggggaaaaagttatatcttttcattttgaaaaacaacacagtctgcataataattatatcctttagcttacatcatgactcatttaaagctcagaaaatttggtttctcaaaggaaaaaaaattatgtgaagtcaataattattaagtagtggcatcaaagctattgtcagaacttcttggtgtaaaaatgtccatgtaaaagtttcctgctttaccagccacacctggttttgatctgttgtactgctaaggctggccttgatttctcccctaaaatagcaatgcttttggagaagggcctctaaggatgttgtctattaatcagtgagggatgccttggctcgtgcagctcttctcagatctgcagacctcatgcagccagttggccatgcggagctctctagctcacatctgaggtcccccttggaggtgcagacagcctcattttcacttctcatgaatgtcagattcytttctaagcatttgctcattagtatgagtaaagctcattgcctgctgcttgggtaagaattttctctctggggctggactctgagtctgcatccataatgcacttggcatctgtcttggggaccgtaatggggcacagggatataccaaggaacacagagtccatttgcagcacctcagtggcgattctctacctctcacagcagatggacagccatctgagaagttttatactcggagaatcaaactcagaatcttttgattacacgtaaaagttaaaatgggtccttactacctggcagagatccacccatcattatcaccactgtgtgcaaggtctgtagctacacagcacctcccatcaccagatgtgtatggtggccaaagctatgctggtccccagcaccctccactctgcacctctcctttgcatcactaagcaccctgttctacaaaaacaacaacaacaacaataacaaaaacagaaaaaaaaaacagccctgttactactgagggcttcctccggtcaaatcccatggccacacatcactgccaaatccctgacctctcccaggatctgctctccccaatctatggttcagagaagacagttcctcatttttgaagcaactccttgctcaggcactacctgcttaaagtggcagggcacattctacaggctttcagcaggtagatggatttgattactttaatctgtgcagatttaaaggagtatgagactcgtgagatcctggagaaaactcagagtgagcatgtgtggctgtggacacaaggtgaccttaagccagcaattcggggataatctattttagagcctgagcaagacactgcaagggcagttaataggtaagatagaagtaaagagtggtttaggtggctttggcattagatcatttcaaattcaagtaccaattgtcacttgaacaagctgccaagtttcagccctctcctctgtaaactagggaggacagtatagtacctgctttacagaattactgtgctgattaattgaaataatgaaagtgaagcattaagtagaattctggccaagagttactgctcaataagtgatcactatcatttctatattctttttaaagaaggataaaaaatctcaagaaattaaagccaaaagttcaatggcatcacccttggagtgtgacttttaggagtactttaaatgatgaaaatcttaacaattttctaagtacagtatcttctcagtaggacttcaaaggaaaaataatttccattctctgtcaacatcagataccaaggaatcttctaaatagcaaccttctctgatgagttattctaatcaatgcaaattagttcctgggtctgggcttaaagaaaattagagaagctagaatcaattgacaatgctaccaactcccatttgctttttgaatcagctttatggaacattgcatgaataactttcaccaattttaaatgtagaatttgaggagttttaataaatacataaacccatgcacctaccactatgttcaagataaagaacaattccatcacgccagaaagttctctcatacctctttgcagccaattctaacccctaagaaccactgaattgctttctatcactatagttttgcattttctaggattttatataaatggaatcctacaatatgtggtcttttgtgcccagcttctttcacatagcataatgcttttgagattcatctatgttgcctaaataaaacataatttaggaaggctcagtttctggacagatttgctgcagttcattctagagccaaatgccaagtttcat

SEQ ID NO: 93624 - DNA, 33445 bp, Homo sapiens
agtttgaatacattatgcttaggtgtgggtgttttttacatttattctgcttggtgttctctcagctttctggacttgtggtttgctgtctgacattaatttaggggaaattttgtcattattgtttcaaatatttcttttgtttctttctctttttcttctcttggttattcccattacacatgttgcgccttttgtagttgagccacagctcttgtatattctgttctgggtaggttttcttttttttcagtcttttttctgtttttcagttttggcagtttctattgagatggcttcatgttcagagattttttccttcagctgtgtccagtctactaagaccatcaaaggcattcttcatttctgctacagtgcttttgatctctaccatcttttttggtaccttattaaattatctatctctctgcttacattacctattggtcttttcatgctatctactttatgtgttaaagctcttagtaaattaatcatagttattttaaattagtggtctaataccaacatctctaccatatcttgaatttggttctgatgcttgtactgtctcttcaaactgtgtttttccttttagtatgcctcgtaattttttcttgataactggacataatgtactgggttaaagaaattgctgtgatgttcctttagtaatgtgatggtaaggtgtatgtataggtgggggagcattctatagtcctatgattaggtctcagtcttttagtgagcctgtgcctctggatcatgaacttcacaagtgcctctcagttctttacttctatactcacccctaacatgttaggtaggataggatagctagaatgggctggatttgggtatttcccttctcatatgtggaagtctagagggaatggagttcagtatttcccttcctccaggtcagttaggctctgataaaaccccagcaggctaggttccacttagctactttcttctgagggcagctcttgttaagaacagaatgttctggcacatttcaaaatggtttcttttctcctccctccgccggaagcactggggggtttttctctgatattcactgtgtgaacctggtagaactccaggagttaaaacacactaaaagtatgggttccacccaccatgactaggtccccctgaagtttttaactctcagacttgccaacacagaacttctagcaattcatcatttaacagtttaggttttcctaccccagcactggttcctgtagagatttcagctcatggttttctgctctgataagttataattctctgtattttctgtttgttttgttgtttgtttttatttgtccagctcaaaatgtcattttttttcttttcttttaattctgtaattctctgtatctacctgtctgtctctccagtttgggaaatgcagtttgccccataacctcacttttccaaaaaatatacaaagagttaagtatttttaagtttgtttagctttttacttgttattaggatggaatggtgacttctaaggtcttacatgctggactgaaaaccagaagtctgaatgagttttgaaggatgaaagggattcctatacatctgcattgttcaacatggtggccacttactcacatgtagctactgaaacttaaactaagtaaaatttaaaattcagttcctcagtctcattagctacatttcgagtattcaatagctacatgtcattagtttctacaatattagaaaacacctaagagcatttttatcattgcagaaagttctattgaacagtgcagctctagactcttgctactcaaattgcagcctaacaaccagcagtatcctattaccaattggtgggttgtctgtttttgtttttgtcttgagacaaggtcttgctctgtcacccaggctggagtgcagtggtgcaatcacagctcactgcagccttgacctcccaagctcaagcaatcctcccagctcagcctcctgagtagctgggactacagatgcacgcccccatgccaggctaatttttgtatttttagtagaggcagggttttgctatgttgcccaggttggtcttgaactcaggagctcaagctatctgcccatctcagcctcccaaagtgctgagattacaggcatgagccaccgtgccctgcacagttggtttgttaataggcagaatctccagccctatccaggacctaatgaatcagaatctgcttttaataagattctccagtgattcctatgcacatttaggtttgagaagcattactatagtggttgtgggacttggatgagtcagatgggtgtggttctgggatggagggactcagagaataaaactgtactctgaggtaacagtgggcacaatgacagtgcatgaaaatgcatgcatggcaggagctggtaggctgaggtagattacaaaaggttctgtagccctttggattgtgccctgtgggaagtcactgaccaatttaaaataggaatgcctgacaagatctgggtttgaggaagacagcctagtggtaatctgaaggacctgatgggcaacttggaagtcaagggagcagacagaaagctctgatacaaacctaaatgaagaatgaggctttcttggctgcaggcatctcagagaggagagggagaaagagagagaatccacagggacttggtgactgactggacatgtggaatagaaagaaggatgaagtgagatttgaacttggatgagtgataaatggagctgctttatacaaatcaggaatccaggagaataagcacattttatgggaaggtactgaggttggcctagacatgttaagtttgaggtatctctgagacatttgttcgccagtttccctacctgccaaatgatagtaatgacagtatccacctccacagtattggtgtattaataatcaactgataaagtgtatgtgaatatactgtattaatgtttaagtgtcacatacgtgttactagcatgactctcgcatgtatttgtaatctgaaggacagaggcagaaggctgaagatattgtctacatttgcacaaaggcagtgtcatatatcaaattcagtaagacaggaagtgctggaggaaaatgctgaagagaatgaaagatgtggatagtcaagtaagaaatataacaaatcatcaattagaaatacaccccagctgcttctaagcataataaattgtcaaagctttccatcaagtggaagaagacagtcacagtcagattttggagaaggcacatattgaaaaattcaactgaacaattagtagaagcatttcctgtagattagaaaccctgcccagaaccacatctgccttgaaacatatatagcacatattacgaaagaactgttgttacatttcaattttcatctgcagacaaatttaaggttaaaatgtaatatagccttaaaggtgactgctagttcaaacttatcattaggcatatggcttcctaactcttgattatatgttcggaaaattgctaggaaggtttccatcttattggtcagatggtatgtgagtgtgacatataactctttgatgtgtgcttttcttctggaatttgtagatagtgcaggatacttaaatttattttgcttttgtgaagtaagcaaataacctgactttaaacctcagtaaggctattcagctaaattccatatatatctattgaagatatattacagcaaggcagtgcggtagggcctgtctcttccctcaggttgctgataatctcatggcagagacatctgtaaacaagttctgaggcaagtgagtgctcacagaattataaacaggtttgggtagtttggggagagaagtgagtaagaacaatagctgccatcagatatcataaatttgaagtttgatgatttactttcaagaataaggttcctgccacttagtttagctagttctggccacattatctgcagctccttccatcaagaggcagagactatttgcctgccccttggatttggagaggcctcacaatttgctttgatttgtagaatttggcatatatgatcttgtgtgactcccaagtctaggccttaagaaattttacagcttctgcctgctctcttctggatgttgcccacagaccaaaaacatagcctactgcaggataagaggccacatggagccaacagcagacacatgagtgaggccaccttggactttcagcttagctgattctccagttcagggatcagcaaactacagcctgtaggccatagcctgcttctgtatggcccttgagctatgaatagctttgggtttttaatagtttataaaaattaaataaaaaagaatatgtgacagagacaaagtctaaaatatttactatctgatcctgttttacagaaaacttggccaacccctgctacagctgaatgtatctatacgagtgagccaaatcaaaaccagagaggaaccacataaccaaccttcagaattatgagaaatattaaattgacatttttgcaagcaactatattttgggagagttcgatctgcagcaatagatgactcaatcacaagctgataaatgctacacaaagaaaaaggagactgcttcaaaggaaataatctcataaaggttttgggcctttttgtctcacttacttcatttaggagaatttcttaccccaatctgttgtccatggctctgctttgcattccagggaagttttggcagctatgagcacatatacctgctggttactcaaaggacattcaaaacattttaaaaatgagtattgaaatacaacttttctaaaattttaagaaacggaatttgtaaaatatagtattaatgccctaaagcattcttccaaataagaggtctattttttcagcatattaatctatctgcagtgaaacctgtctggttttgttattaatggacctccttgacttagtgaggtgaactgtcagcccaggtagggtgaagaatggctgtgataaaggcgtgcagcagggcagcaatcactttaccctctgcaaaggacacagctacctgccaaggctggaaccaggaaaacaatctcaaccataatttagatctgattattataatttagatctgattatttatgcagtgtcaactaagtccttgacttacactgctactatctaaacttacttttgttgtatatccattttgatctctatattcacccctattattttcagagaaccttcaaactatcctaagtaattttgcagaaaaaggctataaggaagaagcagtcaggccaaagagtcagtaaacaaaaagaaatggtgggccacgtttagtcttgatgcaaatgtgtgggttacaatcaggggtggtgctcatggctgagcttggtagtggttaaatacatgatccagacccacttgattttgaggaaaggaccagtacaatcaatactgcacatcttggtaaaaggagtttgaggagatggatctgggagtttaggtcagctatgctcaggtgtacaaaagcaactccctgggactcccatccatacacaggccattgaaacctgacgtgtctctcttacccccattccattccccatcgattccggaagaagaactggcatttcttctgagacagcaaagaactcctcctaagatttcctctttcctaattagttctgtatgaagtttaacaagaaaatccctccagggccgcctcgaggccatgcactcacgcagtttggaaagacgaccagggaaaaaggatctcaaacaaaaattctagctcgacgtctgccactaagttgtctaattttggccagcatcaactaaaggcatacataacacggccgtgctcggaatgcaaggtgaccgcgaggacccagagggcgcgccatgcgagctcacagggctgggggccgcctgggcccgcgcgtgcagccaggggtttccggccgcggccctggcgcgtggtctgcgcgcgcccggccgtgcgtgcggatgcggggaggctgcgtgtgtgcgcarggagagaacgccggccaccttcccgcttccgagctgggtgcgcgccgagcacaggaggtgagtgagaagggcggccctgcagggtctccgaggcggttgagtcctgccactgggtggagggtatagccaccggacccgcctttcccggaacgcgccgtcctcggaaacgcctagaccccggcagctaggccgggaggcaccgcccactcctctagagcggagcgtggcccaggttgagccgccgcaccgtgggtctcgggtctcggtgacgagcagctgcccgcctccggtgagcgcgggagaaggggcccagtggggcagtgggcgacgcggagggcccaggcccaggccgcggccgcgccgcatccgctggttgtccaccttgccttgccccagggtgcaatacctgccttgcgtcgcccgtgccgctccagccaccgtcaaatccgggtagcgacccggggcgtttgcagcggtgccgaggaagaggacgggaacggtgttacggtattggtgggcccctaacaggcctgcggcgaacgctttcccggagcgctagggaagggccccggcgcagggatgtcggagggattgggaaggaatgtgaaactaagtggggaatgtggagaacgggcggagagagaaggaaatcccacggggctagggctacaggattcctacaggcagtgttaaggaacatacagggcgttttaaaaagattcctagaggtgcaacggagtctcacttttccaagcagtaaggaatgatgccatcctcaagtacgggtagtctttgaattcagtatccgttcgccttcttaatgttggatttaggagggagatttgcagggctttcatgattttgtttcctctgcgttttgcacagattgcctgcgtttaggaggtggctgcgttgtgggaaaagctatcaaggaagaaattgccaaaccatgtctttttttctgttttcagaggtaaggaaaatttgggtttgcagtgttcaactgggaacaagttttttagcttctcccaggaggcttaagcaaaagaagggcgctgaatttgtgctcttagtatgcatgtgtcgatgcctgataaaagcacaaattacygaacgcgtatcagtctggagaacagaatcgtttattactracagataagagactatgacttttttcccctcatagactaaaatgttcgttcaaatgaatggccattggataactccagacctgaaaataaacactgttgtcaaaacagcatccaggccgggcgcggtggctcacgccagtaattccagcactttgggaggccgaggcgggcagatcacctcaggtcgggagttcgagatcggcttggccaacgtggtgaaaccccgtctctactaaatatacaaaattagctgggtgtggtggcacacacctgaaatcccagttcctcggggggctgaggcaggagaattgctcgaacccgggaggcagaggttgcagtgagccgagattgtgccattgcactccagcctgggcaacagagtgagactccatctccaaaacaaacaaaaaacaaaaaaacagtgtccaagtataatttcagattagagcatgaggtgatttgaaagcgagaagagaggatcaaggcttttccaaaaatgaaaaaagtgttgatatgtaataaatggctccaaaaacaacttgctaagtatacaacattgattttagatgtcataattcctaatgttatgactcatatatatttttttctgttcttctgttcagtagttcacaacagatctgagtgttttaattaagcatggaatacagaaaacaacaaaaaacttaagctttaatttcatctggaattccacaggtaagttcatctacttttaacttataaattatcctaattggttaaaaatgcccataataatgccctttacaaggttttaagtatcgttgatgcagccacgaagtttgttgtatattctagtacgattctttcatcagaggatttgaagaaattcaagagtgaagctctactaagccattttggataatatatttttttcttttttcttgcttgaaaaatagagacaaggccactttatgtttcccaggctggactggaacccctgggctcaaatgatcctcctacctaagcctgcagagtagcgaggacttcaggtgtgtgccacctcacccggctctaataatatatatattttctaaaaaattgaattattaaaataccatggttcttcaggaaaacccaataactataaaaagttaatttggtgggtcatattcaacttcaagttctgactcaattccctttatgcctaagaaaatgctccattgagtactttttctctttcccctttggatggatgatgtctcttcttcttgtgcccagcctccagctttgttccatccaccattggatgatgcaggtagaaccctcttttgggaaatgtctttgtccctttcacaactatatcatgtccagaccaaagaagcttttaacaggatggatcatggttgctcgctatggggtaaactcscactgtgtggtagatagccacatggatggggtcaagcacgtgggatcaaacaggatactcttaatgaccttgcacaacagatacattcaaaagttacagttcatttaacagcaggctgtttggcaaacatctctcttgggactatggacaatgcttttatactaataaaaaattgtatattataaatactgatttgcttttgttaccagtccttttggcatattgtgaattagaggctaggggaagatgagaggatgagctagaaatacggcagtttgtagggggcgcatcagcatggggaaggaagatgaagccacagaacatctgtagggtagggccccaagtgctggaaggttgggagatttggctggggagataacctgcactccttgaatctctgagacattaaggaactaaaagaaagctagagtaggttatcggtttcccaccccatgtatttctgactctgaacacaggtaggtaggtaggatctcattgtctgttgcttctctttctgtgtctgttatctggaactatatttagctattttgtttccagagtttgttttcaagaatggagttaccactttctatgcaaaagcagaatggagtagctgagacagaccctagggccctcaaagaagatatttactatctgccttttatggggaaaaaagtttgcccgcttctgggatagaacatggatttctgctaaactcaagctgtgcattttgaatagtctcataaaagttagaatacacaagtcctcctgttaaaacatttcacaagcctgcagccacctattcctgcagcatgtcatagggctcaaaccatatctcatatctggaattgtatttggctgctattttggttacagactttgtcgttgagaatggagttacgcactttctaagataaaaaattaccgtccagttttatctcttagtattaaatagttcccttctccatactgataacaggctctaaatttatgcctctattgggcactaacacattctgagagtgcaaactcagttccctgctgtggattttggtcactagtttagaaacatttgagctggaaagcctcccccatgttctctaggtgggcctcactcatgatgtttggtgtgaaatgtgtcgttgtgagtcttccaccacgctctgcattgagtgtcggcaacttgaggacagggcttgtctgtctgcttccccactgctgccccaacctctaacacaggtccagaacactgaatgaaggaatgaaataccctcagatgactaaagcaaaggtaattgatggcttaactaagaagaatagtaaagagctgtaatattctcaatttagggtagtaatgggaagaaatgttaactgcagcagctccccgatactcttcctccagtggataaagctctttgtaacaaaacagacacagaaagcccagctttcagggcagtcttgctgctgttctgcctgactttgtgatctttgctctgctccagttttcttagctccctggacccggttgacctgttggctcttcccgctggctgctctatcacgtggtgctctccgactactcaccccgagtgtaaaggtgtgtctgcttctgctgcattctttgctccctgcccaggaatctcaggaggctgtgagattagatgtgaggttggtctctcctggggcactgtgccctggcagaaggagcttggcatttggagttgaagggcttgagtttggattccatgtcttcctctacctgggctgcactgttccctggaaaatgggattgatgttaacacagattttacagtgtcatgaaatgtgctttgtaatttgtagttagaagcactataaacttgtatagtgcccagaagttcactatgcctttaaaaaaaaaaacagccctgctaaaaatcctaacatgtattgcaaattattaagagtgatttttatgttcttattggaatatgcagatagggcagaagcaaaaagaaaattgcggctaaattttccttctaaagtcctgctgcttttgtttgctcctcatttttctcagcccaaacccagaaatccctaaaagattctgcatgccacaacccagaagtctatcagagattcccatatacagggattgttttgcctacaagaaagtagtttgtataacagtatatataatatgtcttacttacatgtgtctttaaaaactcagatgtcttatacctcagcacactgaatgaagcagcaggcttcccttttaatgaagctttaatgaaagacattctcccatacatcttagaagatacctgagggtggtggtgctacaaccagcagagtttcaagggcagaattgggaaatggtaatgagtataggtatttatactcactgtctacctaaaactgtgtgacaactacagagagtggtgctcgaggtgggcttttttcttaaactcagtaaatacttcaaattcattcttaaaaattgaacaatttaaaatatgccaaaatgaaaccttttctatgaactacattttaaacatcaataacaaagttgtggaaccttgtagttagaagggaccttcgacgtttgttagaataacactatctttggtttctcatttgccttctggagtgatacttacakatkttattattcaaaataatttgaaagtatctaccatggcacttctaagcttttcttgtctccagaacagaacatccccagatccttcagccacatgtcatgcaatccttatgggagatgataaacccttcaccaaatgagttaccctcttctaacttgttagtgaccctttcaaaatggaactcatatggggctatggaattatgaccccctttgcccagatgcttttccagtttcttgaacctaggagtgtattaggggtgtgtgtgtgtgtgtgtgtgttagagaagggggacacaatctagtattcacttgtagagtttctgttagcactgccattcattcacaagtacttgggagtgcttcctatgtgccaggcactatgctaggtgctggggacacagtgtgcaagaatgaacatcatccctctgctggtagggccagatggtgcctgagaggtatcctagcccaatgtcctaaaattctgttgagaaataactcctcaaattcaatgacttggcctccctgccagaactagaatccttgtttcctgactgcccagttattcctttacttcaccaccttttatcatattggactcatactcagctaaactgtaaggtctgtttaggctgctgttaaaatggccccccatcctgcccttgtgcagctggtttttcgaactctgacataggacaataaatgtgttcccatcaaatttcatcttgctgtctttagctttttctcacctgttaaaaccttttggattgtaattacatcttttaatgaatttgtcattttttttcctgcctacaaaattgaataagcccacgttctttaattagaaatatgaaatgagaaaaggctaaagataggcctgtgatttttttccccagtttgacaaagatgctccagtcaaccttagaacatcagcaggaggacaagtctctggcacttttgtggaacactattcccagagtccagcacaagcccaagaaatgtttcttgaacaaatgactgcatgaaaaatacactggctatgatggatcagccaatttttaagccatctagctactattattactcacattttcccattttgttcagaaggactttaagtgtccagctctctttacagagaagcttgattcttaggtgttacctgcgagttaccttgatcttctattgaagaaccctattgaaaatggggcttaggatagtcaaacagagcattctcagtgaatctcttctagctcctgatggtcattgtgtttgtgtcataagtgttcactaatgtttacagagtctcagcaacttattcagggttatttggaatacagatgcattaacattagtcccttcaggaatttctccattgccaaaaagtgaacttgttggagaggacttgttgaaaactgggtgagcatgatttgcatggaaattggactaaacttccctttctttaaagttcctggtttagccactcgaatagctggcattacaggcatgcaccagtatgcctgsctaatttttgtgtttttagtagagatgaggtttcaccatgttgccaggctgctcttgaactcctgacctcaagcagtctgccagccttggcctcccaaagtgctgggattacaggcatgagccaccatgcccggccaaaagtttctcgttgagctctgacaactcttcacctctgaagaagaacagaggtgctgcactgtgaaagtatgaagataccaggccaataggataaaacaaggcaggagggaagcttttgtagtgcagtggctacagactccacttggggtggtgaatatacctgagtttttagtgctgctttgcaggctctgacaccctgactcctgaacaggtgtccaaatttcaagctggttaactgaaagataaatgttataatattggtgcctacttcataagattgcggcagtcatcaaacgaatggaaatataaaacatacttactacagtgccaggaccaagcaaggactattgctaaaattttggagagaggggagtatgaagaaattggatagagtagaaagcaggttctttttaatgtgagcctatttaccctgacagagtaaagcatatttcatttttaagtgttatcaaattaagcagatataccaattgctattcattcattcagtaaataaaatttcacttcctattatatgtccagctgtatgctccaaagtaaggagaaaaatgtaaaccatatcaaatatgcacaatcctcaaagtagcctgacaccacttgaatatcacacgcactacagctggaaaaatttcttgtattttgcagctctcctccagctgctacaagtgcctatggtgagacttttgacagtgtgagtggttcccagaaaaaatgatgttcagttgtagaaagaccatggggcagaaagaaggatcccaggagaggggagcacatgtgcagaggcggaacccagaaatgtgcgtttggctttgtggacctctaccagtagttctttggggctcgtatttgcaggatagcagaacatcaggcactgggagattctaggaaaacagaaaccttggactctaggagaagacttactgatttggaaggagaaggtggatccactaagatttatttgcatgtttaattgtattacagagcatgtcatgccatgtaagacacatttgggagttaggagcaaggtttgtaaaggaaatgtagacaaataatatatgtagaggaagcatatagtgtggactctaataataacagcaataccatctacttagcccttactgtgtgccagccccatcctagatgtttagcrcgtattatttcatgtagctctggcaataaacccgcaaagaaggtattattgctcccattttacagataaggtaactgaagcttaaaaaggttgagtaatttgctcaagtggatttcattgcttctcaaacttcagtatgtccacaagccacctgttaaaaatgtttctgattcactaggtctagggtggggcctggggctttgtattcctaatacactcctaggtggtgcccatgcactttgagtggtgagggtctaggcatcacattcaaatcacctgggagctttaaaaatactgccacctggtgctcgctttggcagcacgtatactaaaattactgccacctgagccctgccaccctctgaaactctgatttagttggcctgggatcccgcttggcttccagtatttttcaagttctccaggagattataatgtgccgcaaagtgagaaccactgggttaaagaagaggggaagaaaaagtagtggtcagatggcactggttgtgtttatttctaatataatcaggggagggcctcaaacacaaagcagcagtgagttgtgaaaataattagatgtttaattgacaagtctaattgaatggtagagttttatattgctttatgagttaatgtgtttagtttgaaagggtagtgggggaatttccctcaaagatgtgaattgatagttattttccctttataaggaatatacatgattggtgtaatgatgatttgaattaaacttaatatgcacaggacctttttttaggcaattaagatttccactccctttgcagtattttatgtagaagaaaagttagaatgttgcaaaactgacagtagtttggtaattatctataatagttagcatatggatgatcctgactctagcgtgcttggacctaaaatttaactgaaatttgtttcttgtttttttggaccttttaaaatgcacatgatcagaatcagcatagcctattacaataaggttttgttattagaagacagctgaagaaaaacataatcaacaaattcaggttacttttggattcagcttattcttaggaatatttactaagtggataaaagtacattaccaaatcatttgcaaagtatgcaaatattacagagagcctactatgtgttagacactggacatatagcagtgaataagtggggtcaggttttccctctctccaatcttatattcttttgaagggaatagacaataaacaaatagaaatasatttttaaaagtctagacagggttaaatgctgagaaggtgttaggtttaagtcccagctgaggtccaacaaggtgttaggtttgagtcccagttgaggtccgaggggagtgggtggatgggcgaattgctgaaagaacactcggggggctttaggcaggtgaaatgtagttttattcagcagctttttaatcagcagcttcctcacactaactgtttctcacagtttctttatcttggctgtttgcttcagctttgtggctcctcttatgagcctgctcctgctgcccccagccttgcagctgcactccctggcctatactaccagggttagcagcttaattttttccctctgggcataagtccccacttcccgccttcaaggcaatccactcttccttacaggggtcagtagcattactctctctgggcattagtgcacctccaagccatgtcaagccaacccaaaccccatgggcagcatcagcagggcagttataccttttacaaacaatagcaactcaaagccaagtataaacttacaaagacaggttatctaacaagtgaagtatgcacctgtgccctaaacttgctaagtcactttggcccagatattcgccttagcctattccttaaccaaagcacattcatatactttatggaagggaataatgagggatgtgatagaaaataagtgctgggggaactacttgagataaggggtcagggaaggactctcctaagtgacactgtgctgagatstgaggcatgagaaggagccagcctttccaacaaccagctttttggttggaggggcagagtaagtgcaggctctgcaagagaggaaaatagttgacatattcagggataagaatgggagtcaggccgggtttggtggcccacatctataatgccagcactttgggaggctgcggtgggaggattgcttgagtccaggagttcgagaccagcttgggtaacatagcaagacccccatctctatatatttatatattttttaattaaaagattaaaagaataaaaaagaacrgaagccattgtggttgaaataggattgggagggagtagttgtagcagatgaaagaggggcttatataaacccatggagccagaagacttgacagatcttcataaaaaatgtgaacgttgttgcccggcattgtggcaaatgcctgtggtcctggctactggggtggatcacttgaggccaggagtttgagtctgcagtgcaaaataattgtgcctgtgaatggccactgctgtccagcctgggaaacatagcaagacacatctctaaatttttttttaatgttaatattgttatttttaagcttttattgtctctgtgctcttctggcattccctaaattttctctaatgaacatatattacatttgaaattagaataattactttttaaataattacatttgatttctttttgcaggaaatagccaacatttttgcaccccaggaaagagtttcaggttattttggcttaaataattgtgccattgtagtatctctgtttgtctgttttcctggaatctttgcatttaaacactgatacctccatttattttctagtgacgtccagtatgtttttggtgttaaataaaaaggtgtatatctgcatgaacaattagttactgttcttgttaaaaatttgtatttcaggttttaagggtaggaattttgagtcttccttgtgaaaatgataaggctgtgatgctgccatactgtttatatcaaagttcaatggttgcaagaaattaaaactcaragcagctctggtcagaagagctccttagcataggaagcatagtgagcaggcagcacactccctgggatctagcagccaagaatgtgagatctggagtcttgtttgagtttgtctctaccacttacaacactggaaactgataaccttttttatctttggaggttttctgagcttttctagtatttgagatgttttttcagctgctgcagatcaacccctaaatcaacaagtaattactggtggcttgctgttcacccagcattgcactaagttggtgggatagataagatactgtttgcttaatggaaattgcttatagttggcaaattcatatgtagttaatataagcacaagtttatcttaaaattttttttttttatctatggggtctcactgttccctcaggttggtcttgaactcctggcctccagcgatcctcccgccttagcctcctaaagtcctgggattataggtgtgaaccacagtgcctggccacaagtttatcttttagaaaatggaaattatttttaagttataatttctttcttgacagtgatgtgtggcatttaagaagtcagtaataaaataatagtgtacttccctgttggggcttttcatattgttttctattcrtcaatattgttgattcttctctccgtccctcccctgggacatgggatttagaacagtgtcggggtccttgtagcccactgctcagctgtcctaaggaggcaggccagctgccctgtgctctcactatcaggaaatgagccaatccgagatctctggccagtttgatttctatgatacacacatgctatgaacacagaggccacttcaattgagcccttatttatctacatgcctgagtatcgttttaaaaatatttttattgattgataagtgtacatatttataaagtacatgtgatattttgatacatgcataaatgtgtaatggtcaaatcagaaattcaggatatctataacctcaaaaatttatcatttctttatgttgggaatattcagaaaccattaagtgctcttggtcctggaccaggccctgtgctgactggttaatccaagttctttccattaaacctcacaataattagttttgtgatgcctgatttatagctgaaaaatgaaacttttggcctggtgcggtggctcacgtctgtaatcccagcactttgggaggccgaggcgggtggatcacaaggtcaggagatcgagaccatcctggctaacatggtgaaaccccatgtctactaaaaatacaaaaaattagccgggcgtggtggagcacctgtagtcccagctactcaggcggctgaggcaggagaatggtgtgaacccgggaggcgcagtgagccgagattgcaccactgcactccagcctgggcgacagagcgagactccatctcaaaaaaaaaaaaaaaaaaaaaagaaaaatgaaacttttgagaaggtaactaacatgcctaaggtcatacaactagtcattgttgcagtcaagatttagggtggattggctctgatatccaaagcatttttattatgcttttttcctgtttgttttaataaacttaatatacaaagaaaactgtaaatattagagaacacctatatttccatcgccctgrattagcagctgttaattacagtacagtatttatgaccagtgtttttttccccctttaaccacatgttcctttcattcttcctgctgataggtgtggtatgttttcctgtagtcccattagaaaaaaatcattatttatacgtagttgcttctaaaggttcatcacttcttgtgtgtagttttagaatttttataaatgataatttatacatatatcattatgtaacttgtttatactcaacgttttatttctgagagttaaattgatgttctgtatacaaatccaattcatttagctatcatataggattccattggaagacataccaacttttatttattatcttatggacatatatttatggatttgattgctttcttgtgatgttccttagcttttctttctatcctctgtatttcttgtaaaatttgattagattccagttaaacattacattgtatctcattaggagatacataataggtgtttgttccatcatttatgatgttacgattaattattgggttagaatggtgacaccctgatcctccaatgtaaagtttatattttttcagttcttgcaactaaaaagtaatcttcgtggtgttactttggcatcatacagatagccaattgtccatcaaccttttatttattatcaaaactctgatgtataatcatcatcagtaatttcatgaaagattgcaaaatgacagttttcttattctgtcattccatctatagtagtctctgcttatccatgggggctgtgttcaacagcctgtcccccaaacatgcctgaaaccatgatagtaccacaccctacccaaagaatgccaaggtcaccttttcacttaaaggaagcactttgagcttctctttgacctatctgaagtgtcagcatcctacttttctgccttggggccattattaggtaaaataagggtgacttgcacacaagtactgagataccatgacagtgaatctggtaactgagggctcctatgtgactaacaggtgggtagcatatatagtgtggatacgctgggaagagggaggattcatgttctacctgagacagagaaggatggtgcgagattttgtcatattactcagaacagtgcgcgatttaaagcttatgaattgtttatttctggaatttttcacttaatatttccagactgtagttgactgtggataactgaaactatgggccaggaaactgcaggggtaatttctagacatttctaattggcatttttcttttaaaaatttttaaattatttatttatttatttttgaaacggtcacgctttgtcacccaggctacagtgcagtggcacaatcacagctcactgcagcccggacctcccacacccaaaccatccttctgcctcagcctcccgggtagctgggaccacaggctcatgccaccatgcctggctaattttattattcttttgtagagacagggtctcactatgttgcccaggctggttttgaactcctggtctcaagtgatcctcccaccttagcctcccaaagcattaggattacaggtgtgagccatgacacccagcctataagtggcatttttctataaagaagagctttttctcttcaattagagctatttgcttcctctgaactatagatgattgattctttaaagcaggaaataaaaaatgctgtctttcctccatcatcccagtaattttcaagtaagagattggtatagtagctaccgagttgaaacattttacattgctcatgtgcagtgcagatatggtgttctctttaaatttatggatgaaacaaattgtgtatataaggattttgagcttctaaacaattttttttttttttaaagtagagatggggtttcaccgtgttagccaggatggtcttaatctcctgacctcgtgatccacccaccttgggcttctaaacaaatttttaagaaattttatggtttttaaattttttaagtgttttccatattttttgcaattgatttataattatgctgtggttagagaatgtagcctgtattattgtttttaaaattgttgagaaggcttgtattacctaatattattagttttctttttaaatgtgttatgttgtcttaaaaatgaatgtttctattctttttattggatgaaaggtactaaatgtttcatttgatcaagattaataatattatttgaaacattcatatccttttttatctgcttgatgtatcagttacttagatgtattaaaaatctcccattaggattataagttttcccatttatacccatactcttcaggttttgctttatatattttgatactgtgtttttatggttatagagcttcatgattgttaaattatctttttggatggtttcttcttacagagctttatgataaagtatctttttggatggtttcttctgttagtaataacatctcctttgtcccttattaatgatgtttgtttatttattttgagacagtcttgctgctctgttgcccaggctggagtacagtggcaggatctcagctcactgcaatctccgtctctcaggtttaagcagttctcctgcctcagcctcccaagtaggtgggactacaggtgcgcaccaccatgcctggctaatttttgtgtttttagtagagatggggttttgccatgttggccaggttggtcctgaactcctgacatcaggtgatccgcctgccttggcctcccaaagttctggaattacaggcatgagccaccatgcccagcctgagagtcttttttttttagtagataagtttacatttacatttaccttaattaacagcacatttatatttattcctgccatcatcttttgcattttgtgtttgcatgcattttttctttttatttcccgttttcctaccttatattgaatagacagataacttaatttgtgtcttctatttctcaatcaatttggaagatagtgttctatatttgttctttcagtgatcaatgtaaaggttaatgtacattcttaaatgaagtttttagcaaaatgtgaaggtttattcatatctctttgttaaaatatactaagaatgttagcatattttacttttcctatgaaacatctttttgtagccatcatgtcatttttacctagtattttagttacattttttaaccacatgaaaaaattttttgcccctccctccttttcaggataatctattttgacagtaagaatcattttagagaacacaaatagaatggaaatgatgccaagggtagaaccacagctgataataacagcttctgtttgttgaatacctaacacaggccagaagttttgcatatattatcactaatttgcactatattaatatcttcaatatagagacaggaaactgaggcttcaagagatacataacatacccattcatcctggttggtaaaggacagagctggagagtggactttggtggctggctttggagccacctgtgttgtaggtgacctagtctgttctggccagttctttagagtccgttccttgcttttggactagatagtttctcctctttttgctgctgctttattttattcatgggtccataaatgatagacatcataaccatagtcacattctcacatttagaaactatggcttatagaatgtgcaaaaaataacttttataataagatttgccattttaagttcttcccattattgaagagtagtagggcccccatcatccatatgcaattataaatggcacctcttacaacacttgccttctgtttttccaaaatctgttgaaatatgctgatttgttagaatgagatatttgttgtcataaatgtacaagtcgttagtggctgagttgtaaatggttccctcaagggttgcgtagtgcccagtagccaggtgaggagaaaacgtataaaggcagtgttaattactttcataattcttgctctcaaactattccatttcaggtttttttctgggattggcagtgtatggcaagtaaaggggataggggaggataggaggtgggtggacagatctatattttatccttttacaaatggagatagcatatcaagcctcagtgtccattgcactcctgctgtaggcctccctttgtcttgcactttgactcctgagagaaaaattgtttttgccaacaaggtcatagaatgtaagtggagaggcaagacacatatacgtggaaccaaactggagagagtttgctaaaacattacattgcgttgtgtgggttaaaatatggaaagcattacatatagaaaagataattgtggtgagacgtaatcagggcaggtaagagatgaccagatgaagaggacaaggagccttgaaatcctgttattttcatatgtattaagagacagaggagctgtatgtccagagaccctaaagttgacccaaggtagaacccttggtagactagccttcccataaggacattaatgtctgtcctccatagttaattccagctttccaagaaccctcccccatataattgtgggtaaaagggcacctgccagcagcctcctcagcccacccttcctcatgttgttcatctgtcccttatgctaaagttccttagcatttgatgtaaacagtgtgtactgcactgtgctgccatgtttatacgttgtcttgggatttcttctttctcccgtctcctacttcctttggtctccttagtgcctggtctttggaagcagatgtccagtaaatatacatacatgaatgcccttagactgaagtctatgctcatggtgcaaggaaagctctatggaatcccgaattataaaccaccctctgccttgagatcaggaacagagctgtcacttcacaatctgaatgttctgtgcctcctcttgtctcagctggagcttctgtgtaaaagcaagtgttttaggagyttccatcccatgattctgattgggtgtgtgatttctgaagaggttggartgggaaatgtgaaaacttaatactaaggacgggcctttgatttaaacagttgctatgcagactgagcattgagtttaaccaatgaggtaaaaggaggggagaggtggtgtttggggcaggtaaaagctgtttcatagtcagtgtttgaaaactcaagagagatgatcctatttgtgtctggaggacttgcctttcaggtgaagaatctctgccttatcccacatcagcagtcactaagaatagaataatgatcactatagggtttttcttatccagatttgctagaatccgtatcagaacacacagctgagaaagacccttcgtttatttgggcatgtggctagtaacatccccttgaattaaatccttctttttttatagttataaagaggagatacattttatttatttgtttttatggtagatttattttttaacccatcattacccatctcyttctgtccctatcatatctgcacctagsatagaattatatttaacagtaaactgttaatttaggtagagtaggataactactacaaaataatcaaaggatatgttttaaccttggtcttgatgtaagaagctaaaatagatttttggttattggtttctatttgcttacagttaaatgaagtagattcaagtcagrattttttgttttactctggagattctgttctcctactctttctccttgagtagatagtcagatgtcttttgaaaatgtgttttcggtgtggaatattaacccaatctttgataactcttccagaaccttcrgctcgcgtgcttctgagctgctgtggatggcctcggctctctggactgtccttccgagtaggatgtcactgagatccctcaaatggagcctcctgctgctgtcactcctgagtttctttgtgatgtggtacctcagccttccccactacaatgtgatagaacgcgtgaactggatgtacttctatgagtatgagccgatttacagacaagactttcacttcacacttcgagagcattcaaactgctctcatcaaaatccatttctggtcattctggtgacctcccacccttcagatgtgaaagccaggcaggccattagagttacttggggtgaaaaaaagtcttggtggggatatgaggttcttacatttttcttattaggccaagaggctgaaaaggaaracaaaatgttggcattgtccttagaggatgaacaccttctttatggtgacataatccgacaagattttttagacacatataataacctgaccttgaaaaccattatggcattcaggtgggtaactgagttttgccccaatgccaagtacgtaatgaagacagacactgatgttttcatcaatactggcaatttagtgaagtatcttttaaacctaaaccactcagagaagtttttcacaggttatcctctaattgataattattcctatagaggattttaccaaaaaacccatatttcttaccaggagtatcctttcaaggtgttccctccatactgcagtgggttgggttatataatgtccagagatttggtgccaaggatctatgaaatgatgggtcacgtaaaacccatcaagtttgaagatgtttatgtcgggatctgtttgaatttattaaaagtgaacattcatattccagaagacacaaatcttttctttctatatagaatccatttggatgtctgtcaactgagacgtgtgattgcagcccatggcttttcttccaaggagatcatcactttttggcaggtcatgctaaggaacaccacatgccattattaacttcacattctacaaaaagcctagaaggacaggatactttgtggaaagtgttaaataaagtaggtactgtggaaaattcatggggaggtcagtgtgctggcttacactgaactgaaactcatgaaaaacccagactggagactggagggttacacttgtgatttattagtcaggcccttcaaagatgatatgtggaggaattaaatataaaggaattggaggtttttgctaaagaaattaataggaccaaacaatttggacatgtcattctgtagactagaatttcttaaaagggtgttactgagttataagctcactaggctgtaaaaacaaaacaatgtagagttttatttattgaacaatgtagtcacttgaaggttttgtgtatatcttatgtggattaccaatttaaaaatatatgtagttctgtgtcaaaaaacttcttcactgaagttatactgaacaaaattttacctgtttttggtcatttataaagtacttcaagatgttgcagtatttcacagttattattatttaaaattacttcaactttgtgtttttaaatgttttgacgatttcaatacaagataaaaaggatagtgaatcattctttacatgcaaacattttccagttacttaactgatcagtttattattgatacatcactccattaatgtaaagtcataggtcattattgcatatcagtaatctcttggactttgttaaatattttactgtggtaatatagagaagaattaaagcaagaaaatctgaagtattgtcttgtttttaaaaaatacagttcctagtgtttttagaagtcacttaatttgtctcatttttccacctggaaattaggaataatgtagaatgcaaggcagtaatttccttttggaaaggactctgaaggcagaaaagaagggagagaacctcatgggcagaatattataaaaagagtgtcatattccagcatttgaattggaaagagaagagtgaagatccaagttgcattattaatctgccctgtgwtttttccttttaacaatcagtttgagctgctgctgttatgagtttctcatcaagatgaaagccctaatatgtaaagtcaaatccgatttaaattttgtgcttttatagaaagaaatttcttcatagacgtggtgayatatcatttgttggacctgctaatagtaggtcaaaggggagcactccttgccccctgttcctgggtttrtgcagttttctttttagagtttatatagggcaagtggttctttttctctgaattacaggatggaaaaaggtcatatcctttgtcaggaaatataaacttgaaagtatgtagtcagctcttgtaatactcatatttatgattgtcctatatgaaaaacaacttcagttaaaactataatgtgtgattctgtataacaaggtgatgtctgtttcccagggctcagacctaatccagttataataaaatcaattaaatgaaatattctatagaatcgatctatgcccttgttaatctccatccatataggagtcacgttctttaagacagatggtggtagttatttttgtggcatggttagatttgactggttttgcagaagattacagttatgtactgcataatgacatatacaatagtggtcccataaaattataatggagcagaaaatctattgcctcatgatgttttagccgttttaatgtcatagcctagtgcattactcacgtgtctgtggagatgctggtgtaaacaaacctactacactgccagttgtataaaagtacagcacattcagttatgtacagtatgtaatactgataatgacaataaatgacaccggtttgtgtatttactttttataattagagtgttctattcctacttattaaaaaaatgtttaatagagccttgggcaggtccttcaggaggtattccagaagaaagcattgttatcataggagatgacagctccattcatgctatttctcctgaagaccttccagtgagacaagatgtggtgatagaagacagtgatactgatgatcctgaccctgtgggcctaggctaatgtgtgtgtttgtgtcttaagtttttaacaaagtttaaaaagtagaaaaataaagtttaaaataggaaaaaacttacagaataaggatataaagatatttttgtgcagttttacaagatgtttgtgttttaaatttaagctaagtgtcaaaaaactttgacaaaagagtcaaagtttgaaagtttgtaaagttaagttacggtgagttaaggttaattactgaagaaagaaaattgttaaatgaatttagtgtggcctactttaaatgtgccatgtttgtaaagtctacagtagtgcacagtaatgtttgaggccttcacattcacccaccactcacttagtgactcacacagagcaacttccacccctgcaagctctattaatggtaagtgccctccctatacaggtgtactattttttatcttttatactgtttggttttttttactgtgctttttctattttagatacaccagtaccattgtgtgacagtttccaacagtaagtattcagtacagtaacattctgtacaggtttatagcctagaagcgataggctctaccatgtagcctaggtgtatagtaggctatgccatctacgtttgtgtaagtacactctaatgtttgcacaacgacaaaatcacctatttctcagaatgtatctccattgctaagtgccacatttctgtatatcgatgtttgggaagctaactcaaaacatttctagagagaacttttaacataaaaaataattccctttcacttttagaaaagaccaaaaaacaaaaaaaaaacaaacaagtttcagaagattgtttcttttgaactgaagattggtgcctaaaagaacctacaaagttaaatgattaggaaaacattaagagattgggtcattatattttttgttttcaactatattaagctttcaggaagtaaatattagctgtgttattaaaatcatgacctggtgtttaaccaaatcagcagctttaaaaattttaactcatataacaacgtttaatactggagcttatccttgggctgatttggtcccatctgccttagccctgccatccccatagtttcacacaccctctgcctcacttgctttccttgtctgcaggtgttgagtttgtgacttttagcacattagttagctttgctaagggtcacaaatgctacagtaacgcccaaatctcagacttgatgacaaccaatgttttcactcagttgcatggcagtggttggctgcaaccctgctctatgtctttttcattccaggatccaggctgatgggcagcccgtttggaacatgctgttcttatagaaggaaattaaaaagctggtggaagcacagtggcatatattaatacatccactggctgagatgaatcccttgccaagcccagtgtcactgaggtggggaagtatatttctcttgcaggaagtaactgcaagtgatgttgcagcatgcaggaatgtattgttccacagaatggggaatgaaaaactgagtgcagtcgtactgtaagctgccacactcagtgtctgaaagggagagggagccttcagacaatgccagacaactctgcaacagaccccaatttaggccctgtaaaccagaaatgtaagaaataatttttgcctaatgctgccaactttggggatgctttcttacgataattaaaacatttctcaccaaggaaatttcccattgtctgtggccccggggccaagacttctctcctcacatctggccactcctctatacatgccgggccttacccctgcttgaggttatcaacgagtaatttccaaaactcctttccacttagccctctttctgtttcactttctcctttcagaccatgtgggaagcaaggcaggggtgaatgctgcttaacatttctccccccccacactccccccaaaaaaactcattcaaggcatttcccagataaaaggaaatcaacttctctaaagataaattttgtcattcttttaaaaggttgcagcagctgctgtgatggttctaaatgccactcttccctctcttgcaacatatgtacaaactacagaaacaggatgaaaatataacaaaatttgaacagaaaatgcctctcaaaagatttcttcctactttaaaagtaccttttattacattctcaacaatgaggataaatcatttttataacacagatgttttaacaaatacattaacaaatttaggtaaaggtaaaaagtggcatcaaaatgttatgagcaaaggctgctgcggtgcaggccaaatgctgtgtttgccggtaagcccccagcctcacgtgcccaccatcccgctttcttctgtgcaggcaggggctgcctcccatcctcagtcacttttgttgtttaagacggtctcgctctgtcgctcaggctggaatacagtggcacgatcatagctttactacagcctcgagcttttgggtccaagtgatccacctcagcaccccccaagtatctgggactacaggcgtgtgccaccacacctggctaattattcaaaaactttgtagagatggggcttactatgttgctcaggctgccactgccctttaccagcctttgttgcccctcatgctttgacatgtgaaccaatcccagccagtgggaccccaggcgatgtctgctggtgggcttctgggggtattcctttctaataaagacaaaggagaaattcttttctttggccagatgttgtgtctgcaatgatagtatctgaagcaaccgtgtgggtcccatgagaacagcctaaaggccagggcagtggctgaggtggagaccctggctcttgatggcatcattgagccactgaaccaaccctgtgaccacagacttcttgcccctgcatatgtgagttcaccaccatggtgggtgcagtggtctgttacagctgagggcatccaaagtttaggaacatacgaaacagttttcctcttcctgagggtcagcgccaatgatgagcggggccgaagtgaagagataaacccaatttcctatgaggcagatagaaagcagcttgtccgtgacacaggagctccatgctctgggatgcatcttgttggagaatggatcccagcctgagtgagcagcccacactgatggattggggatagcggaaattaaaaaatgccttctgttcctctcttccttgctcctcaataggtgattaccttccatttcaggcagcagagtctgaattcctatctgctgggagcacggaaaggggcacagcatcctggttacaaacctgaagagtgtacacatctctcactaatgaagccatcacaatatggagccaggtcttcccatttgaacgaggagagaggacagggtcacatttgcttgccttttactgcttactcactgaacagcatcagggaaggtttactttatgaacctggcacaaagtaggttctgggcctgatgttaacaacattcactctgccctcttcacaaatgaaaaggtggaaaatttctgacttctggtaaattcacattgcaatgactgtttctctggacacagatcttgcagttctcccatccctcaaggctgctgtgattgatttattttaaaaagtctttcacggtttcaggagaagaacagttgaaaaactataggtagaggttaatttggtgttcacaaatcaagtgatagttcactctatctcatagctcaatgaatagtaggattaggagagaaatttaacttcacttttgtagtgaatccctttttatatgtacctttaaaacttttgcacttccttttttttctcctttagtgaaccttagcatataaacaagataattttttaaaaaagcattttataggtagaaatgaacttttatatttatcagacttgaatttgaaagcaggtagagtaggcaattgtttcgtctgcgtaacaaactccttttctttcccctttttttttaaaaaaaattattctttttaagagatggggtctcactgtgttgaccaggctggtctcaaactcctgagctcaagtgatccttctgccttggcctcccaaagtataggtattacaggtgagagccactatgtctggccccaactttttctagaaaattctgagaattgtctaatccacgaactccatctacatggttagtccaagtcaccgtgttactacaatatggcctaagccatgagtactacccactcttcagagtctagaatcctggagagagtttacctctatttcattctgtctccaaattttacagtatttcttcctgcattgagtgaaaacctttgcagatggatattctgttctgaacacttttctcagaggtgcatcatgctgtgttgctggagcctacatctgtgtataatgtaacccttgttaccttatagtaattactatataaactttgtcgatgtgttactataaagctgggtaaaagttgtgttaggtttacaataaacattttttgttgcatacattgtatatatgtttataaattgccttgttttgaaccagagccaggcttattcccattccaaatgaaagcaccaaagtctcaaaacctcctgcctcttgcttctgttaggctttggtcttatcctctacccatgaattgtttctttgctttccacatagaaccctagctcaagctactccaactcaaaagcatagagaaattataaaattcwagaacagatgttagaatggaaaatgagtttaacttaaaagaataccagcagtctcatgtttaaagtctaacaactttgtgtttatttttgctttaatcttgtcatgggtaaatttttagctgttcatttttatacaacaccacaggatcagagatagcatgaacacattagtctctacaaggctaattctacccgagcacccatcaaagcgacccaaatgacacgccatgcatcttgagtgaccgtgcactgccatatactctgagctctactacaggtaatgttacaccaaattgacattgtaactgtgtttcaaatgtctcttagagacaaatacagatcagtaggtataataacctctgaagacttccaagagtaatgaggtttcgccaagccttgttgtatttatcatggatggttttcaggaaataacttacgagaaagcctgattgattttacagtcattttgacctgtgatttatttattaagtacaatttgaagattcctaaaataaagtattgccaataaattatagatcctgtatctctttataaacaaataatcccttgtgatttttaaagttgcaagaaaatgctgatggaaaaattttcatgatgttgaaataggtataaataaaagcttatacaaagccactgtctcaacatcagcaggataagagagaagaacttctgagacattatactgttccccaaaaaaacactactttttttccttcccctttttctctcctcactctgtgctttcctcctttccatccttaataactgagctccatctatggttttaatcttactaaatcagaaattggcttggtttcatttgaatttccttttatatgtgctcatgattaaaaacaaaacaaaaaccctacttttgatcacaatcagatctttaccgtctctaaccatttactgcctagtatatgaagtatatgaattattctaattcaataggattctaatgcaatttggcaataactagtattatttggatttaaaaagccattggcataaacagagatgtttaggggaaatgagcaggcaagcaaataatttag

SEQ ID NO: 93625 - DNA, 241135 bp, Homo sapiens
  misc_feature (1)...(241135): n = A,T,C or G
ttctttggaaggaaaggaagagagagtatttttaagaagtaggaagtatttttaagaagtaggaagctgctcttgaatttattacttttctttggaaggaaaggaagagagagagagagagagagagagagaaagagagagagagacagacaggttagcagtgtgaatagtgggcaggggacttcagagccttccgctctgttactgatcttgtggctctctagcaagaaggctcttgtgcttttgagcaagtcattttacctgatttccatcatctgtaaaatgtagcagctcaattgaatttttcagtctctaaaattttggtatcactgactcacagatacagagaaagtaaatgagttgcctaaagttacgtgatttactcatggcggagccagcactcatccccctcccccatctaggtccctgtagttcctgccttgtatattggtagtagattatctgagtgtagtttggacactttctgtgttttctgagtggactcctcattaatccatctttagtcaatcaagcactcttggttattacttaaagtgataacattaggttctttagttggtttcctgtttttgacctgttggtgaatttttaccaatctcatgtgacaaagatcgtggaagctttaaaaaatgttctctaaaatcttaatgcaaagtggcattctccttcccttcttagagacattagctccactggaggaaaaaggcacaaatgcctatttcatcttaaaaatcaattatcttgccttacaacataaagcagtattttacacattgaattatttgagttccaccttgacattttttcttctttgattgcccccctgctgttattttcttaacattttttctttaaatggacctactttattttacttaagtgtattttcaaaatttgataactgtgaactcacaggttgatttattatgttgtttccaattcactttaaagtaataaactatatataaaaaaagctttcttgtaccatctgaaaccttctcatgtgtatatacagtactttgggaaactttgcataagaccatctgggtctactggttgaatggtaagagaagggagtaataaaaaaataagaaacaaaaatgatactgttataagcttataagccatgtgggtaataaattagaatggaaacatgagtttgtaaagacagataaatgaatttccttgacttcaagccactgttattgtcaagataaagttgtgcatgtagagaaggaagtctaacaaaatgacattccattctggggcttaaatgcttgcccttccttcttttttatgactcttgctttattgaatagcactggggtcataaggccccagtagatgtaaatgctatgctgtacatcttgtcaggaaggccagcctttgtgtctgcgggaggaatgcttgtccttgttgcaagaaggtaaaacagtcagaagcaaatgagatcagatttagattgccaagcctcgggtgggacccttggaggtcagaacacagacaaaaggaaacaggaaagcatgtttaagagtaagagaagggtagggctagcttcgtggtcatgtaaccatgtgaacttgtggttgcacaagttcccatgcctagaagggccctgaacttggtttaatgctctgctgtcactgtcttgaaattcttattaatttttaaatgaggaagcttgtatttttattttgtactgggccctgcaaattatgtagccagcccttggtgtggggtagacaaatgcttatagaagactttgtggtttaggttcatggggtagaactggaagagtgagaactagatagtaagttgcaaaaaaggaaaaagtttcagctactaactggtggtgtctcttctgattgaccttagttcatagattaaataatttaacattggactccaggattctttttgccttaaactcctaggctggctgactaacttccttccatggttatgaagtagtagagggaatggcaaattatatctggagaacatggataatgaaatgaatagatctctgagaacttgaaaaaattatgtagtaagtttgttcctgatgagttaaagtgtaaaaccaactcatagtggattaagtaggggcttgcatgtaaatatccacaaagggtggctataagacaacagagagtgatgggcagtagaggtgatggtgggcacccaaggaaacatagcatgtttaaaggaaaatctgtattgaatttcagcctgttattgccaagttatgttcagtctgttattgttccttgtagctcaaatccttccaggttttttagaagtagctggaaatctggatttttgactgtaatatttttcaattaaagaaaaacaactatgtagactatgtctgagttgaattcattttaatccttaagtggactttttaaaaacctcttttctaaagattaatataagaagtgaccattcaaattactgttttagggagggagtcatagcaatgtgaggccatctctagtaaggagatggaattagagtaagagttgccagtggatactgaggattatgatacagaaggagctctaaattttctatattggagggtcttgggggttaaaaacaggcttgtctttgaggacttatgctatggcttgaatgtgtccccaaatatcatgtattggaaacttaatacccaaatttatatgttgatggcatttggaagtgagtcctttgggagataattaggattagataaggtcatcagggtaggcctcccatgatgggactggtagctttataagaagaggaagacagacctacacactacttgccttctcaccatgagatgccctctgctctgttatgacatggcaagaaggccctcaccagatgctggtgctatgctctttgacttcccagcctccagaaccattatctaaataaatctttattgtttataaattacccagtctgtggtaattggttatagtgacagaaaacagactaagacaacttatttgtaattatgtttgcgtagcaaactcactgtttttacttagagtatatgacgtagtcataagaaatagccaacctttctagtacattttttcccacaccttagataagattgaaaaaccagcaatttcccatctctaggagtgggtggggaactcttagagctgctggattgtaaggggaagtaaaaaaaaagttctcacaccccagaccagtcttttacccaccactcttatggtttatttttaaaacaaggtcatcattattatggatacatcaggctttcttagcctgatatcattaaacatgcaattcattttgtgatttcccctgagtgtgtgctaaccttctgaatatgatttggcttcccaactggattggtcagagggagggaatgggtaggtcctgcagtttagaatataggtgtttctatgactatttattgttaattataacttaataaattgacattctagcattaaacagcagtcttgtgactgtggtcagtgaacctgccagtgaaatttcgaatctctttggtcagctgacacactcagttttgaacttgggcagctcagaaccagatcctagactatagcaaactggtcaaagtaatgaatgaaattttgggagccccgttggaaagcctttccctaggtgacataaaaaatatatctcgaatgtatgcatttttcctatttgaatttctttagtgatagagttgagacatacggtttataaaagtcatggagtagggagggatagccccatggaagtgttaataggatttcagataattttgggaaatgctggtttaagtgaaggtaactgatttctttatgaggacttttccagaacatttattcttctaatgagtgatccagtaggaacaaatggtaagtggtgtttctcaacctcatttgctaatggtacttttaaaatgtttccttggcagcacttttggaaagcatcgtgaaatatttaccaagtgcagccttaagaatacaatgaaattgagatatttctggaattttcctggtgtctagtcagttttgggaaatttgtgctgaaccccagtttgcattgggtttcataagacctaccagagagttctggaatccacaggaatgaccatttgctcactaggtatctgtattagtgagagttcttcagagaaacagaaccaataggatgtagatacagatgtacatatagatatacgagctgaaatttattagcgggattggctcacacaattatgaaggccgagaagtcctacagtggacggcatgcaagctgaagaacccaggaagccagtggcttggcttagttcaagtccaaaggcctgagaaccaaggcctggtgtaactctcaatctatggtcaaagacctgacaacctggggatgctgctggcacaagtctccaaaggctggagaacctggagttcttatgtccatgggtagaagaagatggtattctatctccaggggagagagagagagagagagagaaggagagagagaaagaaggagagagagagagaaagagagagagagaggagagagagagagaaagagagagaaggagagagagagagaaagagaaagaacatatttgcctttctttctatctgggctgtcagctgattggatggtgcccacccactttgggtgacggaggatcttccttattgagtcgactgattcaaatgtcaaatctcttctggaaacactttcacagacatgtgcagaaataatactttgccagctctctgggtatcccttaatctagtcaagttgacacctaaaagtaatcattacaatacatgaacctggaattgtcccagtgtggacccaaggcagaaatggaatttagtaatctggggttgggaatttggatgtacatattgtgagtcatcttggaattgccagagtccaagactttttttttttatctatatatattttctcctgatagcttacttcttaaaagggaacttcccaggttgaatatgcaatgcttattaagacccattccagaacccggctgtgttctcacagataggactcaatgagcacaatggttaaatctttatctttacagggatttttttttttttcagaggattggagattagattatagagtaatatggttttatagacattcatgttactttctttgtttctagaataaggaaaaggaatgcagagctacatttcttaatatgaaatggtgattgccagtacagcccaactgtatattttcagtttgtaatgacaacattaggaggaaaattgattagtacttttaaaacagtaggaaaattatttctgcccaaacattgattagcctttgaatggactttcttataattcttttcttccacagactgcagggtgcagcacagtcatattttaggcagagtcaagcagagaaacctacttgccgctattaaacttattactgccttttccagtgggtgcaaataactttgtctccagtagttacactctcctggcttgataacacataaggacttctttgtttattttgattaaagagactaaagatacttttgtcttatgtgaaatgtgaatacagtgaaatattgaaattttttgatgacatatattcctccttttggcttataaatgtcaacttgtttagcttccttgcatgagtgctttaaaatttattagctgaagctcaggtaatattaatttgttcctggttaaatgttatataaaatataggaataaagaaaactgaggtccttaccctcaggtaacttatatatttgaggagttaagacatagaaataagataaataggagagtttatgatgagccccagatgagtgggttggaatattacataaccaatacagggtttcagaaggagagagattttgtgtgcgtgcatcctgaaatagttggggaggactcatgcaggagctggaacttggagataggaagaattcatgcaggtggaagagggtaggagggatgctggtgccattagcagagagggctagaccagaacatgcctgctttttcaacagtgagtagatctgtttggctctaatagaggactcatgatggggggtaatgaataatgggaaataaaactagagaggtaggttgaattcaaattgggaggggctttgaatgccaggcaagggaatttggactttattctgtagaaaatggatgaacagtgaaggttcttagccaggaataagaagaaaattgaagaaattgctttgtagtttagttagagcagaagcagcgtacagctctgaaccyaagtgccttagatggaagataagggcaaaaagaactgtatgcaagctctgtcttcacttctgatgagatgcaggaagaagttagctgcttaattctctttatttttccttctctcatttaaggcttgtattaaatctctttttcagtcttaaaatgcattaattcaaatttgaccttccttactgtctgatagttgaatatccaaagctattttcagttgttccagattgtcacagattttgatgtctaggtgccaactggaagggccaaacctggcctgcggaggattgtttttaaaatctgattctaaattaagcactttgagacagaagaaatgagatgtggcctagttctaactcaccatttagctaaatgtatatgtatttttttctctgcctaaatatttgtcttattcttttagacccaaaaatctcagagccaagaatatttagattccctttcactctttcactttttccaatagtttttggcttttactattcttaataagttacacttataaaggaatgtctccaaatctaattcttttttttaaaaaaaattgttttaaattcctggccctcctcctatcctgtatctcacaaattattaaaatggaattgaatttatttcttgaaggagaagctactgataggatttagacttttaaatatctaaaattaagttctaaacaatagtgttcctattagcaatagaaattgtggttatagagaaacatagtatagtgtaagctttagagcacgcctgtccaacccgcggtccatgtgccatatgcagcccaggacggctttgaatgaggcccaacaaaaattcgtaaactttcttaaaacattatgattttttttttgtgtgtgtatggcaattcttttatatatatatatatatgttttttttaattgtactttaagttctagggtacatgtgcacaacgtgcaggtttgttacatatgtatacatgtgccatgttggtgtgctgcacccattaactcgtcatttacattaggtatatctcctaatgctatgcctcccctctccccccacaccacaacaggccccggtgtgtgatgttccccttcctgtgtccaagtgttctcattgttcagttcccctagttcaaccattgtggaagacagtgtggcgattcctcagggatctagaactagaaataccatttgacccagtcatcccattactgggtatatacccaaaggattataaatcatgctgctataaagacacatgcacacgtatgtttattgcggcactattcacaatagcaaagacttggaactaacccaaatgtccaacaatgatagactggattaagaaaatgtggtacatatacaccatggaatactatgcagccataaaaagtatttggcaattcttaagaaaagctcatcagctattgttaatgtagtttatgtgtaactcaagccaattattcttccatgtggcccagagaagccaaaagactggatacccctgcttttgagccagaaaaacctgttttaaaattctccctctgccactcaccacttaggtgatctgaatgtattactgtgactacacatccttatttggaattccatgggtagaacttaaagcaagttcttttctctttacataagtggactctggtctaatacttacagtgatagagtatgggtaaatacacaaatagacttttaagggtatcctttagccttcagactttctgagacccgctgagatacagaagagaagaagtggagagattccatgggcaaaaagggacttgagagttatggctcctcaagatctaggttcttattctcactgagcctcggcttcttcatctctaaaatggagaatatttaacttgtagagatattatgaaggtaaaaatagataatttagcacaatgctatatatatatgttttaaatacttgtcttttgccagataccggtttgcaaatcttttcttgccatctatggattatgtttccatcctcttcacatgtcttctgcagaggaaaagtttttaatcttaatgatttacaacttgttagtttttccttttcctggattatgctttcaatgtcatgtctgagaactgtttgtctagccctaggttatgaaaattttttctatgttttttaaagagccttattgaaatataattaacatactgtacaattcacccatataaagtgtacaattcaatagtttttagttaggttcacagagttgtgcaactgtcattctgataagttttagaacattttcatcaccccaagcagaagctttgtacccattagcaattatgctctatttctccccatcttccttgtccccccaacctaggcaaacactaatctactttctgtctctgtagatttgcctattctggacattttatataaatagaatctgtggtcttttgtcactggcttctttcacttgaacagtgttttcaaagttcatccatgttgtagcatgtatcagtatttcattccttttcattgcagaataatattccattgtattaatatgaatatataagattttgtttatctattcattagtttatggacatttgattgttcccactttttggctactatgaataatgctgctatgaacatttgtgtacaatatgtgtatggacatatgtttcttatatatccaatatgtacataaaaagaatatggtacatatattggtgtatggttggtagaaatgcctattcagagtctttgtccattttttgttttaatctttttatcattgaattgtaagagttttaaaagatattctggatataagtcgtttattagatatatgatttgcaaatgttttttccattctttgggttgtgttttcatcttcttgatgatatcatttgtagcacaaagttttagattccattgaagctcaatttctctatttatttattattattatttttggtctcttgtgtgctgttgtatctaagaatccattgcctaagccaaggtcacaaatttactccaatgttttcttttaaaagttgtatagtttttgctgatacatttaagccctattatacattttgacttttgtgtatgatgtaaaaatttcttatgcttccttctaaaaattatataggtttgtgtttttgtgttttacatttaaatctgcgatccatttaagttaatttttgtataatgtatgtcaattatgccagtatcatttgttgaatgtaagctaaatttttaggtaaaaatttaagtgccctatatacagtcagacttcaagctggtttttcttcagagaaggaaatacatttgagaagggatcttccactttatttagactttaaagaagaaaaataaatagaaagtagaaatattaagaaactacgaagtaggtgtaccacctccatttttccaattgcaaaaagaagatagtttttataaaggtgcttcataataccacttaaaagatttgcaaatagaatagtatttaatgagattatcttccaataaagaaaatggaaaggtttctcactgaaggtgaaaacacatatattattttaaaagttctgaagtcttcaaactaaaataatgtactataacaaaaaaacttggtttttcatatttcaagtctttttgtctggatctttgttcattcatggcttttattaggtttgcaaacagttggtggacatgtggtgaagtcacacctcattaacagaatataaattttccatgtggttttgttgcctctttgcagttattttgctctaagacaaacttctgtttcataaaagttgggcctttctgtcttgggaaatctctgcagatacttcatatttgttttaaattacacatcgtctcttaagttttccagtcatgctttatacttcattgtgtgccttaaaaatgttgtattattaggatcctcaccttgaaagattgtttcaaaaaattgttattacattgaaataagtcttttaaagtacaacagtgtcctgttatctagattagatggataactgaggattagaatatgtatggaagatcagtcaccagttaaattggttggttagttataaagtatatgttgacagtgtgcatagtgctttgtgatactcttgaaaaaaattttaattgacatataattttataattagcataccataaacttcaccttttaaagtgtacaagttagtgcttctttttaatatgttcacaaagttgtgcaactgttacccctatctaattctacattgttatttgttaattgcttattatttatttattttttactagttttttatgtgtagcttacttcaaaatatatttgaggtaatttacagtaagagactcattataacagggccactatgatataagaggtcaaaaacagtagtagaaaggaaagaataccaaaaactcaaactgaaattaatgtagtattgctattaggcaaagcatataaatccagaactctgaatctggtagcatttttttcttctatcatggtgcaaaatttatttctcctaagaacttgcttttcttaaacaagtcaaatcacactgtttcttccctctttaaagttccctcttgattctcacagccaaaagtcatgtttcatattaatgtttgagacttattcaaggtcacatatatttggggggcaaacatggcatatcttcttgtagtatcaatttttcctaaaaaatttagagaagaaccaatattttatattaattttaaaacattgcttaatgtaaaaaatagatatagagtggaatgaagaatttgcctgaaatcaatgcaagatttcaaatagatatgctcaattgtgatctcagctgagaaaaaatgaagtgaaaatagagtagaataacgaatttgcctgaaaggaatgcaagacttcaaataaatgttgtgctcaattgtgatctcaactggtaagtgtgatctcaggaacccttctgcccttcctagtacatattttctctttgccagtagtgatgctgccttggaaatacctgcaaaaactgcaaagttctggcttaccaaaccaaacacacacacccagggacataccaaaaacaaaacaaaacaaaacaaagcaaaaacctcagaaacaaaacaacccaacaaatgcccaagccttatttccaaatcctaagattggtataaaaccactcacaatatgctaaacttctctcagattgggaccaatattgggccttttccagattcttcttgcctggaacaccaccatgcttcctgcccagactatcagatcaccactccttcctcgggtctcagctgtgaaatttctgtacaagttgctatgttccctaggcattgtgtttctgactctgtcctctgttgctggaattaccacagtgaattattatggaatggagggcagtctgattaggcatagagtacgatggtaatggatgtatattccttcttaactgcagactcctcaaaagcagggttcatcttttactcatctttatattcttggtgcttcctattgctcccgacacatagtacatatttaataaatgtattctggaattaatgaataaattctgaatgataataatttgtggagtatagtaatgcagataattttatttgggcttagtagtttgttgttgttttgtattttagaataaatggttttctcatatatcttattcccttcttagtacatcccagtaagacttctagcacccatcagtgtactgaaactgctcttgctgggtcaacaacaacccagggtccaaatctagtggacttttttttcccgttgctttcttaatggagctttccattgcatttgacactattgtaacttcttcatttttgaagctccttactctcctacttctgaaacagtgccctctcccacatcttcttatatcaactattacatgtcaacaggctattcttctggctgcttcttaagtgtttgttagtgtccgcaggttctatcttccactcttgtccttctctaccttgcactggggcatctccctctgtagtctccctgtgtctgttctgtgaccataatccttagattggggtccttagttcagttcttgtgtgaatattcttctcatctctgcagctgcctccttggcattgccaccagaatagtccaaagcttcacaaatgttttatgtctaaaatgaaattccccttctttcctgctaaactagttcttctattaacatattctttctctcattttatgaaagtataccatctactcaattactgaagctggaaatctggcagtcctctaggatccttcttctttactttccccttcaaattaaccatgaaaacctctcatttttttcccctgtgtatttcacaaattaattttattatccaaagcgatggccttctctctccagtactaccgcagggtggagagtgcatatggggagtggagaaactgacactatctagcccagtgacctcattttgaacctagtaatccaggacttgtcagttatatgggcatatattaaacattaaataattggtgttttctggtcctggcatttccagaagcactctgtctttttttcacagctacacatgcactatttcttggttcgtgcctcatagttcccctgctggcctgtcctgccctaggattctttggattaccctagacctagaatgacttgggtcttttccagagccacattagggaatgttctccagaacttctttcacattcagcattccctgcatccaagtagcagtcagaggactctggcatggccaggagacctgcattctctttctttctttctttctttctttcttttttttttttaagatggagtctcgctctgtcgcccaggctggagtgcagtgacacaatcttggctcatggctcactgcaagctccacctcccgggttcatgccattctcctgcctcagcctcccgagtagctgggactacaggtgcccaccaccacgcccggctaattttttttttgtatttttagtagagacgcagtttcactgtgtgagccaggatggtctcgatctcctgaccttgtgatccgcccgcctcagcctcccgagtatctgggactacaggcgcccgccaccacgcccggctaattttttgtttttgtatttttagtagagatggaatttcactgtgtgagccaggatggtctcgatctcctgacctcgtgatccgcctgcctcagcctcccaaagtgctgggaacttgggctggaatccggggatgattaggaaaaacaagccatgccttgtcttccatacactcacacccaacactgatacttcgcttctggccactaaaatatgtggaggtttttcctacacagccaattctctgacaccagctgagtgtcttacaattcaacgcagttctgacactatctacccacaggttaagggctcagtcccacaagactgcccttatttcagacactgatcacaagtccagattgtcacttacactcctcacctacggctatcaatcagaggttcccatgagtgtgtccttaggtttgatcatttgctagaatggtgcacagaacacagggaaacactttacttatgtttacctgtttaatacaaaggatacaacccaagaacagccagatgaaagagattcatagagcaaggtccaggggaagcactagatttggacagtgggttgttgttgacccagcaagagcagtttcagtacactgatgggtgctaaaagtcttactgggatgcactaagaaggtagcattcctagcacctccatgtgttagggaagctctccaaaccctgtctttttgggtttttatagaggtttcattaaatagtcattgttgattaaatcattggccattagtgatttagtcaacctccagtcctgcccctctccctggactttgggggttgaggctgaaatcccaaccctctaatcacatggctggtccctctggcaaccagcccccatcctgaggctatccaggagcctccagccaccagccatccaataagtatacaaaaagaaacatcattttggagatttccaagggttttagaagctgtgcacatggatactgggcagagaccaaatatatatttcttattatgtcatgggcaattaccattttctcctgggctggcagggaataggtctgcttagccagctctcaatctgcagctccatgtcatgactctaccattgattccatagagggagaatcttatttcactttaaggatattgcttcttactctttttttttggtggggggggggtcattattgtttttctctcttacagttttttggtcattactgttttcccatacttgtcagagagtaatccccccaccccacctccctgttttctctctcctgtcagtcccagcactctctaaaagacatgcttgtaaatacggtcatttttatacctttttaattttcttccctctgtcacaaaagatttgaaatattataccactgtacgaccagatagatgttaaatttcacttaccttataggcaagagtttcttttttaaacaggattgtggggtgataggatctcattgtttagaaaaccagaggggtagctcctgttgtcagcgatgattaaaaattaaaggtagtgtctgcttctgatttatctgtatttacttaagcagatgtgtttttgattgtctatcacctagggctgaaaaaagggcaccaaatcagtgattctattattttctttgaaaagttgagggctatgtccaaacttgaggccaaactatgttgaaaataggtaatttaaatgcctggtttgttaggagtaaattaccgctgccagtggattccgtggctgcttggcaggggtaatttgcttcattgcagtgttttctagttgaggtaaattattccttttagaaagttaaatcttcgtagagaaagtaaacatttcatctttgagaaggaagaatagcttgttaaaatattgaaaacatttattgaacatctaacatgaagctttgacgggaagaaaagagatacattttagagaacaagactttttaccgagagtatgccttgagtaaagcacttagtaggggcattagttatctagagggaaagatccgatacttggggaatgaagagagaggcaagccaggaaatgggaaggaaggaggaaggtggaaaggtacccaagacacattctgctgttactccgtagtgaccctttccgaagcctgtatttcctgagccaagaccttccattgtctttcaaatatcaggcctggttttgctcttcataggaaatgagttcattgtttttgacgtcctgtcgattttttcccctcaaagagtagataattagaactttgatgaagaaaaggtcctatgttctgttttatacataatcattttctgaaccatcaagtgtaattcagcttcaatcttcagggcgaatgaagattacttaggatgtattaaactgtgtgaatttaatgttcatgacaagtgtttcataaaggaagatgctggctattatctctcctcagaaggaaattgttgataagaaaccattctgagaagtaagatttatggcaacatcagaggctagagaagctggggcagctgagcacccaggacgatcaggacaactaggacaattcagtttttcttgtgctgtcttttgtgttacaaaaacaaaaaaaaataaatttttatatagcctcactccaaaagcaattaaggaaaatatttattcattaaaagcaatgctgtattttaatgaagcatgttaatgtttgacagagatagtttattaaaaagggatagcagtgagagagctttccccctttttattgtttttcccctcaaataaaatccttacatttgaataatttattgattcaggacagagtgggttggtaattttatcttgacctcattcatccaaagaaccatataacccaaatacaaaaagtcagactcttatgcttcaaaaaccaatgctatttaagtaaatgaagttaatttaactcattctctttaaacaaactggctggaagggtcaacttttcaatgactgtacaatcagcaactatgcttttaatatcgtacttttccaattgtattctgtggatggttggtcatctctaaaggtacttcaggtcatttactgtagaatttatgtttataacactgtattttatttcttctagagttcaccaaaagcagtgtcatttcatcttttaactgaaaacagatattctttaagatgttagtttcctgtggttgctgatataaattatcgtaaacttggtggcttaaaacagtggaaatttgttttctcacagctctggaggccaaatttcaaaaatcaaggtgtcgacagggtcccactccatatgaaagctctaaggaagcatccatttcctgcctctccagctggaggtagcttctggcattccttggcttgtggttgcatgatgccagtctctgcctctgtggtcacattgcttcctcctcttttgtctgaaaacaccctctgattgcatttagggccaaacttctcaaggcccttaatttaatcactttttctttttggcagtgggagggagcatataaagtaataatcacaggttctggagattaggacatatacgtaattgttttgggggccaccattcagcctactacaaatactttattcttttttattgctccatagatttagaatgttcactctacctatcctacctgtattaagaatatatcatcataatctttctaaaatcccatgtagatctagatagagcagaaaatacaaacttttccctttcccagtaatcaacctacatttaattattcatgctatgatggactgcataaattaaagaaaaaatagaaaatctgaaagggaagataatgatctcattgttatttgtagttgaccatggtcaactataaaagtataaaaatactaaaattattaaatgtcatatttatgatcatttgttcacctgaagagtattgaataataaggggtacatttgggttatactgaatgagtgttgaaaatgattgaaaatcattgaaaataatttatttggggttgaaattttatcaaataaataatctataaggtgtatacattatgagcaagttagcaagagtgtcttgatacaaagtattggtaaaagaaaagatagttcacactgagtttgttttcaatttaattcatttttgcagatgtcaacaaaatctttcacctttttatagtatttaggaagaagagagcatgtaaggtcaaactttaattaacttttctttgcctatactggactttccctacacaagtaggtacttatattctgatcacaagtccccacacgtcggttgtagatagcaatgtcaagttagtgcatacccagctactaaagtttactggactttcaggtgttcttggcatgccaggcaggtggtacccagttatttagagagatctttctttcagaccttagacatgtcttttacatataaattacttaggtactttgaccgcatcatgtggttcagtttgttttacaatgaagactagagcttggggaagggtggtttttgttgcccatgcttacctgaaattcagaaaacttatcttgaaggagccagagccagttggtatatctctgagaactgtccttagactcttagctgggtggtgttttcctagtccttgtgtaaaaggataaagatggtggaatgtataaggtaaagtgtttttaggatatacgtatctgggtgccacaaagggcatgagtagggaacagtgaaggataagggtgaaaccattcattgatcctaatcatggaaagccttgaataccaggcttagaagtttggattttctcaatgtgcaaaaatcggtagcatttctatataccaacaatatccaagctgagtgccaaatcaagaacacaattcaattcacagtagagacacatacacacacacacacatacacacacatacacccctaggaatacggcagatcagggaggtaaaagatttcaatgagaattacaaaacactgttgaaagaaatcagagataacaaacaaatgaaaaaaacattccatgctcatggataggaagtaccagtattgttaaaatggccatattgcccaaagcaatttacagattcaatgctatttctatcaaactaccaatgacattgttcaaagaattagaaaaaaactattctaaaattcatgtggaaccaaaaaaaaaaaaaaaaagagtccgaatagccaaaacaatcctaagcaaaaaaaaaacaaagtcacaggcatcacattactcaatttcaaactatactacaaggctatagtagcaaaaacagcatggtgctggtttaaaaacagacacatagactaatgaaacagaatagagaacccagaaaaaaaagctgcatacctacaaccatatgatcttcgacaaagtcaacaaaaacaagcaatggagaaaggacttcctattcaataaatgatgctgggataactggctagccctatgcagaagactgaaactggaccccttcctttcactatagatagaaatcaactcaatatcaattaaagacttaaatataaaacctaaagctataaaaacccttgaagaaaacctaggaaatactattctggacataggctctggcaaagatttcttaatgaagacaccaaaagtaattgcaacaaaaagaaagattgacaaatgggacctaattaaattaaakaactctgcacagtgaaagaaactatccatagagtaaaccaacagcccacagaatgggagaaaatatttgcaaactatgcatctagcaaaggctaatatccgtaatctgtaaggaacttaaattaacaagcaaaaagcaaacaaccccattaaaaagtggacaaagagcatgaatagacacgtttcaaaagacaccaacgcacggccaacaagcacataaaaaatgctcaacatcactaatcagatacaaatcaaaaccacagtgcgataccatttcacacaagtcagaatggtgattattgaaaagtcaaaaaacaacagatgctggcgaggttgtggagaaaaaggaacacttatacactgctggagggaacgtaagtgtttcagctactgtggaaaacaatttggtgatttctcaaagaatttaaaacagaactcccattcgacccagcaattccattattaggttgtattagggttctctagagggacagaactaacaggatagatgtatatataaaggggagtttattaaggagtattggctcacacgatcacaaagtgaggtcccacaataggctgtctgcaagctgaggagtaaggaagctagtctgagtcccaaagctgaagaacctggagtctgatgtgtgagggcaggaagcatccagcatgagagaaagatgtaggccagaagactaaaccagcttagtctttccatgttcctctgccggcttttattctggctgtactggcagctgattagattgtgcccaccgagattgagagtgggtctgcttttcccagtccacttacacaaatgttgatctcctttggcaacaccctcacaggcacacccaggaacaatactttatatccttcagtccaatcaagttgactcttaatattaaccatcacattggtaaacccaaaggaatataaaccgttcgaagatacatgcattcatatgttaatcacagcactattcacaatagcaaggatgtggaatcaacttagatgcccatcaaccatggactggataaaaaaattgtggtatatatacagcatagaacacgacacaggcataaaaaaagaatgagatcatgtcctttgtagcagcatggatggtgctggaggccattatcctaagcaaactaatgcagaaacagaaaaccaaataccacatgttctcacttataagtgggagctaaacactgagtacacatgaacactgagaaaggagcagacactggggcatacttgggggtggagagtgggaggagggtgaggattgaaaaactgcctatcagataccatgcttattacctggtgatgaaataatctgtacatcaaaccttcgtgacatgtaatttacctgtataacaaacctgcatgtgtaccctgaactacaataaaagctaaaaaaaaaaaagaaattcagattttcttctttctttgattctgtccctctcatttaattcttctccctatttatttcaccttagatggcagtggatttattcagtttttgtagttgattgtttaatagtattttagtctctatagttttaaccaaatttctgaaacttctttccagaagtatattttgatgtttgattctaactttcctatcctttacttgccaaaagcaacaaacaaaaaacccagattttaaattgtaagtttctaccactttaaaagaaagaagttaatattcttgatgttacacttctttttaaaaaaatgccttttgtttccaggaaaaatacggaaattttttttgcttccaaaaggtcatggtttcttccttctaattacattctttaaaattctgacagtgtgggctttgcaaattataccatcataactcttgaatgtgcttttcataaaattcaacacattttatctttagcctccgaagtccttatgacttataccattattcatacaaactacaggtttagaatcaagtaaacaaaattcctgctttaatatacaactacagttgttttttggttgtgtttctggttggataatccagatcagactttgtgactaggagctgtaagtaaggtggctgccttaaaatgtaatgcaaaaacagtcctttttagtctttttgtcttgtggctgggaccatatggttttctgaagttcatatgtataatagtccttttttgtgtgggctccattcatttatattctactgtttattgtttattcattctttcattttgagtatctattctatattagtcttgtgaatatagaaatgcaaggcatggtgcctgctcttaaagaggttaaaggcttatgggagaggcaggcatataaacaaataattacagcctaaaataataaatgctattgtagcggtaagacaaagtccttcttgtggcttaaactctctagcccacattccccagctaattattttcttctgtggattttcatccttgtctctcaatctctttttcagatatatgcatatccatattgcttacttaatcttttctgcttccaggttcccattttgggtgtggaagccttttgcagtgactgtgtcctgtcatgactcttttggtagccctctccagtattccagctttgcctttaaattttaacggagagaaaaataatgtatctcattcttggtgaaacatttaggctgtttagttgacatttgaaatggcagagtctattgttctaaaaggaaaattatccatactgtgtaatgtggactattgatagaatatggaatcaggcatatctttttatgtatttatgaaagtaaagcagtgcttccattttagcacaaataactttcaaagcaaagttatttaaaatttctcttttcttttcttttttttcttttttctttcttctcgctctgtcatccaggctggagtgcaatagcatggtcttggctcactgcaagaaccgcctcccagattcaattgattctcctgcctcagcctcctgagtagctaggattgcaggagcctgccaccacgcccagctaatttttgtatttttagtagacacagggtttcactgtgttggtcaggctggtcctgaactcctgacctcaggtgatccacccgccttggcctcccaaagcaaaagttattcacttcaagtgcagtgaatcacaataaatcttatttccttatttttatatttgtttttataatgaatgggactacattaccctcaataaaaggtggacagtttcaccctttacttattagttatattttgagtaaaaaatacaagagtgtttatagagtgtttactaaaacaatgaagcacaggtaaataaaattcaagagtatctacatgggtggtattaatttacctgtttaaattctgaatgaattactaaaagcttgagatatagtcctaactctctgacttcagtttcctcatctataataagatgttattatggtagacacttgttttttctgctcagcttccatttctccctgtacttgaaaaagttcctactttcaagtactgggtccaacccagtctgttcccttttatccaggagtgagcatgtgacccagcctaggtcaatgaatctatacttcccgtggccactggggtagttagggtgggtaggcaacccagaatggatggatcagaagtcaacttctgggatttgtctggaactattaaagaagatgcttttttccctataatattcctaagtaagtagaatggaaaggtggaattgtgggcaatctgcacatggaggtaactagagatggagcctatatggaggaaagcagaccctatctatgcatgaatctaacactcccttttcaggtgtttctccagtaaaggcttttttgattgttgttgttttcttatgccagtttgagttgtcctttattatgtcacatgcaaatgataggatccaggctaattcagtttggtcagttaacctttaaggtctttccagtttctacattgcatgattccttgccttcttttatttcatgcaagttagattactatgattgaatgaggttaggcaaataataactggatattctcaagaggaatagcttctctatctgggaaatatcagtgtatttctcataggagttgtcaagagtaattgttctacattttgatcttacttgtgtttattttatggcataacttcacctttgacttttgcccacccctggtctagctgtattcactcctactagggcatataaagttaaagaaaagaatgaaatgcaaacattgcttgatattaaaatgataagcaaaatttatttccttctgaattgtgtacacaaatgacccctttctgagccaccctcacccctgggtcaatatgtgcattttgtgaggataacttttcagaacactacatgaaaattgaaacaagaaaatacctgggagctgcctgataaaagtgtatttgtgagaaggtttatgaggtggtgatgtcaaataagaacttggatgyggaagcctctggtgagtcctggctccaccctttatttagctgtaacctcgatcaagttctgtaaatttgccttgtctttccaatggttgggttgctgtgagggtgatgtgatatgaaatgtgaaggcagtttacatgtcaaacctgatgaagggctgaaattatttaggaatgaatgagcctaactaatttagtgagtgtcattggtgatttgtagaagaagcaacagactgggaaacattgggagataagattacacatgtggatagtttcagattttaaaatctggactgaggagtttaaacttgtttaaaaataaagaagcaagttttagtcaccacgtccagatgccttcctccaaatcatttttaaaactttgttcttttcttttcattcccacaaccagtacaaactcctgactcaccttgtagattctaatatattcctcagctaacgtcctgttgccacatttattgtcctaaaaataatagaccctaattacatgaagaaggcaactgaatgtggtgcctgacagactctagagaatgaaacatagggatgtgtaaaaatgtatcacaaagactgggaaaatggtggtattattaacaaaaggaagcagatggtaagggacccacgatgaagtaataaggcatccagctggcatcattgcacaggaaattgcagatttaggattagcacttagayagtggaatccctgtatggatttggaagttacaaagccaggactttatatctcaaagcatcctgccttaggttgggctgctataatgaaagaccatagrtgagtggcttaaacaacagacatttatttctcacagttttggaggctgggaagtccaagatcaaggtgctggcagatctggtgtctgatgaggttcctcttcctactttgcaggtggctgccttcctgcggtattgtacaaggtggaaagagatcatttatctcttgtctcttcctataagggctctaatcccattcatgagggtttcatcatcatgacctaaatacctctaaaaagccccacctccaaatatcatcacattagggattagggcttcaatatatgaattttgggggaacacaagcatttagttcataacagatccttaagacattgtctggctttgactttttcagataagagcttcaaagtagaaagaggtttttcatataagaggttgaaaggttcaaagtggaaggtcacgtagtgtatcatcagtggcgcagctgggaataaaacctttatttgctgactccaaggccagtattctttcgttgccactgtgcagcacctctgtggcattaacccaaagagtacaatggaagttgtatagagtaaggattataatgagaagcaactatgtgctgggcagaatatagtgtaatgtcctactgttgcctagatacaactctgaagatactgatagctttaacatgagaaagccgagatgttagatcatttagacaggatggataacagggaaaagctagattatcaagtgcttggcagctgatataaataaatactaaataattcttatgccaattgctcttaarggcattatagtgtaattatttatttagaacatgaatttttatgccaaacagtactgtgttcgatttctggctctgttacttgctctctgagatgcctttgagattcagtttcctaatctgtatagcgggggacaataacaaccacctaatagggttgttgtatgtattgatgatggtattaatttcctactgctgctataaattacaaaaaaaaatctagtggtttaaaacaacacaagtttgttattatggctctgaaggtcagatatctgaaaatgggtgttatggcactaaccaaggtgtcagcagacatgtgttccttttgaaggctctaggggagaatttgctcgtgttttccagcttctagagactggccagtctttggtggtgtagccaccttctagcaatggcatcagttcaacttttgcttccattgctagatttcctctggctgatattcctgcttctttctcataaagacctctgtgcccacctaatacattgggaccacctaagtaatgcaggaaaatattcccatctcaagactcttacctttatcacatctgcagagtcccgtttgccatgtaaggtaatgtattcacaggtgttagggacyagggcgtggacatatttgagggggggccatgattctgcctaccacactgatgatgatgatgctaatgaagatgatgaggaaaattagctgctgttagtatttcactcactcccaaaattacttttagtattttgtcaaagaaaataagttctatcccaaaacatgtaacaagagcaagcctggcctgatcaggggattgagcttctgatttgataaaagcttcctcaccccttcagttraaagtggtttccttcagatagcttcctggaaacttctgggctgtgcacattagtccctttcaattcaggcactgaaatgctagcaaaatgaaggtatgttttctggaaaccagctatcaatctagcacaagcgactattaggaaaatcaaggaggtgctgcggggatgtggaataggacacctgggttttgatttaaagtaacttaaaggaattgcttatagcagagagttaacattcatatgggaaattttgagcaacctgtttgactcaggtcccggtgagagggcagtcttacataggagatgtacagaaagttttagtctccattcctaatcctaggcacacgcacacacacacacacacacacacacacacacacacacacamamttctgaaaccctaatactgtcaaatccccagtgagtttcaattttcaatgacaactatggataaaaatggtcatatttaggagagtaggggggaaaaaagctttaataaagtggcagcagaataaaatgattatcagttttttaaaagcactagtgtaaagaatacctctcagtttaattttccttttaatttattataaattataggtttgcttaggagaaaaataaaaaatcaaactgccattttctttgaaaacacaaatcagacaaattgttacacagcaggatcctttgctaattttgacagccacttattcatttactagcctttgtccgacacaatacctgtgtggcttttatttttccagactttccactgacacattttcacaatttgggtgtttttgtccaaaacgtgtcatgtattttgtcatatatatgacaaatataaattggaatttttaaacttcaaataaaataccacattaaactagtgattttaaactgaagatgatagaatttttaaaatacagacttggagaccacattcaaaacacttcatagcaaatgagaggccctcagttatctggtcttacctcagctttctagtcgtctttgtcactttttcagcccctggggtactactcagtgctgtctgccagcctgctaagttcactttttcctgcttagcacttgttattcctctttttccactaaatgcctttagttattaaattattgtttcctacagaaatttaacttcatcatttttgttgtctggagaaagctttgttgtcatcactcagtggtgagaaggttgactttctcatgaaagctccaaccctaggtcttaggtttgatgtaagtcatgtgctgctgtggaaactgtctagtgcctgtacagtgtgatccgaagttactggactgtgagggggcagtctatcaagtatggacagctatcaagtatgttgtacagtttgatctttaacaatttaaaatcaatattgggttccttggtcacacaaatagcctagttcttcaagtaagcagttctttctgcctgaaacctcatgtcccactgttctacttgagcacccttccaggtatcaagggcttaattatagggtatacatagtcccctgcaagccccttatgcatctgaaaatgcaggtatgaaccttcattctgagagtaagttagctagtctaaatgaatatttgagatggaaaaaaacatctagatggatataggtagatgaagtaaccctgggtaggtaaagaagctgattttagcagtgcctgaaagactcttgacaaaacacctcagaatctacttccattactcagaacattttattagatttgttaccactccgtattgaattgctggggtctcactgagtccttttgaaaaatcttgtcccaaaaaggtcttagaacctcattctcccttgtctgtctgtttttcttttattttttctttcatttctttttgagacagggtatcactctgtcacccaggttggattgcagtggtgtgatcacagctcactgtagcctccacttcctgggctcaggtgatcccccgctgacctcagcctcctgagtagctgggacttataggcacttgactaatttttgtatgttttttgtaatgacaggattttgccatgttgcccaggctggtctcaaacacctgggcccaagcagtctgcccacctcagcttccccaaatgctgggattacaggggtgagccaccacgcccagtcacccttgtcttccttgactaccatctgcttctatcctagaaggaacatgtgaaaggatatataaatgaaaattggagttccagagtaatttatttgtctccatttagtcatgttggcttcaaatctttatcagttctttcacagatatgtttttgagcatctgtcattcaccaggtgccagatataaatggatgaataagacataagtcttgtggtcatggatagctaccactactgacatggcaccatttccccaagagattctttctgtttccagaaaggagcccaaggcccagtcctcatctgggtattagatagagtgctttattttcaacagtaaataaagggaagatggttgtagacatttctgggtgaagtgttagccaagattttctaggaagtttatatcctataagtgggtagaaaaattgggtatctaaacttcagataaaagtccaacactttaatctaccatgtgttgtctgcagatgaattcaaaccactgaggaagtttatacaggttagtaaaaactagcaaaacaagaartggtttttgaaaaaacaaaatttaaaaattytattatttttgtcctgactgttaattcgtttctaatgtatccagttttgatgccaaatatcagaaaacagagagctcaggcattctgggaaagtcaataattgaggctaaatggcttcagtataatgactaaccaggaagactgactttctagaaagataaagtctcagagaagacatgatccagatttatgaaatcatgaaatatgcaaataaggcaaatataaacatgttcatcaaatcctagaaacattttaaagctttgaaaaagtaattttagggtagatggaaggtcccaggaattgtattttattgttgaccttaaggtctactctataggattgctgaatataaactactttaaaaaatatcttttgctattatagtaattagcccctttgggttaatttcaaaattgttctgcttaaaaaaaaattagttggccgtgcgtggtggctcacacctgtaatcccagcaattttgggaggccaaggtgggcagatcacgaggtcaagagatcgagaccatcctggccaacatggtgaaaccctgtctctactaaaaatacaaaaattagctggacgtggtggcgtgcgcctgtagtcccagctacttgggaggctgaggcaagagaattgcttgaacctgggaggcagaggttgcagtgagccgagatcatgccactgcactctaaccaggacgacagagtgagactccgtctcataaataaataactaggttataagacaaattggtcttttagcagaattttcagatataagcaggaaattctttatttcagtgagtgacatagatttatccagttaatactcattaagtagtgggggtagatttatagtaggttattaaaaaacaagtaatattaaatatgtatctcttagcatcagaagttgtcagggagaacaattgtatttttgccttagaatgtagttttgtgtatctgtcaaagatcaaataaccaagttgacaactgaccttactcagtaaggcctcttaggttatcctggaccattgaagctgctgcagtttgtttttctccccctgttagacatagggagtttttctcctgtcagtgctcagaaaggtacttggctaatgctcttctgaatttcaggagaggaaagcctcctacttaaaaaatatctgctgtatttagtactatacaaaatagtcatacagacacactttcaacttttaatattaatggggtggtttcactttattcattttataaattatgaaggttattgcagctgtttgctagattttaccaggctcatggtagtaaagccatacatagtccatgaaaacataacaaaactttacaatttcattctgctttgttgcaaagatccatgtcccttgtacattttatgacttattcacatttcctttagaaatactcaacatttaggaacttaattcttactattttagataataatgtgctcatgatgagaataataatactaaaataatgatatatatcatcacataagcatcaaatgtctttgaatttggagattttcagcttagaaccactttaatggagctcttaaaagtcaaatgtgattttcatgggactgtactaaggtgtgataatggtaaaccatctctcctaagacaattaactcattcccccatatattttagatgctttatttatgaaatattttgagcaatgaatatgacatctgattacctctctttgtaattcataatctcttggactaatctttggactcagtagatttctttcattrccattttatgtatttattatttttttgagacagaatcttgttctgtcgcctaggctggagtgcagtggtgcaatcacagctcactccagccttgacctcctggtctcaagcaattctacctcagcctcttgagtagttgggaccataggcatgtgccaccacacccagctaatttttattttttgtagggacagggtctcactatcttgcccagtctggttttgaactccttggctcaagtggtatacctactttggcctcccaaagtgctgggagcctgtatatattcttagaatcaatttatcttacaacttttaaaagaactgagaggtaagatgatcagcaaataatatggagttactggaaattatttgattgttttttgaatttttaatgaactcttaaaatgacctgtagccttagttgatttaacaggaatcttaaaatcagattcacatttactattttggcctgaaatgagttccatgttctttttttttttttttttgcattagagaaaacaggcttgtgaagttgtttgtattactatccttttttcagattttaaggacatgtatctaagtgttcatctgggttctctaaccccctcctctatactgttatggtgttactaaaattttattagttataagtaactttacttgacactttcttcacatttccttcctggcttccttcctttccctcctttttccttatatgcttaaatctggaggaaaattttgttctgaattatatattttttaatcaatattgcaaacagacaactgtaaacctcaagtttttgttaatgaagtacttgaaaatatgattttttatttttttgctattatggttagaaaatagcgataattttttaatgaatggctggtgaaatgcagcagacacagtgcaagttggtggcatggtatcattgtaaaggttaaacagctgtgctggaaagagtcattttggtttagtccttttaatttggaacttttttggcagctgaattccaggacagactgtctatgacactttaatatatttaacatattttcaaaaactatcagaactcaggctaaataacctaaaccactttgacttcatactgggttacattttgcttgttgaaaaaaacttaagttggtttttaaaagaacaggctggtctgcaaaaaggtgatgaagaaatattagcctttgttggaagttgagaagtattatataaaccttagactgatattgtagaatggcttctaagactgaaaaattgtaggcatcctgttttaatcctctgtaacccagccatatgcgtcaaactgagcactcctaatacctgatacttagaaaaaagagtaagagagctgtttttctgtgtacaaatacacaagtgacacctagtatctatccctctattcccccagctctggtcttagggaaggggggtccaggcattttccacctggagaagtaggtgcctgacagcagatgcaacattggtgacttcctggactgtggcttgtcttcaaggcaccctgccaagacttcggtgtcgggggaactagagaattagggtaaaatttcagggcctcacctgtacaacatggtcataacattaacaccagctactctgacatctgtcagatcatttatttaattaacatcccttttctctgggccaccaaagcagggctgcttttcactggcccatcttctttgcatgtatttcaataaaagtttgggggctattgtttcattgtcatgtttccacctaaaacctagtctgaggaatagggatctacttatttttgatgcacatgatttattttagtaaagtggacagattttaatgacacttaggaactgaggcttttttttttttcagtcatggttttacttgtagaaagcgatctgtattttaaacaaaaaaacacttaatctttgaattgaaacacatttaatatgacagttaatttcttcttttccaaaggagaaaatcacaacagaactttaagaagtctcctatgcaactggatacaaatattgttgattcatggaacgtgatgcctctgacattaagggtaatagttattgttttgggtttaaaacttcaaggtctggctcctcattttcagggaagcctcttgtatctgaatagtgtttctggaattgtgctttgatcaggtgtataaggactctgaaccaggaatgcgggctttactatacctgctctgagaatttgtttaattactcagcttctctaatccttgctttcctcatctgcacgatgatattaaattcatgggattgttatgaggcttcagtgaattcacgtttgtgaaatctagaagtacaatgcctggaacagagaagattctttccttttccccttttctccagcctaaattaataactggacttttaggagcagcagcgtagaggtaggactatatgaatgtcattacaataataataacaaaactatttagatataaaatttcctgcctcctcttttgtaactttcctatgcacatcattatcccttttcactattgtttgctcagctttggtgtgatttgtaaaagctcctggttattaagggtataaaccttatgttaggcataaggctgtaaccttataaccttatgttaggcataaggttgtaaattttttaaagttttcctcttaacagtatatatggtattttttgtcatatagaaatttcaagttttgtttttatgttgtcaggtctattgtttttttccaaaaattgtatgacatatattgatttcagagatgttaaaatgtgaaaaaacaaagtcttagattcaatggaatagaataacaatcttttataggttctgcctttggtgcaatgtatgtgtgtgtgtgtgtgtgtgtgtgtgtacaaatatttgtaggtatgtaaattggtctcrwtttttgtacttaaaagatattattgcaaacatgactgggtatgggaatgttctctccagctaagaaaactctaggaagaatgtagttgcatagagcttagaagccctggcatttgcttcargcattgctatgggatgctttagtcttggcttgtccgttgttgctagaatcacgtgctgccctcactgctgctcttgtccagctgccactgttactcaatccctcctgatagatatctctgtggtagcaacaattcaaaatttgccctgaggacaaggttagtatttcttgccagcacctgccactttcccttccagatcctgaccatgggagaagtgtgtgtgggtgtgggggtaggggaggaggagttaccaaaccctgtaaagcagacatcaaggtagaaggctagaatgccaggtaaaggctcataggacagagtgctataactacatcttcaccactatgacaaagttgtcccacccactctccggaaaagagttaatgttggttgaagatcacgaagcagttgtcctccaaaatgccccaagagtattagaatatgatagaagattgtttatttgctaatgaagacatcagaactagccgaatggttcaaaaataattttaaatactttatacattgaaacaaatcaagccactataataattaggagccccttgctctggtgcagggcataataatcgctagcaaatccttagytgatgacatcacagtaatctgagacagagaggtggggactgtagtggacacttaaagcaacattgctgtgtctccttggtaattcatgaatgacagttcccggcaattcatgaatgtgacacttctcggtcatttctgtgttttggcaggtactggtggctttaaagccagggaatcaaagtccttaaagttgtaattaattttcctgaagctgataattagacctactgcgatcctttcacataagacaggtctttacacacaatttatgaaaacagaataattaatagaaaatgatttcaattgtcctctgtaatatttcattgaaataaatgttgtagagtggttttagctcttggcaaatcatgcaataataataataaaagagaagacggctgtgtgggaaagagtagttatttttaaatcttggtagacaaatgggacctgcccacttgtctattgagcacatctctgtaatttctcagaaattaaacagcatgaccctttgattgaatccaaagctggaagtttaaatagataacttcaaagtaattggcttgaaatccaaggatctattctgggatgctttagaaatttttattcccttttcacctcagctttaaaatatatataaatgtcaaggcttcagactttaaaactgttgctgttgtactccaaactattttcttataattggcactgttcaaatcctttttggaacaggatttgagcttgagtgagaagagaaggtagtttggaagaatcaagaagtatgtaacagtgggatctaaaaatctaaacaaaaagaggttaaagggacagatctgatgtatttcagaggagcaagagtagaaaggtgatacattatcaaaaaggtyttcatgcacatgaagtgttctattccagacttaggggattagctgttcttcatctctgctaagggcaaaataaaaggaaattattttgagacagaagcatgaagagattaagattagagaaggaatactttaaaaatacatgtttgttaaaccaagaacctcagccatctaaacaagagtaaatatgccaataattctaccatcttcgtctgattaggctatgaaatcttgaatcttccttggatagcttttaaactgatatggaatggttagtatgttttatggttatttccagttctaagattgagtgatccacttcatttcagcaggctctgtacgtattatggacttgtttccctctgttttttcctctgttgtctccttccttttttttttcttattttgtataatatttaagagtattttacatgtaggtgtcatttataattttttccttactaaagtattccttttttattatggttcacattgtaattcaagtagcataattataacatttttattgagcagaaaatgaccacttttgtattttaattaaagcatcttttttttaattatttatcttatccagcagtcattgaacactaaagctgtgttatgtgcaacacagatcttctctcattttacccagaacaatcttttcctgagaaataagtctttgcccaaaacaagacactcctgcagtgttgaaaggtgatatgggcttttagtgtgcactgtagctaacagctggcaatcactcaccggtttaagaagtacatgttggccattttctgtcagtttttgggggcaaagagaagaattatctaaattttggaggagaagggtttagggggttatttatagcatccagctagccagaagaaatgaatgaacaattcttaggtatcattgacccaaatatcttttctaaaataatccattactattttctttcttctttttgctacttttttctccctctttcatccctttaaaactttgacaataacaacaactgatgctctcaagcacctcccatatgccccatactaggaactggggatatagcagtcaacaagacaaacatgtcaggtcccctgctctcaggaagtttaaattttctccattattttgtgctcacttatataacagggaacaaaccagaattaaattttgattgcattttaatttattgttaaatgatacaagaaaaacactaaatacactactagttttagacattcaaaatttatataaagatattagggctgggcgcggtggcttacgtctgtaatcccagcactttgggaggctgaggcgggtggatcatgaggtcaggagttcaagaccagcctggccaacatagtgaaaccctgtctctactaaaaatataaaaagattagctgggcgtggtggcaggcgcctctagtcccagccacttgggaatctgggacaggagaatcgcttgaaccccggaggcagagcttgcagtgagccgagattgcgccactacactccagcctgggcggcacagcgggactctgtctgggaaaaaaaagaaaaaaagatattagttatactgtttatgatgtgaggaaaatcaaagtttgtcaagtaactttgtattcagaagtttgtgaagtatttagattgagtctttatcctagtatgtaggtaatgttaaagatgatttttaaaaaagycactgtgcaaaatttccttgcatatgaacagttaccttggcatggactcttttcttcccactgttacagggtagctaacttcctattctcagtaaagctaaggcaaagagagtctttctgtcaccaaggtattctaggttctaacaagcatatgggcatctctcccttataaaagccatgatataaacacagtactgcttatattctgtaaacaatattaatggctagaatcagctgcataaatttctgggctaattagatgcttatgtgctaacctggaaatttaatcattgctgggaaaattttgttctgaattcaaaacggctgacttataggtagactatggaatattacctgtccttgccctgggtatatacaaacccattctctgtgaagagaacaaacacatttctattgtggcatgtccatagtgttagaattggaccttgctctagtagaattattattattattattattatttgaggcagattctcactctatcgcccaggttagagtgcagtggtgcagtcttggctcactccaacctctgccccccgggttcaagcaattctcctgcctcagcctcctgagaagctgggactacaggcacatgccaccaagcctggctaatttttgtatttttgtagagagagggtttcaccatgttggctaggctggtcttgaactcctgacctcaagcaattcacccmcctcagcctcccagagttctagtagaattgtgatcctaattaatttaatacacgtcactatgagaaaatggacttgcatcatggattgaggatttggcctttattccaaattaaaacctgattattaaccaggctctagtcttatcctttgctgacagaaaatggtatggtcttttatatcaaaattgtagagggctattaattttctgtctatatcagacatttcctaggtttttggctacccagagtctgaacctctgtttttatctggcatgaattctttgttatgtggggttttgtgggaggcggggttccttttccagaaggggtcagattttcttgtctttagaagctaggctgcagccatgtgaattaggttcagccaatcactattactcacccagaactttgaatcttgagtgcataactcaaagatgcagagacagtttattctttttagcagtggtggtgttgagagtccagcgacatcattgtctagttgcagcagtggtgatgagaaaggtgtgttaaccagactcttttgtggctgagtccctgtgtcctagcctcccttcagcctcccttgattctagctcacttccaggtcaggcttctagcttttccttcaagatatttctgtatccttcaaatatactttttccctttaagtctgccaaaatggatttctattgcttgtaaccaagaactctgactgatacactgcgtgaaaactaagctaactgtggcaggttatactttccaaaaattgtaccaccaatatatatcctatcctatatgctcttctaacagtgtgatttcacattcctccattgagaggtagagggctgtgttccccctgcttaaacctatgtggatgaatagaatgtgtagaattaataatgatgtgtgggttccaaggcaaggccctaaaaggtgatacaacctcctcctggtcctctttctttcctgtgacatgtgccttggaaactgagtccaggtaccctgaatatgccatattagagagagcacatggaaagactatatagaattagaggggtatgccagaggaaccccagctgttctagccctcagctgtttgagttttcccagtgtaggcaataggacagacatgtgatcaagcaagctgtcccatgacttctcagccccagccttccagctggcccaggtgacatagggtagagcagaaataaactctgagcccttctccaaactgcagattcatgaacaaaatgaacattgttattattttaagcccctttgcattcattttgcatatattatatggcatatatatatttccagaatgatggctattataaatattcaaactgtaacacctaaattctaatctctagcatagaattatgccttcagactcttacaaggcaggattattgatatggaatgtacttatttatttagtttcacatttttgcatcttacagtttaagagagtgtcatttgggctattgtaaaattacttggctggaataacattacagagctttattgctgttagaaacaaggctatcttccatatcaagatgtttaaaatactagttttctgaatatttatagttgtgtgacagctaaatccattaattctaagatgttgcttggtagtcccctgtgcaaataagtctctaaatgtaagttcattccttctattaggatcctaacacatcttttgggaagcaggatgaaaattctacttttcttttggatttgatattccacctaataaggggatttrgagagagctttagaaattaaataaaatagctagaagttattgaggatttactatgtgcaaggcactatgctaagtgcctgcaggtcttctcatttaatcattataacaattgtatgaggtagatttttattactcttccttttttataggtgaagaaacacrtttaggttaagtaaaactttcccaggtcacatagctggtagctgggatttgtatccagggctatatgtgaccctaaggtcagtgtgttcataaccgtcatgcagaatggctatgagtgatacttcagcattttatctcctaccttcctctgacttgtcctggattatccttaagactcttgacattcaatgtaatacacaaattctcgcccttttcacacatttttctttcagaatcaagcctgccttctcttatttgctgtaagtcctagtcttgaagagttttaagggactccaccaaatctattaggaagaatatgcaaacataagctttatgcgaatcttgatgaccttggtggaaccttctttcatcaattccttaaatctgctttttgtaggaagtgtacaggttgtacataaacgattcaaaataacctatccttcatgatgacaccaactgttgagtgtttaaagtagaagattcctacctctaatgcttcagatttgagtaacttatgacagtaaatcaagggtttgagaacttctgagggaaaaacttgaagaccattctggctttgtgtgtatgtttgtggttgtgcactctccctgccacacttgttagtgtggaatgatggcaaactgtgctgctgtagagttgaagaagaacaaagaaaactgtactgatgttgaatgagatcctgattacttcagtgttttatatgtatatcatgccttgcttcatcagcatagataatttatagtagaaaattggcaaacaagatgttagaagaaattcatctctgtgctcctcagcaaagcccaaatctctctgaaagtgctcctgttactgcagacactgtgctattactatgtgagtggcactactgaattctactttagaggaattgatttactagaaaacaatgggcctctggaaactcagcactcccatatactctgcattgagttactagaagtycttttaatacagagtctctgtgtgggcacaactacaatgctacaatggctggagcaccatattgtgggtggccacgtgggggtggtcattttccctaatgacacagaagggaatgaaaaaaggcttcatgttgttttagagtcttgcacacagcagcctgagcctagcatgtgacaaaaagcatttgctatttttatatcctttgggaatgacttctgcacctaggcaaccaatcataggctaagaatccccaacaacaaggaaaaggttagttttactaattagccacagagaaagggacattgccacgttctggagagtctaggtttgcaggaatccagccaaggacaaggctttgcattttttaaaaagtctaatatttgctttggtgtttcattgcagagacctagatttaatttgaatactcttcaaaggtctatttatcattagccttgtgtgtcatgggtataaatatatcttcaaactcagttctgtaagaaataataataatcaaaaatctttttgaatagcttgatttcctgcagagaaccaggctggaraaaaatttggcttttgccatttttggagttctcatctccaagttcgtggcaagctaagtttttcacatctccaatttcatggcaagatgtgtgcaatttatttcagctgagatgcttcttgcctcagtgtacacatcctcttcagatctgacagctttctgttgctttccagttatgcccagctcatagaaataattttgtttttgagggtaggtaccaggtgccatygaagcagcatcattgtctggtgtaaatacctgaggtttgttgtctcatgccaaggaaataagagtatgcggacacatgagaagtgggtttaggagcataggtttaataggcaaaagaaagagaaaggagaacagctstctctcctacgagagagaggctcccaagtgggacttccggtccaaagtgaagtacacyggattttacagactgacctgaggaggtgatgtctgatgtacgtagggtccaaagattggttggacaggtgtgatatttacataacacacgaaggagctggccaccccaccctaatcttcttattaagcaaatgggttttctacttggccagtgctctgttgtctgctccttactgtacatgtggttggcaaggaagagggaagatggagccaccatgttgaacatgcctaaggtagtcttttcctattggcacagctgcaggcattcacctgtgtaagctttcctatgtcagcagctcgattttacaggctgctctttgttagagaagaaatgatttgggggttgcttttcattaaaagggaaaccttatcgaggacttccttaacctcactatctgcctaaataatttctttttaaytcctataatcaccatctccaccctgcaggccatcacacattggcccagttggagtgcatacagataattcagctcacacatgcactggcatatgcaaacaaaaggctgtcttagctttaataaggatttgggttcagagctctactgagaaggcatggaatagtagttcagggttggtatatcagtccacttgggatgctagaacaaaaaatcatagactgggtggcttacacaacagacatttatttctcatggttctggagactgggaagtctaaaatcaaagtgctggcttatttagttcctgctaagggcccttttcctagcttgcggatggttgytttatggctgtgtcctcacatggtggagagagaaatcacatgagagccagctctctggtggtgtcttcttataagggcactaaccttgtcatgagggccccacccttgtgacctcatctaaacctacttacttctcaaaggccccatctccagataccatcacactgagagttagggtttcatcatatgaattttggggcgacacaaacattcagtccataacagggcccctttcagattggcttgaagaacctacagatatattaattggagaagtgggagaagcaggtactgttaaatgtgtagcccctttttaaaaakatcaggtatagattatggaaggcaccagtgatcctttccatcatgatgtagaatatctttgcacattcagtttaataggatttctgctgggtgctaacagaacacatctgaacacatttcatttatttatgcctgattgaagaatgtccctgttgttaggtcctccctaggaaccatgactaagctccaaacatttattaaactcagaacctgaattattagcaactgagcaactagttctactttgcttgaggatagtgaggacaccttgtgtgcaaggagaaacatttgccttttatgctttgaatgtagcaaagaaagagaaggcaaacagaacattttcatattaaaagtttgaaggttatatcctgccacaggggtaactaagaaactttcccatgtatatggcccctactgggtgcttctgagaaagaaatgctacctttttttttccactctctgttcaaagtcaccaagcatttgggggaaatattttatagaacttttaatttgttttcaattggattactcaaattctgaagttgagcagttccatcccaggaatgaagagtcctctgtaaataggattaaggtctttttaccctagattataattaagggaatagatacctcaagtggagggaagtgtcattaaaaaaagactttctccaaggtccccctccccagttgctatcattataaatgctcattatgttttctttttagcgctgcatgaggtactggtgggtgatggacagcaaagaggacaagggaagagaaagaatttttgtcccaaaggatcctgtgaattagtgagaatatatacacatgaaaatttttagtaataatttgggtgacatatggttaaaagccagaataaattggcagataacaaattcctttaggacattggtcaatcaaatcagaatcccagggcatgcctgttaaaacacagatttctatgtcccacacctagagtttctgattttgtaagtctagggtgtgtgcagcttgataatttggatttctaataagttttcagctggtgcttatgctgctgatctgtccttttctccagtctctcacagtgatacaaattgagaactgctcctgtaggagaccagagactagagaggtctgcagtatgattgccgtgtgttgagatgatgcttcctttcatcattcacctgctgcagttacccatgtttctcttttctggccctcattttatgasaacagctggtagcactctttaaaatgtccacttctgtaaaaagtgctacctggtagcacttctgatgtcataagcagagagcatgcccttttctataattaggtaattctctacagagagaggaaattataccatcttcttggcagcagtaggaggagaggaacaatattcttgttttgctttgaccatttttttttatcttttaaccattaccttacagcattcacccctacattccctaatagacattaagaattttttctgtagccaaaagcaaataggaaacatgagttttcagattsacaaccaattaagttaaaattagggaaatggagaggagaaaaattgagaaatgatacagggtgaagagttcaaaaaacaagccttttgggaaggagttatttggkgcttttgagaagagcatttgctgattgagtatatatatatttctagagaagaaatgcaataacattttcccatgctgcaggtgaggctttgtcataatgttttactgcagtgaagtgggaggtttcatagctgttaaattagtagcagtccaaactatcatactcccaaatatgtgttcctaccaaatcatattactggtaaaatagcattctgtggttaaaaaaaaaaaaagtcaaggaatccttacttaaatttctgtttctatcaaataccaatacaggcagaataaaaacttttcctaaagtatctgtcctttgctgaaaccagcttctcacctgccgaaagtttaacactgacccaatcaaattgactttcagcatcttgagcagggacaagttagaatctcctatttccacccctctccacccagattttgccaccagttattctttttcccagtctctcacagtgatacacattcaaccctctttcaaatggtattaggatatatagtaggatataatgaaacttagtggagtttttgtgatataatgaaactctgtttatttcataggacagtagatctttgattttatggtaatgttttaaatggttgtatgtgtgattcttgatacagagaacagcttgtgacttttcccactttttcakcagcatttaaaaataaaactctctaaggtaatattcttctaacttaaagaatatcattgcatacctatatttaggcactaaggagtactgtactattatgctgcaaagattttaactacggggcttgggaaataatctcaatgtgaagatacatgttacatcatgtcagttattattgttctattgttacttccaagattmaggacttggttctaagggagggacatttcttttaaatgttttgtttcatttttttcatgatggagagatgactgaattactgtattgtcagtttctggaaacttgaattatcagttttttctaattcagcttgggaacagggctaggagagaggacagtgtgagaaagtatgtcaagcctgattggtatataatactgctcttggccaatatatttaaaaaataattttcaatacacctcccccatctttcttaagatggtggaatcctccagcatgactccagttttcgttattttagcactagacttttaatgatttcagaatttccgtctgcttttgactattctccctggtgttttaaaaatatttatttcttctattcagaattctcgatagggtttttatgacattgacctcactttctagtaatgtgtgtcttatctcccaagatgctcctcagagtggtcaagtaagaggtatgtattccggccgggcgcggtggctcacgcctgtaatcccagcactttgggaggcccaggcgggcagatcacaaggtcaggagattgagaccatcctggctaacacagtgawaccccgtctctactaaaaatacaaaaaattagccgggcgtggtaacaggcgtctgtaatcccagctactagggaggctgaggcaggagaatggtgtgaactcgggaagcggagcttgcagtgagctgagattgcaccactgcactccagcctagggggcagagtgagactctgtctcaaaaaaaaaaaaaaaagtatgtattccatatcattgatctttgaataaagtgaaggaggaagacctgcctcatatacgttgttgaatatcacttaaaatttgatcttaatattaatttcccaagattcatgaataacgctttcactactggttgatgtaatctatttcttctgcaattatttattagagcagacatcatcctagaggacaggaaatatctgatttctggattatctagaacctttcccaggccatctcatctggcgcagggtaagcacttagttgaagtttgaattaatgaaggaataaatgaaggaacatgtaaagctttgagaacaagtatgcatattttagttataggatcaagatagttattaaactgtaataaaaagcagaacttttactttattttagtttgattagtttttgagtaggttctacaatcatgttatgtaaaatcaaaaagatattggattagtttcctagggttcctaaaatcaggcccactctaatccactgtcatatgacctcatcttcacttaattacatctgcaaagactcaatttccaaataagttcacatttacagatatgagggttaggacttaaacagatctctttttgggaacacagatgtacccactgcagatataaaagtatataaatgaaaagtttcccactcaccgttgttcccaggtcacccagttgtcctcctcagaggtcaccratgttattttactttattttaaacaactttaactagtctaaaaatgatgtaaaggtaagtgattctcactttatcctataagagacagtcttgttcttayctgtttcattcatcaaaactttttgggttttagtcttcaaatttatcccatgtcctcagctgggttcagggatggggagaaaaggcaaaatgttcaagtagacactaaatatagtaaacctgtattaatcattgagtgaaatatattctacatgcacgtaactccctcattaaatgtcaggcattatgtgggtagcacttaatcactcatttgctggcacaaagtagattgctctagttttaaatcctagtaacattaagtcttacagcattttgttgtcagttttttacttaaatacatgttattaaatagtttgggaataaatttgttgttatgcatgtattatattgctgttaatgatgctgttaaaataaaacttttttttacctgacagtgctatatggaattagatgaaatttatgaaatgtagttgcattccatgatacttaacaaaatatatgtgatatcctgtgtcttaaaaatgaaatatgtgtacaaaagctatgtataatgctgcatagtagcaaattaaatgatctgaaaagtcctgcagtaagcaaccagtttaggctacattttcccgtaaagtctttctttaaaaacaactacatcctgcattactattgtttcccagaatacactttgagaaatgaaggtctacaagccgaagacagagttagaacagtgagtcagaagccaggcagtgaattagggcagaaaaatagaacttttatgctgcctacctccagtaggagatgacttaggtcctttttgtttccataggatgtggcacaggacatggggcgagggagaaagaagttaggggaaagagactgggtttgggggcctgggctttggggctaggcagattgggtgtaattcccagcactgccactgactagttatatgatcttagacaagttgctccatttttctaagcctaaatttctttatccaccaggagtttgagaccagcctgagcaacttagtgagaccttgtctctacaaaaaaaaaaaaaaaaaaattaaaaattaaaaaaaaaatctatccaggcatggtggtgggcacctgtggtcccagctactctggaggctgaggtaggaggatttcttgagcctgggagtttgagactgccacgagctgtgattgagccactgcactccagcctgggagacagagtgagaccctgtctcaaaaaccattttttttttcttcatctaaatagggggaagacacaattcctatccctaaagaatttaccatttaattgggacatgagattagaagacctacggttatgtaaagataatatgattattgctttaagagatatacaatgtgattgggagttttgaaggagggagaagccagttagttgtggacaatcaagaaaggctttgtggaggagctggcatttaggtgtgtaggtctccatgggttagtaaagcttcaacatttggagacttgttagtggagagtgcattccaggtattaatagatcaagaagcaagagcaaaggtatggagatgggaaaggaaagacattttaaagaatagcaagtggcctcatttctctggagacagtagaaatgaagcagccattaaactttgtgacctatgtgctgtaagggacccagtggcactgatagttttagcagtgctgatagtggcttttgagtagactaatgtatttaataatcgctttgacaccattacgaagtaaacaaccttgtacttgagtagaatttagcttctgctggatggtccctgtcctgaggtgctagtacacatattttaatctggcacagagcccacatacaatggaatggggccactttcataaatatttcaggatttctaaattatcttccctgaacaatgttgagggaaagcttagtagatgaataagattttaagaccactaaataaaataaaacagatttctttactcataaacttctaagaaagtttgctatgctaatgagtagtgttagtcccatggagggagatttagtgtgtgggattctctgaacttggacctcagaaccttctgttgttccctgatctcatactgacacctcctcaaaagatgttctcttcttatgtttgaagtcagtgttcttattacctgtggagctttttcaaaaggcaaattctatagttcttttctttacccttgtcaccttcaagcatattagactcttggcatgtaggggagggataggtactcagtaggatagtacctctcactccctatctccaccccttcactgacctgacctaaggtattagaaatcattctgtcaatcacatgaacaattaaggcccactctctaaatccctaattgcttactttttttygggtaagaaaaccttttttaaaagctatgaagaaaaatataaatagatttatgtaagcaaaggcaaaggttatagatcaccctagaatagtagcagatcattggagaagagtataacatgcctagactattatgaatgcattaggtaggatgttcttgtgttgctataaagaaatacatgaggggggcaaggccaagatggccaactacaaacagtkgtgattggagactcccattgaaaagaaccataataaacatgtgaatccttcactggcaaccaagatatccaggttctctcatcagaaccaactagactctggctggcatgatccacgaagaggagggaacacagtgtggtgtggtggcccacctgagagccacacggggcagaggagcccccaacccacagccaagggaggcagtgagtgagcatgctacctagccggggaaactgagcattatccacagaactctgtcagccacggatyggaagatcccactcacctacccacgccacggggtctagggtcccaaccctggagctgcgcagattctcaacagcctctcagctgcaatctgcttaagcctgyggagctcccctgggggaggggcaaccagcaccacagctgtggctgcctgctgtgtaagccatgtgagctccttgggggaggggcagcagccagcactgggactcataactgcctaacacactaacctccctgggtgggggaagggcgtcattcatctctatagctccaggccacactttgcttttcccctgctggagccagtgaggctggatggcttggtcccaaaaggtgtcccccacaggccaacacaccagctgtggcggactgcagccagaaagcctcttcaggcctgaccctgactcatatttccttactgggcggggctccctgcagtaactccaacaactccagccagaggctcagggacagaacacggatctccctgggcctgtgcccctagtgggagggatggctgtagtctctgtggaccagcagacttaggttttcttcctggcagttctgaggaatctgggcagcccagatgagtgggtttcccccagcaaagcacaccccatccacaaagggacaaagtgcttcgttaaatgggtcctgttccctgtaccacctaaatgggtgagaccctccaacaggggttttcagacactctatacaggagcaatcctactggcatcagattggtgccccttgaggtcagagatcccagaagaaggatcaggcacccatctttgctgttctgcagcctttttgagtgacacctccaggcacaggagcgaaccagatgaatacggcctgaagtgaatccccagcaaaccrcagcagccctacagaagagggacctgaccattgaaagaaagacaacagaaagccacaacatctgcatcaacaacaacaaaaagtccccacaaaaaccccattcaagggtcagtagcttcaaagatggaaactagacaaactcaagaagatgagaaaaaaatcaacaaaaaaacgcagaaaacccaaaaggccagagggcctcttttcctccaaatgattgcaacatctcttcaaggaacagaactagatggaggatgaggtggacaaattcacagaagtagacttcagaaggtgggtaataaaaaactacactgagctaaaggagcatgttctaacccaatgcaaagaagctaagaaccttgataaaaggttagaggagctgctaactagaataaccagtttagagaggaacataaatgacctgatggagctgaaaaatatagcacaagagcttcgtgaagcatagataagtatcartagctgaatcaatcaagcagaagaaaggatatcagagttttaagaccatcttgcttaaataatgcatgcagacaagattagagaaaaaacaatgaaaaggaatgaacaaagtctccaagaaatatgggacttcataaaaagactgaaactatgattgattggagtacctgaaggagacggggagaataaaaacaaggtggaaaacacacttcaggatacatccaggagaacttccccaactgagcaagacaggccaacatgcaaattcaggaaatacagagaacaccactaagatactccagagaacaccactaagatactccatgaaaagatcaacctcaagacacataatcataaaattctccaaggttgaaatgaaggaaaaaaaagcgagagagaaagaccaggtcacctacaaagggaagcccatcagattaacagcagatctctcagcagaaactctacaagccagaagagattgggggctaatattcaacttttttttttttcttttttttttttgagatggagtctcgctctgtcacccacgctggagtgcagtggcgcaatcttggctcactgcaagctccacctcccaggttcaccccattctcctgcctcagcctccctagtagctgggactataggcacccaccaccatgcccggctaatttttttttgtatttttagtagagacagggtttcaccatgttagccaggatggtctcgatttcctgacctcatgatctgcccgcctcctaaagtgctgggattataggcgtgagccactgtgcccagcctccaacattcttaaagaaaagaattctcaacctagaattttgtatctagccaaactaagcttcataagtgaaggggaaataaaattctttccagataagaaaatgctgagggatttcattatcactaggcctgccttgcaagagctcctgaaagaagcactaaatacgaaaaggaaaaactgttactagccactgcaaaaacacacaaaatataaagaccaatgacactatgaagaaactgcatcaactagtgtgcaaaataaccagatagcatcatgatgacaggatcaaattcacacataataatactaaccttaaatgtaaatgggctaaatgccacaattaaaagacacagactggcaagttggatacagagtcaagacccattagcgtgccatattcaggagacccatccacatgtagagacacacataggctcaaaataaagggatggaggaatatttagcaagcaaatggaaagcaaagaaagcaggggttgcaatcctcatctctgacaaaacggactttaaaccaacaaagatcaaaaaggataaagaagggcattacataatggtaaaggaaacaattcaacaagaagggctaactatccaaatcatatatgcacccaatacaggagtacccagattcataaaacaagttcttagagacctacaaagagacttagactcccacacaataatagtgggagactttaactccccactgtcaatattagatcaatgagacagaaaattaacaaggatattcaggacttgaactcagctctggatcaagtggacctaatagacatctacagaactctccacctcaaatcaacagaatatacattcttctcagtggcatatggcacttaatctaaaatctaccacataagtaaaacattcctcagcaaatgcaaaagaactgaaatcataacagaccacagaccacagtgcagttacatggaaattgaataagctgcttctgaatgactcctggataaataatgaaattagggcagaaataaagaagttctaaatgaagaagaaataaaggaataaagaagaaataaaggatggagaacaaagagacaatgtaccaaaatctctgggacacagctaaagcagtgttaagagggaaatttatagcactaaatgcccacatcagaaagctagaaagatttcaaatgaacaccctaacattacaattaaaagagctagagaggcaggagcaaactaatccaatagctagcagaagacaagaaataactaagatcagagcagagttgaagtagatagagacatgaaaaattctccaaaaataatcaatgaatccagaagttggttttttgaaaaaattaataaaatagatagaccactagctagactaataacgaagaaaacagaataatcaaatagaaacaaaaaatgataacggggatatcaccactgacaccatagaaatacaaactaccatcagagaatactataaacacctctacacaaataaactagaaaatctagaagaaatggataaatacttggacatatacaccctcccaagactaagtcaggaagaagttgaatccttggatgagaccaataaaaagttctgaaattgaggcagtaattaatggcctaccaaccaaaaaaagcccaggaccagatggattcacagctgaattctattacaggtacaaagaggagctggtatcattccttctgaaactattccaaacagttgaaaaggagggactcctccctaactcattttgtgaagccagcatcatcctgataccaaaactaggcagaaacacacgcaaaaaaacaaaacttcaggctagtgtctctgatgaacatcgatgcaaaaatcctcaataaaatactggcaaactgagttcagtagcatatcaaaaaacgtatccaccacaatcaagtcagcttcatccctgggatgcaaggctggttcaacatatgcaaatcaataaacataatccatcacatgaacagaaccaaagacagaaccacatgattatctcaatagatgcagaaaaggccttgataaaattcaacatcctttcatgttaaaaactcaaactgggttttgatagaacatatctcaaaataataagagcaatttatgacaaacccacagccaatataatatttaatgggcaaaagttggaagcatttcctttgaaaactggtacaaggcaaggatccccactctcaccactcctgttcaacatagtattggaagttttggccagagctatcaggcaagagaaagaagtaaagggtattcacataggaagacaggaggtcaaattgtctgtttgcagacaacatgtttttatatttagaaaaccccatcatctcagcccaaaactcctttagcttatacgcaacttcagcagtctcaggatacaaaatcaatgtgcaaaaatcacaagcatgcctttacaccaacaatagacaagcagcgagccaaatcatgaactcctattcacaaattgctacaaagagaataaaatacctaggaatacagctaacgagatgtgaaggacctcttcaaaatacaccacactactcaaggaaataagacaggacacaaagggaaaaacatttcatcctcatggatagtaagaatcaatattgtgaaaatggccatagtgcccaaagtaattcatatattcaatgctattcctatcaaactaccattgacattcttcacagagttagaaaaaactactttaaatttcatgtggaatcaaagaagaccccatatagccaagacaatcctaagcaaaaagaacaacctggaggcatcatgctacctgacttcmaattatactacaagactacagtaacaaaaacagcatggtactgttaccaaaacagacatatagacctatggtacagaggagacctcagaaataacgccacacatctacaaccatctgagcttcgacaaacctgacaaaaataagcaatggggaaaggatctcctattcaataaatggtgctaggaaaactggccagccatatgcagaaaactgaaactggaccccttctttacaccttatacaaaaattaactcaggatggattaaagacttaaatgtaaaacccaaaaccataaataccctagaagaaaacgtaggcagtaccattgaggacataggcatgggcaaagacttcatgatgaaaacaccaaaagtaattgcaacaaaagccaaaattgacaaatgtgatctaattaaactaaagagcttctgcacagcaaaagaaactatcatcagagtgaacaggtaaccttcagaatgggagaaaatgtttgccatctacccatctgacagaggtctaatatccaaaatttacaaggagcttaaacaaatttacaaagaaaatttaaagaaaaaaaacaaccccatcaaaaagtgggcaaagaatatgaacagaatatttcaagaatgtcttcttgaaagaagacattcatgcagccaacaactatgaaaaaaagctcagcatcactgatcattagagaaatgcaaatcaaaaccataatgagataccatctcacaccagtcagaatggtgattattaaaaagtcaggaaacaatagatgctggcaaggctgtggagaacaaaggaatgcttttacactgttggtgggagggtaaattagttcaaccattgtgcaagacagcatggcgattcctcaaggatctagaaccagaaataccatttgacccagcaatcccattactgggtatatacccaaaggaatattaatcattctactataaagacacatgcacacgtatgtttattgcagcactatttacaacagcaaagtcatggaaccaacacaaatgcccatcagtgatagactggataaagaaaatgtggtacatgtacaccatggaatactatgcagtcataaaaaggatgaaattatgtcctttgcaggaatgtggatgaagctggaagccatcatcctcagcaaactaatacaggaacagaaaaccaaacgccacatgttctcactcataactgggagttgaataatgagaacatatggacacagggaggggaacatcacacaccggggcctgtcagggggtggagggctaggggagggatagcattaggagaaatatctaatgttgatgacgggttgatgggtgcagcaaaccaccacgtcacatgtatacctatgtaacaaacctgcgcgttcttcacatgtatcccggaacttaaaataaaataaaatggaaatatatgaggctggataatttataaagaaaagtttaattggctcacagttctgtaggctatacaggcatggtgctggcatctgcttggcttctggggaagcctcagggagcttttattcgtggcaaaaggtgaagagggagcaggcacatcacatggcgagagcaggagcaaggctgggggagataccacacatttttaaatgaccagatctcatgaggtctcactcactatkgcaaggacagaactaagacatgaggaatccacccccatgacccacacatctccaaccaggccctacctccaacactggggattaaatttcaacatgagatttggrctggacaaatatccaaaccatgtcagtgaatatattttagagtttaaaagtctgtttctaagcttaactttgatatgaataatttaaacacacatgaatgtgccttcaaaccaaactatacaatgtgtaaaaaccccttcgttccacattggggtttygtattatgaaatataaaaaagaaaaaaaaaagaaatacgttatttggctcagaattatcaagaatctgctctgcaactaatattacttctcactacacatttctttttatttctcagattcttagcactttttgagagatcagagaaaagataaatttaaagattttactacttgttatcatctctagatgcgaaggagattacaattaatcattagattcacagaattcattgataataaaaattattattcttttggccatataacaggatttctgtttctaatgtaggtgtttgatattttaacaaagatccctatgttactttttcttaatagttttcagttggaatgatatacatgtcatatatatataactggagttagaatgttatattgtacaatcattgcatatataaaggtaatataaggtagacctaagaaggccatttgcagtaatacttggaagcaaaatttcttaacttcctgatgaagaaccttaaaatatgttgaacttgctttcctctcatcatcaaattgcacatacttcctgttagaaatgttaacatctctccttatttttgtgagggacaaatattttctctgtatagaaggcagggaaccaatatagggaaattcctaaaggaatgtgtgtaagttgccagcattcatacctcctgagatgtttctaaaagcatcatgaatagtatatagtgaacatcttccctccagctgagcttttgaaatagctcactcagcatttttgtttaacaatatccctgggacataaaccaaatagcatttcctattcagtctcatctgtcattttcctgatttcacaaccagcctccagatgtcaaaatatgaaggtgaatgtgaatgaaattgtttktctatcagagctccctaaatgaaatagaccaagattatcctgtacccctgatgccccaataaattggtcagtcgtcccaaagtaaaagcttgaccccatgagtttctaaatcatttccaacgtgtattgtagtttaaaacaaaaaaytatgctatacttgaaggccattttagctgagttataaaatttgcttctataaatcttgccagagtaaaatgggccttggataatcatcaaaacaaatacagatggtccctgacttatgatggttcaacttataatttttctactttgtggtggtacaaaagcaataccatttagtagaaaccaagcttcaaattttgaattttgattttttcctagactagggatatgtggtatgatacttttacatgagatagtcaacacttttttataaaatagggtttgtgttagatgatcttgctcaactaggctaatgtaagtgttctgagcacatttaaggtaggctaggctagactatgttgttcagtaggttaggtatattaaatacatttttgacttatgatattttcaatgtatgatgggtttatcaggatgtaactgcatcgtgagttaaggtgcagttgtattctaagacctctacaaaaaacattgacagcctattgctgttttaatatctgtgggattgcattcttacaatttagatgtagatttagattagatttagaccattggtttctgtttccattacaaccacttaatatataatatgaatctggctccaaggcatgggagaaacatgtaaaagtgcactgtcaaacaccatatgtaactgttggctatattgattttgtggcacttatctattctgtgtgcatttaggtttttgaagtatgcaagttttatcatattctactgggaaaaatggctgatgtagtcttttgaatggcccctcacacaccacaaagcttgggaattctagattcaaataatttttaggaaagaaggactcctaaatattacctatttgagttgtttsttttttcagaggcctggaaaggtaagatgccttgcccaagatcacaaagccagttagtggcagagctgagttaggaaccctgtaattcccagatactcagtttattatttattcttcaattcattctttaggaatctttattagcaatagcatcaacaatcacaaaacatgcttgttttgcccattttggttggtgtactctttcagttttttgcataaaaagtatactcagtaacaaatctgccttcagcataatttcccataatcaaacatcatgattaattttaaagtatgaatctaatgattttggcactctagattcttgtgatattttacttcactttgtataaacttaatttatttatctgttttgattcctttttactgagttatatatcttccaccttttttcctataccttttattaaactgtgccttggagaagaaaatggatttttcatagcttgtattctgtgttacagtcacattattgcttaaaaatagaggttagatgtaaccagggacattactgtagtatagccaacttggaatttcttcctcctttggtgagctgatgggaaaagctcttgacttgccattggaagacctggctaaattcctgcagtgccacatttcacccatttgtggggtttttttgtttgttttttagagacaggatctcattctgttacccaggctggggtgcagtggcataataatagctcattggagctttaaactcttgggctcaagcaatcctcccacctcaatctcctgagtagctgggactacaggtgtgcaccactgtgcctggctaattttttttgtttgttttttatagagaccaggtcttgctatattgcccaggctggtctcaaactcctggcttcaagcaatcctcccaccttggcctcccaaagtaatgggattacaggcatgaaccaccatgcccagcccacctgctgttttaatttgggtcatcactaacccctctgaacctttttcatgatagatagaatgggaataatacttgtctattttgtgtcttggaatgtgaccctcatagcaattctgagaaatttataaaggagtactttgttttgtttgtggttcttgatcctttggttatcttcttttaatagggacatcaagagtgtcacctcaaacccccaatatctgttggtgaataaaaaggtgatgatggagaaaatgttttataaattgaaaaatgcagtctaaagtggtctaatattgttaccaagtaatccccaaaagtttttaaattggtacctagggatcaagaaactgcttcactctatttgctgtrctttcttatctttcaaaattttacccttccataaagacacctttcaaatgcttgatttctcttttgtcttttctgattcaccttctccctaccccaacattagcttggatctcatgttcatttattttttacttagtccagaactagaatgatagcaactttagggactgctctcatgaagcatttgaaggaggagaaggccttgcatatgatagttgcttagtaatatctcttaaagtgagatttagggaaaatgcattttttagcgttatcaatttcttccttataattttactttgaattacttatttaaagtttaaataatagtgtatgggaaaaaaatctttatttttaaacgccttctagtatgtattcttttatgggctggaatttgaatggttgaaaacagtagcattttagaggattaaaatttataaattaatttatctaaacatcttttttgaaaaccttcatttaaaaaatctattttccatttatatttttcatttctctctaggtgatcatatttaagtattgtaagttaaggacctgggcaaataattcctcaaaaattatattaatttatttttaaaaggaagtttattcacttactcacggcaaaccaactttraagataaaaatgtgttgccttaaagactgaagacatgttcaagatggcaaaaagagtcttcctaccccttttaaaaagtaaatgcagaagccgttgtgagcagtgatacttcatgttttgttttccagtagtagaagtgttttaaaatgataagtgttctttaaaatgttatggtcaaaaagaaaagatatttattggctgggagacttgggcttctgatagctttgcctggaattatgatggaaattttgacagaatcataactcaagttgacattaatgggaatcacttccttatgattttgtgtagcctaataaaaaggtcatttgaaaattttagataatcagatggtttaatggccaagtagaaatagcactttattttttgtgtgttaatctttgggtgcttccactaaatgtagatttagtgtgtgtctttcctttgactgttaacacctcttacagctatagtgattactagtctagtcacagtcagtggctgacatttctatgactactgactcttttttttttttttttttgagatggagtcttgctctttcaccaggctggagtgcagtggtgtgatcttggctcactgcaacctccacctcccgggttcaagtgattcgcctgcctcagcctcccgagcagccaggattacaggcgcctgccaccacacccagctaatatttgtatttttagtagagatggggtttcaccatgttggccaggatggtctcgatctcttgacctcgtgatccacccgacttggcctcccaaagtgctgggattacaggtgtgagccaccgtgcctggccaactactgactcttataaagatttattaccagatgatgacattgctcctgatgtctctaactaggtggtcccccttcacttttcttagtcttctgccatgacccctccctgtacctctatagtggaagtggttcacattagttygtccttaaccttaattctaacataaatgaatgtggaataccgcaaagagaccaaaagagctagctgtatgctagcactggctctgacagctaacaagctttaaggctttgagcaaaggacttctcctctccagatttctttttcctgatttgtaatatgtgcattggattaggtgatctcaaagatacctctcccttctaagattttatattcatcaaaattcatctgccagaatggcactgtgataattagatagactgccagctggatgcagggaaatagcagagctaaaagctccagtctaaactatccctggtgaatattcatttttgcatattttaataacaatactctcagtgtctcacctccacccagtcactcttgcaccctgtcactcacttagcaagaccctttcttttccttcacgttttacaactctgtaatttaacaaaatccattagtaccaacaaaatggagtaacagtgatgttttaatatatggcatgtacccttaatatcattactagtatttgagaaactaaatgaaagatttttaactttgacttttaaggaagaaaaaaaaatcacctttctttatttaatgagtaaaaaggacctccagtaaagagtaatgcaccataattgttattcacttcacactcattcctttttttggcatgcagagcctcatatattcttaagcataaaatgctggatgacatattaaatgaagggtcattctggaaaataaaatagacaaaatggctttactctcaaagataattgtgaagtaaaaaccaaaatawtagcttattcataactatttggaggcctttcttaagtccagaaaggtcagagggaaattgaataaatgtcaacactgtcaggtggggagactctcarcgtctcctgaggaatttaatttatattaatgagaagygagmcctgcttagggccctctcagagactgctctggtgtcaaattttaatgatttaacttcatgaaaaggattcctaacaagttatccaacaagataacctcacataagattgctttttaattgtgaggcctcaattgctctgacctccccaaaccacaggcacatgttggggcttcttgaggacttgcctcaccaagtcgataacttgccgtcagttctggcccttctaggggaccaggtgaaccaagtgagattctgacgataaagttctaattcaattcagcagacattcatgaagacctatcactggggcaatgtgtgagtgacaatagtaggtgccacttatgaacacttaatgtgtgtcaggctccctgctcaacgttttatgttcccaatttctaatcttcatagcaacgttacagaattacagatgtggagaaggagactcagagacattaagttaacatgctyaagattataagtattgccaagtagctagcagaaccaggattcgttaggtcagtttgcctcccaaatccatggctttctgctactcacctatgtcttaggtttttttctttactcatctaacgttccagtgttcataatagctttcctttgtctagctatgttccagatrctgtgctgggtgttttattatgtaaacctactgaatagatgatagtagccccactaatgaaaaaggagggatggaggattcagcagcttgccccagatcacacaggtagaaaatggcagggctaaaattctaactgagatctaactgatcttccaaacctatgctcttacgattagagaacagtgactttaacagtgctgtgccctkaggtgatacagaagtgttaaagcaggcctgttcactctgatagctgaaaagtccactgggttgagatggacttggactcaagtgtctgtaaagccaagcagaataaatgtgaaatgaagtgattttgaaaagatgttggggaagtacaggggtaaggaagattaattccaaatagaaggcacagaatggttttgccaatgaattggattttaaaatacaaagaatgaaagaaaacacatttcaggcagagaaactagttttcccttgagtaagtacagctttggtcacttcacttaggtttggatgtatagtgtttttgttgttaatttcaagtaattagtaactttagttttaattttctcattggctcatgacttatttaatagttgtcagaatctttaatttgttagttttgtgttatttaataagttatttttatttgtactgcctttgggttggagaaaataactgagtcattagtttatgaatttattaaggttttctatgtggcctgtgaaatgactgatttttataaatgtttcatggatatttgaagtgaatatttaaatgtagatgaattttctaaagagtgagtgtgaaggtagaaacttgtttattagattatttgaatcttcacatattttttcattgtctgatgagctaacaaattatcacacaagaatctcctacttgtattttgggttcaaaggctttttctcatattcttggtttttacttcatgtaattgatgatgtgtgttttggtatatataactttgtgattattatgtcttcttggattatacctattatcaatataaaatatccatctttgctgtattttttttgctttaaattcactctgttatgaatattgttagagcgaattcagtttatataacagataaattgttgcccacatttttctttagagttgtcttttatattaacaggtttctactccatcagatggtcttttaaacaattttaccaacaaacatttattttgattgctcatatgattgattttattcctgacattttattttgtgttttctgatgcttttttggtatgttttcttttagcctccttttctttctttgactttattgattttttaaaaatgctttaaaactatattttctttcctactagcagcagccttttaatcaatacctacatactttatcaatattaaaaatgaaaatatccatgggctccaaccgaacaagaaaacatatttaacatgctttgatttatcctttttattccccttccttcagtgcttcaagtgttttatggaaataatatgagattttatttccacatcattatctatataggtgtactttacctatacgttttgtctcttaaaaatattataatgtggctatatttatagccacattataataattacatgtatttaactttgagttttactgagttcattgttcactaccatttcttgcctgctatacactcctttcttgagtttttgtttgagttaatttctcatttcatcgcagtatttcaagtaatttttccagaaaatgtaaatgggtgaacagtatgatgatactgtgtcatcagtgacctgcatattgctaaatctaaatgatcagttctttgtcctcacctttcttaagctctcagtagcaactggcaaatgattactttcttgtcttcatttggcttttaagataccagtttcttttggttcttttagctcaatggacactatttcttgacttgcttttgttcatctccccagtttcttaatgttaggctatcccagggctcgttcctcaactctcttttcttctgtttacttgtgttctctaggtgattccatctaggttcgtggctttgcatgtcatcggtataaatccaaagtttacatctttagctcagacctctcctgtgactgcatgtttcccattgtatactttatatctgagacttaacatgctccaaaatgaagtcctggtctccccacccaaacctgaactttcctaaatattattatccatctattactattataacatagcctcctagttggtttctctacttccatctttgaccctccacaccccattctctgacacagcagccagtcagcatccatttcttcaaaggttcatgtttttataagggtctacaggatctgcatcgacctcacactctaaactcatcttcccctaaaattctcctcctcacccagtcatattggtctacttgctattcttccctcacagcaagtgtttatttaaatgtcttcacacatgctgtttcttctrtctgaatgccttcccccagatttctacacggcttcctcccccacttacttcaggaccctgcgcataggtcaccttatctcaagcgcttgaatatgcctcatatgatgtagctccttggtacatacttgttgatgtctgtggggataggcaaaatgccttttgtcatgtttgggtctagtattttacatcctcattcttttttcttagaattctgatcagaccaattattgagaagcttttgggaaacactgtttatctttcctcatagggtgtggaaaatctcttctgtgctagttttgggtgccaggcagctttgcattakttgtttttgcgtaagttggtctcatttgttcattttgtcaaaaaaatccttttaaatttctgatttatggtttcctaatttttcaatgctatatttctttttataattatttttgttatttccataggatttttgagaaggatgggaggtaaatgtgtagggccaattctgaatctttaaaatagaaatgcataaaatgtgcttggctctgttcattcacaaccatacctatccatttgaaaaattaagcatttttctgtttgtgtgtgtgtacgtatgttttaatttattgagtctgattacaatgcccacttctacatatraattttcagagcctcttgtaatagttccacagccctaaaattgggaaactatctgctatgaatatatagcagaaacatagtcattggaaatggtgggcacattggtatccctaaagagtagagtaaaattcattttcatctaaaggaacccaatcctcttgtttcacatttagaaatcatcttatgtcattccctgttmctctcacagaaaattcagagtaaggaacacaggtggagaagaaatgggcaggcagctttgcagagatgttatcaagataacatttttcttcacattctgtagactctagagaaatggtttacaagagagctttaaaggtattgttttaacatacatatgagctgtayttatgtatgacacctattttactttttcatttttgttgttattgtcaaaacaaggccagtgtttttctacatcgactgaatttctggacccacttcccattcaaactgtttttttgaaaaacagtcttattaattttctgtatattttgttttctttccaacatttttagattcaaccatcagacacaaatttctttttatatctgctttgttagttgtggacatgcctttctaccgtgtcccttgatacatacacccattaagatgtttatctagctcgactaacactgagtgctggaatctgcaaagttacagaattgagaggatttagatcacatatcatttactctgaaaagaaagaaagggcacagattctggaaacagacaagtttgaacccagccctgctacctataaactgacttgtgggaccttagataaggtacatatctttaaaaaggtggatagtaatacacaccttgttagattgttgtagagacagtgatacgaaatcattgcccaaggttaggtgtggaatagtagctgtgtcagtcagggttgtccaaagaaatagaagcaatagtgtgtgtgtgtgtgtgtgtgtgtgtgtgtgtggtatgtgtgtatgtttgtgtgtgtgtgtgtgtgtgtgtgtgtgtgtgtgtgtgtattaagagacttattctaaggaattggcttatgtgattgcrggagctggcagwtcaaattctgtggggcaggccagcaggctggaaattcaagtgggatttctttgttacagtcttgagtaagaattccttcttccctaggaaaactcaatttttgctgttaatgyctccaactgatggataagactcacccatattatggaaagtaataacttttacttaaaatcatctgattgtgatattgatcacattctcaaaataccttaaaagcaacatctagactaatatttgaccaaaacaactgatcaccgtagccttaccaagtttacatataaaatataccatcaaaatatttaataaatggtagctattatttttaaagatggtattttctattacttcaattattattattttattccataaacatctcttgaggatctaccacataccaggcactgtgctaggtatgtgtgtgtgcacacatggaggtgggggaaagggagagggataaaggtggataagttataccacttgttctctaggcgtctatattccaatggaagagacaagtcaaagggaaatgataatgtattaggaattatggatagatatataatactgtaaattatatatttatgcttttgtattgtatttatttatattgatacctatatttatcttggtaaaattctgtccatctcttcatccttccatccatttatccatctaatctgcaggaccttgtttccatttttgccttgagttgaagggaagagaaaaattgtcttggatgaaactactctgaataagcattggttgatgtcaagcaggggaatgaacctctaccatgattataatgagtcaggtagctttgttgttttataaaggtatttctaaaaccctcttcagaagcaatgcataagtaaaataagttttctacgtgaaccaaggctaaagctccactcccctgcaggttttgcgattttactctagataatatgtactgtttaattatggttcatccatataataaaatattatgggtctgttaagtacttttaaaagcatatatgatgttctttcaatttgttaggtagaggacatgactgtaaaatattacttagtataatctttatatgcattgaaaaagactggaagaaaatacaccaaaaactttacagtaactatttttggacagagggattatggttggttttgattgattgctgtatatgtttctgtatttctcaagttttctaatttgaatgtccaagtgtggaagaggaacagatggtaaagagtatggctgtagactcttgtattgggaagatgaactcaagcaggtgggccaaattcttattgaccttgccttgttaaggtatcagtgctacattattgatagctgcacttataactagatcttctatcatgttcaattgcagtgtcttattatcataggcacattatattatggggggaagagggagagagagaaagagagagggagggagtgaaggaaggagagatagagagagagagagggagagagaaaatgaaattatctttcacaatatgagaatctatctttcacgatatgagtggctccctatgctattcctggagccagcctgagatgtgagatgtgaacctgctgttcctcagttatattggttgccttgtgtgtctcatgttgtgagcctcttgccatgctgggtgtgattttggtgttgaaagataaatgattttataaaatatgatccaacttattcatttggttcacagcagaaaaataaagatctgctctagtactggaggagggactggctgagttggactcattgagcgatgttacaatctttgtttccatgaacttttctaaggaatgttaagggtagttttgactgtatgatttgctaatccaacctcatatatctttattatacgaaatttatttttgcatttccctaccagttccaatatataagtgtctctctgaataaatgttcttcccattgtggccctactttgataccactatctaattatagagagcatattttgccaatggtaattcttaatctcattatactctaacctgaatttgttcatcttggaacattatattcttacaggttgacactgatttattgataagctctgaatattagctttccagtctttcaaatgcccgtctaatagttctgagatatatactttatttaactagtttttttggtgatagccccatcattaaagttaagcttatattagatcagtaagttttaggtctaggactatctttgtttaatacttgtaatcagaatcataatcataatatactgatactttatatacattggaagtgccttgttttaagcgattataacaagtgattttcgagagacagatgcagtttattttagtataccaaaaggaagtcatcaaaatctacagattgaaatacatctagctttttatgttatctttcattagttctttcccttccttagtttaacacagttttctgttcttaaaattctagtattggttgaccctattctcatttgatttttgatgggaaaagtagaactagacaaaacatttttttaaaaatcacatttttttctaagactttttkctttttatttgaatgctttacattttaattgctcatttaaaccttttaaaatcttagccctagttttcctttatccatcagttttagcctttcatttctattgcttccttttgggcttctattcattgaacaatttctaatttttactagttttctttctttctatttcctgccctttcttaacattattattattatttttttaggaaagaccatgtgttctgattctttaaaattttatatttttccctcggtgcttttctattggattctacaaattgtatttctataggagtgttcattttaaaaaacaaggtgaggtgtctggatcagtatgtctattaggttatctattgctgcataacaacataccctaaaaattagcagcttaaaacagcaaatatttgtataataattgttgtggattaaggacccaggcaggccaggtgcagtggctcacgcctgtaatcccagcattttgggaggccaaggtgggtggatcacgaggtcaagagatggagaccatcctggccaacatcatgaaaccccatctctactaaaaatacaaaaattagctgggtgtgatggcacatgcctgtagtcccagctactcaggaggctgaggcaggagaattgcttgaacctgggaggcggcggttgcagtgagccaagatcatgccactgcactccagcctgacaacagagtgagactctgtctcataaagaaaagaaaagaaaagaaaagaacagaacccaggcacaatttacctgggtgcttctgactcaatagctctgatgaagttacagtcaggatggtggctatggctgaatgctcatctgaaggtttgatggggtggattcactttcaagctcactcatgtggttgttggcagaaaaaatttaattccttgtgggatattggacagagagcctgaatttctcactgtttgttggctgggggcctcccttggttccttgccacataagcttccacagagcagcttacaacatggcagctgatttcctttagaacaagcaaatgtgagagcaagacagagtacttaagatggaagccatagtctttttataactccagaataatcactttatccatgctttatttgttagaggcaagtcacttggtccagcccatatgcaaggaagcaattacataaatagcaggggctcagattattggggactattttaggggctgcttaccattatatgtgttttagaagcagaatatgatacatactttaaagcaacaaaagcagagctccctggaacatggaaggcatggaatatggaaggcagtagaaatacaagtttgagataatatctcagactacaagagtagaacagtagcagggctttgtaaaaatatagatagtgagaaataaatagtttaggatgaagattaaagaaaactttcttatcaatattaattctggtctacgtattttctgttcattgaagctacctagctttttgaaagtagttaaaacaaatcacatccaaaactaagaataactatgcaatttatgttcaggaatttatcataacattatttttaaaaatttatgtgcatacatttttctttttctctcaagtttattttttattttctgtgtacttcttcatttctcttggcaatatagtgttttccctcttgtatatataagtgttttgcttttaattgctgagattttatcataaactatctagccaaattcctttttaagtattgtcactatgtttaatgaatactaaagcgtggcagagttaaggataatcaaaaagggatgataaagtgttcctgggctagcaacagtgggaaactatcactaccccaagcatgtaagggcaagaggagggaatcatgttcctggaaactagcaggagctgaacatatgacggagggaatgcccagctggagcaggaatgcagccgctgcttgtggtctgtcagggaagaatccaaggagatgaataccccaactttgctctcctcttaccctctgatctcttgcctccccttggccaaacctacgagaatccagaaggtaagtgagcccagttgatgcaggctgtgcaggtcagcctctcagggcagagcccagcagagaagagaaagggagagaatgattctgaaggggcaaaaggagaatattcagcaaagaaagaagtttttttaattctttgtattgtctrtgtttggctattagcctatttgaatgtatccactgtctaactgtaaaagttttgagttttggttagtctttctactcaaatggccccataatggttacaatcaagtcttcaagaaactttgttgttggttttcttttttaagtagtaggctatatttatattatgttttatttatgatcacaagcatggtgtaagagtgcttttastgtggaagtttgactttaaaatggcctaccaagaaggaatatgcatcctcgttacatttggaactataaaaataaatacagtgttgttcacacaaacaaataatttttgctggatagttgtttatcagtttcctggagccttgttttataaatactcataaacttggagaaaaagtctacttgagagaagttgacactatatgtagtctgcttattactactttctttttttttaaagtgtatcttacatttagaaacagatactataacatagaagcaaagatgactgatgagattttttcaccaaatatttatggaaaccttccacttaatatgaacacacagagataaatagtgtaggcgtatggtgattaccaagacagagtccttgctctaaaacagtttaccaccaagtagggtatttaagtgcataaacaactaactgtaatgatgagtagtgtcccataaatactgtcttacagggacaggtaatagtataggagtgcacagagtgatttcagagaagctagtgtttgagctaaaccttgagtggtgaatacaattatggtagaggagaggagaattcattttgggcttagggaatggcatgaataaggcacaactcaataaaaatacaaatatgaaggtggggtaagaattattcaagaccgaaccttggtgaacaacatatacaagcaatggcaagagtgaagggtgttcagaaacatggtagaagattaggttgccaagagagaacagggctaaattgtcaaggtcctgagtgctttgctaataattttatgttttctacatagaccttagaaacgtttttgtaaagggaagataaataatggtaaggtaagggatcagctcaagatggaagagaatggggcagagaggcttttggtgatagtgtaggaggaatgaggaggaatttgcatgaaggaggaagaggatttgcctgaaggccatggcatgggaaggaaatggagaacatagatataagacatcataagtgctgataatagacttgggggtttcttgatttctgtttggagtaattggtagaaggtgaagctgttacctaagrgacagtagaaaagaaagagccggctctggaaggaagttaacaaattcgattttagacttattaagtttgaggtattagcactggtctaatgtagatgtccatttagatccwctggaaattttgtctagagctcaggagttgcctgggttcagaatagaaatctgggaacataagcctgaagatatttttaaagccatgaaagtaagcgagccctctcttaaggagggagtttagcgtgaaaaaaggaccaaacagagaactgcctacagagaggttggacaaaagtccatttaaaaagactgagaagaagaaatcaaagaactaagaggaaaatcagggaactgcagttgtcatagaagccaaggagtcggggagtttttagaagattttagaacaatgcgacattaagaactatgtttatagcaacttgtaaattagtcctttctttttcccccaggagctttaaattctgcccatgtgggtgggttgagggagtcttcagagtttgtagaagtagctctgggtttctgaaaaatgtgaaggtgatgtactgacctagttaataccccrtaatcctgggaggaaggaaggggctgtggctggagtatttatttcttgtcatgataggtcttgtcatgaatattaactatttactctttgaagtcacaagtgaaagaagggtctggctgttctgtttaagcatgtcagaagaacaataatgcttactatgatgacttctcaatcttgaaatatattcagagcttgaaactttctttccctccctgtccccttccccttccccttccccttccctggtccctttccccttcccctttcctttcccctttcccttcactttccgctttccccttacccctttccccttccccttccctttccccttccctgttcccttccccttcccctcccctcccctcccctttttgacagagtctcactggtcacccagtctggagtgcactggcacaatcttggctcactgcaacctccgcctcccaggttccggtgattgtcatgcctcagcctccccagtagctgggattaaggcatgcgccaccacacctggctaatttttgtatttttagtagagacggggttttgccatgttgaccagcctcaagtgaacttctggcctcaagtgatcagcccacctcggcctcccaaagtgttgggattacaggcgtgagctatcgcgcctggccggagcctgaaactttcaagctttcagtttaattccatggcttttattttcttttccattttaaacccagttatttcctgaatctaatttatttatttttgtgtatatgtctttaaaaggtttcctaacaattacatttggtaaataagttcttattaagtgtttcttttagttgttgtgcttttgtttattgagagaaattgaaatttttaaattttgcacctttrttgcaggctgccacaggtaatcaagatgatatgcaccatggtaaacaatttctttggaaatccaagatatttcttgaactcggggattcaggaactgaagtttgaccttatcttrttgtataaattactttaacattatggtacttttgtacctcatttggagattaaagagcttgaccaaacaagataggttagcatccagtcacctgtaatgaggaaggagttagttttcatgtgtgatgctttgggtatcagggatatgcatagcttcataaataactgggattttcattggtattttcctaccgcaggtgtrctattttgatattaatagtctcatcctttggatctcttacgtttggcagaatataagtaagaaatctgaataaaggtgaatgttsttacatgtgttcttggtagaagtatatgtcactgtcagagtaatgagattgagggtgaggttgtatgttatgtatctctgatggagattttgaggggtagccagacaggtcaccaatcctcaaccatagctgtctagcactgccataggttctgcagagagttctgcagagcagaccttcttagcaaatgcaccttcttccttgtgctgggctttgaccccagagccttccatggaagctataggtctagtgggttggcctcaaccacttgtgagtgagtattccctttatccttctggcctatgacttagactaaaagaagtctgcctgggctccttttactgaggtctaatttttatccttggattcctgccattcctatgcaatgagaaaaacaaaccccagggggagagaaagagagtgtactagcattgccttctagcctagaccctcacaagacaggagtcctgccaagcaagacacagccttttcacatatgggagtaggcaattcaaaggaggaccagtaacttctagtgatgcagatagaggaatccaaaaggagcacacagagtggatccaagaaatttaactgtaccacttcctaacatgtaaaccatttggcattggttccatactaatgccaattcatctgcttctcggagtgatggaggaggagtgttgaaccctgagagtagtttgtatctctgcattcaagagagaaaacaagagaagctggtagaaaaggcttctcaatttgtgagattaatctgtgttacatcagaagtagtgagaaaggagagttaggatttagaaggcttgggaagacctgaataatgtggataatggtatgtgcaaagccataaaatgtgtggttttgatgaggttagaatcatgcctgaaagctgaatggggatttagacatcatgtggggtatgtaatctgcaagctccgtcctgggcccagtgaaaacctttctgtgagctttccctaaggctgtacttcaggcaaattattatacaagggggaatctatttgccatctctgagcaaatccatgcctccctacctactataggttaggaaataatcttttatatctgttggtgttgcatttacaaagggcttccccgtatattatcacatctaactctgcctgttaatcacagaggaataaatcatggcatctgcagagtagagcctctaccagggtgtgtactcttcatacaaccatggacctgccytctgttaacaggattctgtattgggagagcaaacccttaaaagcagggataaagataytaagaggtcttcctgtcttttactaaggtctgaaatgccaccaattctagcaattgatttatctggatcccctaagmccttctattagagtgtgaatatccatgcaaaagagttatgggctcagattgaagtgtgtcatgtagaaattgatkaagaagcgataattatagcagattcattgatagttttatgtatgtactaatttacttgatgttattaagaaattatgaagtttagagcattgctatagtcactgtgaggattaaaatgctgaaaaataaatgatcccttccccaaagattttacagtgtagtaggaggtcctccagtgaagaaagggggagactttggaaacagaatggctgtaggaagtgatgaagaatgatgtagataaccctaagctttcttttgtaaaagttacatttgataacctctttgagttgttcatttggtggcattacatactgtgatggggtaagatgaatatgaaacaggttatcatgggatagatgggatgccctgtggacaaaatccatgaagatggtatatgaatttttgaaaatagatgaggtgttcctggagacatgattaaaaggaagaagaacagaggctcaagtaatagctcaaagagttttaggccccccaacaggtagaagagttggattaatgggttttgaaggagataatgcacaaaaagttaaattatgaggtcacagaataggtaaattctgtattctggacaacaagcaggaaatctagcccaccttggtgtagacagtgaaccctgatgtcagaggtcgaagaaaatctgatttcacctatattttttagttttgttagcatgaaactactttttaaaatcactttattgaggcataatttatccacagtaaaacaaacccattttaagtacatttcagtgagttttgataaatgtatatagctgtataaataccaccactatcaagatctagacttcaattactccaaaatgtttcttgtgccccttcccagttattctctaccctgatccttggccccaggcaatcactgccctctgtcattatagatgtaaatttgtcttctctagaatttcatattaatgagatcgtataatatgtactcttatatctggctttttgggggattcagcataatgtttttgagattcatccatgtcgttttatatgtcagtagttcattccttttcatttctgactagtattccattgaatatactacaattcgtgtattcattcagatactgatggacatttgagttgtttccagttttctgactaccattaatttccagtttttgactaccattaatcaaagatatacatatctttgagtactcaaatatgtacatctgagtagaaatatgttttcatttttcttgggtgaataggagtgggattgctagattgtatgttaagtatatgtttagctttataacaaactgacaaactgttttccaaaatggttgtatcatttttttcttattcctaccagtagtgtatgaaatttcaagttcttccacatctttgccaacacttggcgtagacattctttttaattttagtcattctaataggtgtgtattggtatatcattgtgttttatttttcatttctttggtgactactaatatgcttggtggccattcatacatgtatttttgtgaagcatctgttcaaatctttgattttttttactgtgttatttgacttcttagtattgagttgaaggagttcttttttttattatactttaagttttagggtacatgtgcacaacgtgcaggttagttacatatgtatacatgtgccatgttggtgtgctgcacccattaactcctcatttaacattaggtatatctcctaatgctatacctcccccctccccccaccccacaacaggtcccggtgtgtgacgttccctttcctgtgtccatgtattctcattgttcaattcccacctatgagtgagaacatacagtgtttggttttctgtccttgcgatagtttgctgagaatgatggtttccagcttcatctgtgtccctacaaaggacatgaactcatcattttttatggctgcatagtattccatggtgtatatgtgccacattttcttgatccagtctatcattgttggacatttggcttggttccaagtctttgctattgtgaatagtgccgcactaaacatatgtgtgcatgtgtctttatagcagcatgatttataatcctttgggtatatacccagtaatgggattgctgggtcaaatggtatttctagttctagatccctgaggaattgccacactgacttccacaatggttgaactagtttacagtcccaccaacagtgtaaaagtgttcctatttctccacatcctctccagcacctgttgtttcctgactttttaatgatcgccattctaactggtgtgagatggtatctctttatggttttgatttgcatttatctgatggccagttggaagttctggccagggcaatcaggcaggagaaggaaataaagggtattcaattaggaaaagaggaagtcaaattgtccctgtttgcaggtgatatgattgtatatctagaaaaccccatcgtctcagcccaaaatctccttaagctgatatgcaatttcagcaaagtctcaggatacaaaatcaatgtgcaaaaatcacgagcattcttatactccaataatagacaaacagagagccaaatcatgagtgaaytcccattcacaattgcttcaaagagaataaaatacctaggaatccaacttacaagggacgtgaaggacctcttcaaggagaactacaaaccactgctcaatgagataaaagagggatacaaacaaatggaagaacattccatgttcatgggtaggaagaatcagtatcatgaaaatggccatactacccaaggtaatttatagattcaatgccatccccatcaagctgccaatgactttcttcacagaattggaaaaagctactttaaagttcatatggaaccaaaaaggagcccgcattgccaagtcaatcctaagccaaaagaacaaagctgggggcatcatgctacctgacttcaaactatactacaaggctacagtaaccaaacagcatggtactggtaccaaaacagagatatagaccaatggaacagaacagagccctcagaaataatgctgcatatctacaaccatctgatctttgataaacctgacaaaaacaagaaatggggaaatgattccctatttaataaatggtgctgggaaaactggctagccatatgtagaaagctgaaactggatcccttccttacaccttatacaaaaattaattcaagatggattaaagacttaaatgttagacctaaaaccataaaaacccttgaagaaaacctaggcaataccattcaggacataggcatgggcaaagacttcatgtctaaaacaccaaaagcaatggcaacaaaagccaaaatagacaaatgggatctaattaaactcaggagcttctgcacagccaaagaaactaccatcggagtgaacaggcaacctacagaatgggagaaaatttttgcaacctactcatctgacaaagggctaatatccagaatctacaatgaactcaaacaaatttacaagaaaaaaacaaacaaccccatcaaaaagtgggygaaggatatgaacagacacttctcaaaagaagacatttatgcagtgaaaacacacatgaaaaaatgctcatcatcactggccatcagagaaatgcaaatcaaaaccacaataagaaggagctcttatatatcctagatataatttttgaccaccggaaattattaaaaatcttgccatgatagtgctttcagtgcattactgtaataaaaataatggtctagatgctaaaatgtaacacatctgctatgatatagctcatttgaggataatagaaaaatrtcgataaaaatattctttttgtcatcttcaacgtgcatgatctcagatttcaaaaaggatgcctgcctacatatctcttcttccagtacactctgcaatctacttaaaaaaaawtttttttaagatagctgctagatgagtgccagttttatattcttttttttttctggcaactcctttgagaaacatatgtttctaacttaagttactgctttttcctccatatgcttcttattccatttctaggtatcagaaaggcatttgggttgaatacgtgcatgattaagtccatggagcttattggtggagtcaggccctccaaataggaaagaaaagagaacctgatcaccaccaatttaaaagtaacttagaaacaaaacatcaaactctttttctgccagtgactttaatttttaaactatataaacacttgctcatcagctattttttgtgctattttatgcattgttccaagctaaacttcctggggaagaacacaggcactactttcaagagctcagagaacaaatgctggaggacaagagagggaattaggattcttgaatgctacttatrctatttacttctggtcttccacaacttcatgtaatttatcatctgcccttattgacttagaagcttacatgatagtatttggttcaatgacattgagtaagcattctgcaaattaattagtgggacaaatttggtctcataattccactgctgcttaaagttattaaagaaatctctcaatctgctagcattgtaaatagcctattctagctagttatatagattcaaaacttactttattatgtaaactatagagtgacaggtcagtgaaagtgtttcaacttttagaaattgttgactttccaggacttgcatttctggccttaattatcttgaatataacaaatcagtgtacggtaagcaaagtgatctctggatgactaaaatagatattatatctcatatctcatatggttcaggcacagcataattcctccaatatcactcagagcttatgtattcttatattaggcatgattttcataagactggttatttgtttcccctgcctgcagctattaaaagcaaaaaaggtgggagttgtggggaggtggtggtaaagagggactcctatatgcaaaaacactgatagcagattagagaaggagagaatcatattttaaaaaaaacatgatttcaaaggaaggccaatttgggaccgtttagtacatgtatggcaaagcccagtggatcttaagggcatccctgtgtcatagggtacaccaacaatgtgatggcccatgagttacaaagactttacattgtgattaatattccttttgttctttgttcgtaataaaattcaagatagatttcaaaccaaaatgataaacaaaacaattatgtgtcaagatttagcaccttgaccacctggaaaactttgtcctgttccttgccctaatgcctttgtgccctccctctccccagctgcacatgcacacttgcacgcgaatccttctcackcacaggagtcacccaccgatggaattttctctgggaaaaactggttgagctgcccttcctttgagctccctttgcttataatatcatggcactaacaaccccatatggtgattacctgtttatttgctcttctttccgatgagactgaaagctatttgagggcaaaagcttgtcttatccactgttatataagcctatcacttaggacagttgtacctggcacatggtatagagttaatacataattcttaaataaaggaatggttgaatgaatgttgaataaatccagaataacttctgaggaaccaagatttgtctgcacagtactttggaaaagcagcatgctaaaacctttggaaaatttgcgctctaatctgtttggaaatttctattagaaaccatcacatggataagagtttagagtaaggtgtctttaagttagatgtctttaagctgtgaaaaataaaactgaatctgaaaaatgaaactatgcataaatattctagcataataaagaagttatggattttgtctttccttaagagttcttatttgatataaaaatatcctccatagcaaaatgaaaaattgaatatgctatatttctataattttaaaaaatacttttgcaagtgatactttaagaaccattaatagttcaccagtgatttggctgaaagagaacaatcagaagcatgttgtttcatggatctagtaactaataaaatacccttgcctggaataatttaaatccagaaaagagaaaaagctcattactgacaagtttgctaatgataaaaaattagatggcagtaaataacattaggcaataacattaaagttmaaaaatgccatgttgaagttattagacttgtaagtacaatgatacatacaaatgaaggagaccgggtttaaagtgcagtaccaggaataaaacagagattaaagagaagggttatttaacactgggatggttagtgaaaaagctcgtgaaatctcctcagactgggataatgtctttgaaatcctttttatatgaatgagtaaaaatcataatcattaatattatttagttttagaataaaattggggaagcccactaaatacatgaagtgttggattagacaggtattttaatggtctttgattcaggaggctgactgctctacaagccttttctgagagattctttttccttctgccttttcctctccatctggcctctgtgacaactatgttcttctactttttcatttatctaggatcatagttgggccacttaagaactgggctttcttccaaaataggatatttgattgtggccattttgacaatgttgtcttaaatataaaaaggcacacaaaaatttttcttaataaccaatgggcattataggcatgcgtgggtgtcatcctcatgctaccttacagtacctggtaggctgatggatggaggaaggctcttggagcgagagaggacgtctgttgcaaatattgcattacttgttatgtatacaaaagctaagaacgcgtagcttttttgttagtttgttttagactgaatagtctaatatatatagttataatgttagttatgttttgacacaaaagttataacattataactgacatagtttgtcagcttagtttgttttagactgaagaaaaatatccccctttcagaaaaaaagctacatcaaaatgtcatatacctgcttatttctgttttgcattaggaagttaataagcaagtaggtgggtgaattgctctgtgaaacctgggctcaataaaacattttgttttctttttattacttaaattggtttttgagccctgcttgctggtgaggtatctgatgtcgcccattgttgggattccttccccagctttctccccacaatgccctctcccctgcaacactgtattgccttggactcccagggcttaaatgggtcctgggaacatgggcagatgtctggtcctgagccatcactatggtcaccatggctccttctatccactttaccacgtctgaaatggcacttcactccttgggggtggggagctctcaaaagtgtctctccayagctcttgtctctgcaggcgggctccagagtgtcagccaagggcaggatattctgaagccagccagtgcccacagccatttgtgggtaccctgctcagaagtctgccacctctgggagctctatggcaataagggccaggcctctaagactctagggcccaactgcactcccagcttgccccttctcctccccaggctcccagtatctcaaccatgcaagggcctttcttggccttttctttcacaatggggtttaatgacccatgtggaatttctaaatggataaaacctgaagaccaccaaagcctgtttacttttcctgcacataagaaggacttgatttttaggagtgcggtgtatggtctcccatctaccaaggatagacggtatatttctttgaggcagctgaaacccagcaactgcacttatgcatttagtttctctctctctctctctctctctctctcacacacacacacacacacacacacacacacacacacacacacacacaymttaaagatctgagagtatttgtttcggacaatcccttttagcagtagragggtggtgatgagggaagctttatttcaaaatgctaatactgtaaagttattttactcatctccttgactgtcttcatatactagaaactgactataacatgatccaattgtagtgtgaaatttagcataaccaggttcccctggcagctaagaaggtatagttactagaaggcctgcattataagatggccacaatgtgagacagcagcacagtagtgactatctcaccattttcttacatttttattcagttttctcggtatcagaaatttacaaaacccttttctcttactttccatctttgccaaaaacatagaaatctgaccagatttcaccagtcaaaactcattgaaactcctgaaatttaagttaggcaattcctgcttttcactatagtatgttcctgtaaagaataacagaaaacaaagacagcaaaaaattagtatttaatctttcctcctgcgtaactgtggagcctgcagttacccttttaaatcactagatgacgcttcggcattaaggccagctgtggggactggccagtcagcaggctgaatattaggatggtaaagacacaggcagtgagtgatatgagatttttttatgttatccagggtgatttttatatgtgacaaaaagactattaataaggtttaattttgattttaaaaactgacatttactttttaaaaactactttaggcttttcagttcagcttccaactctagtttcttcttttttatgtataagtcagacagaagttagtaataatttcaaagggcctttgaataacgtttagtcccatttacaaaattaattaaacatttaaactgtccttatacatttaatatatgtatttctttttaaaaacttaaattatcttattkaaaatgtcactggatagtaaataataacttcacatttaataaatcaaatctataaatacagtgatcctcaaattttctcaaatgttccaaatatataaaatgtcaaaaattaatagattcttgaaaaataattattttattcttaaaaatctttacatacttacacttaactttctaaacttctgaggtataaaagatacaaccccatttgaggaaggcagttaaaaattcagttaactaaggttacttrtgaccagggatttcagattaagacctagagttgcagagacccagagcactttgtctcatcaccaactaaggaaactaccaaatatcaagtaattcagggcatttctcagtatacaaaggttactaatgaccagaaattcccatctggatgctgattagattcctgctgacggctgggcacggtggctcacacctgtaatcccagcactttgggaggccaaggcgggcagatcacraggtcaggagatcaagaccatcctggctaacacggtgaaaccccatctctrctaaaaatacaaaaaattagccgggcgtggtggcaggcacctgtagtcccagctacttgggaggctgaggcaggagaatggcgtgaacctgggaggtggagcttgcagtgagccgagatcacaccactgcactccagcctgggtgacaaagcgagactccgtctaaaaaaaatatattacatatattcctgctgactagattccaggagatctggatgatgatagtagaacccattttatagttactttctcagggatttcaaaacaggcattgagtcttatatgttcctctgtccctgggtctagattatttacacattactaagtcctcccgattactcatataattctccatcacccacyaggttcatcacttatatctttttggttcccaagttatacaaatgattcatctaagtctaaggtcttttgaactagatggcatcttatattctttcatattctcaggaccatacaactctaacagatacttacaatgagatagattgaatttggatatctcagtatctactttgaagtcacctgtcatgaagtaatggttcccacagcagtgaaaagtaaaaggatttatacacttttggtacttgcagataagcaaaattatgtaataaaacttttgtctttttaaggaaccatctatatgtcaggtactgtgctaggcaaaagaatataatcatagttaacacagacatgggttctcttctcataaagggtatgataaagtgaggttgaccatatcctaatattgaaatttggataataaaagggcaggtacctaaatattggacctgatttctgccaacgaataaactactaatgtacttaatttcctcttttctggagtgaaactaatgcctattcagctggagttgctgtagaattaacatggagattattactagcaatgtagctagaacttgtggcaatttacattaagaatgacctcatggaacaaagaaaaaagttcagttttaagagtaatttatttattccctattcactgatgaggtttatttttaaatgaaactactctaccttttaggatctcactatagatatcatagtaaagcttgatcatgagactttgggcagctcctgttgaagccagtaaggaaattggaatgagtcacgtgttatagaaaccagttcatctgatttttgccttatttccatttgacggtactttctgaattaatattttattgttctgaagagcttcataaaaaccatatgtgttatttcctgattcttaagaaagggctttagaagttgttctagtccctcaagataacttagaaaatatggccttattttagcaagttttaggccattgagtggcatatgcaactggtttctgaaatgggctcaacccatggcaacacttgggaaatagctttattcttctctcactattgctctcaaatcacgtcacatcaaagaatattgaaatggtgtccagaatattaaatagaaaagtagttaaccgtaagaaaatatcagtttcctcttcagtcatcccttgcttttaaatgagtagtaaggctgggttggaaattcagacagtgtaggatgctactgcatttgatatgccccaagaatgattctctgactggcaaaatagtgttttcagtagagcatgtggcggtgcatttgaagccttaagagtaataaagtctcaggacagtcctctccttgggctctgggactcctgataccttcacaaaatgttttttawttttcttctcaggggaagcagatggaatgaacaacttctgtctattatctgctatttttaggcaaggtaaaccatcatctgtgtgccccctttagagaagttgagctaatttagcaaaaacaaacaacaaacaaaaacagtacaacaaatgtcctgttaaaagtctgttttcattagaaattatattcacttgtttctgtttgttttagaaaagaggtaaatgctgaaagagggtgcgattgggtgttgccattgagccacaatttctgtcccagggaaataattatcctctttggaattgtcagtcagttgctcccacagagcttggctatgggctgtgagcaaaacccagctataccagcttgaagcctagaaattttggatacattgaagaatccaatcttctgcaaagggtcggaagcagtgtgggtaatagttaaatattgtattggatagggacattaaaaygtttggctgttctctctctttttatctgaaacttccagaatcaaaaggtctagccaagaaaggaaatcattcctaattttggcaggttctgtaataggaagaaagaatcaagtctagctagccaaatctagcctaataaccaatgggacaacttccaaatgtggaagtcagtgcctacctaccattgttctccaggacaatataaaatagttcaataagccatttagcttaggtgttagaaaaacgcagcatccttagtatagttggtacctgaaaaacatttgctatttcaaggcttgatagagatactggcatatgccttcctcaatctcaatgtaatatatagtacctcatggcctatcaaagagaaaaatctccagagtaaagggagcacttgtgtaatagggtattcttctccatataggacagagataggtcakttatggtacttttgcaaagtgaacctgaaattacaagctaaattctgacttatatctaatgataggaaacaattcgcatttagatttcctttctggtatgttgtccttttgtcagctctttactgacataaaacctcattgcagacatgctagaggttcattttttgcctagcttagcaaaaatatgtaaaaagactattctctcctatttgttttatatttcctttcagaataaactgcatctgcccaaacaaattcaagttgtaaaaagcagaaaatcaagaagctatacctaatcattgaaatcagcttctagaattataaatatggaaactgcttgttgttatcaaacaagaaatggtcatgaccatttacaacagccgctgcyctacaactctgatttaccagtcactaaaacccctgtttataagtgtcacatttatatgcgcagaattgaacttctcattccagtttatactgccagtgagttttggaaatgggaatcatgaattttttgagaggttttttatttatttagcatggtatgttacagagtaaatggtaaatagatggaaataaaatgtagttttactttaagttagccatttaggtgatcaaaacatcaattcaattgagtttggcatattgttctaatgtgattattattaacaaaatttagagtcttggatttttacactagttgtaaagtgtttagtgagtcctcgtgttctcaggaggctgttttactggaaactaacccgccattactggaagtagaagaccaactcttaattcattatctcaacaaatcataacaaggatgaaaataactctaccatatgttttgagaataccttatggtttaattatacctattatctcatgtataagagatacatgagatccttagatgaaatcagtgatataagtaagacagatattttggaggaggaaaatgaagtctaaagagtaagtggctagtccagagctgaagaactaattaggggtagggccagagaaaggacagaaaccccatctttctagttctactcattgcactcttatagggtgctgacattctttaaaggatcttcttgagagaggtgatggtggtggatattctagctgtagtataagctaatctcacagccacaaacctctggattcagaattctagcaccaaggaatatcactgagagaaggagaagaggcagcgttgagggtagctgaatgagagagacgggtcttgtatctaggaactttgagactagggtcctggcagagggtctccttcaggaacctatgtaaatacagccagaaagtctggttgtatacctacctgcccctttgcccctttcctctagcgtctttttctctgtggattcataatgtaattcaattgaaacctttctttctggagggctgcagcagcagcctctcttaaagatttctgagccataataggttgttccatgcattttgatgcttgattagaatcttagaatgtgggaactgcagtttacagacaatctagctaggtccttgtttgaaaatgaatgcagtgagaagactgctgtgttgatawgaaagctgataaatagtaaacctggaaccagaacccctaattcagatctctttccactgcatgattgctcttttgtttcatttcgataaggcagtcagcacaccaagagtttaagctttttaaagccaaggacttcttagaacctccccmccttaatgcctaccccatgctgaatatgttccagggtaacaaaagtgtacattgaattgactttggagcaaaagaatctgttagctgtgctgactatggctccctctgattaagtagggggatgtttgtttcaatgtgagaaattccttttctgggctctgctatgaatatgctatgccagtggtggctgtgggtggtgggtacaaagtcaagatactaagccacaggactgcattctgacccagaatagttagttggtcattatgatagcattcacctgagctctcctgacttgcttgggttattggatatgtaaaacatacattgataaaggaacctctttaagaggcaaggcacttgtgcgtgttttatttcaagtatattccaaggagcttgtttagtcctataaataatcattgatcctcagtgcctcacagcatgtattatttccattttgcagatgaatcaagaaagtcagacttgttaggttttccacctaaggcaaatgtgttaatattgtgtaaatagaagctctgaaagacaatgggataggaggcctttttctgcacctttacctttgccagacatatgtacaaggaacatcccatgacttaaagatagaaaaccctaacctgtattactttaatacaccaacgtcaacaaaggcccagaatcaaagctgggctgtgttatcttttctaaccagaagctctctcaagaaagtacagctggaaaagcaaagtaatttccagttgtgtctttgaagttgtctggtgtgatatgatggatgtttaatacatgctgtggatatttttaaaatagggagcaatcataaaatcataacatagagsaacttttgaacaacaacatttaaggtctaaaaaaaaaccctacatagcattttttttcttcctttactttatagctgtgtctgtagtctgatgctgatgaattttctttttaaactagagatttagactcattggtagtgaaactgttacatrttatgtgatttttataccatgaaaaatttctcgatttcatgagatctttcatttccctatgtgtgtgtgtgtgtgtgtgtgcgtgcgtgtgcrtgcgcgygcatgcacgtaaatgcgtgttagtggttaacatgtctataagaaaagctatttgcctctctccctctggtagctggtcgaacgaaacttgtcactaatggctacttttaagcagtgactatatgaatttattgttctatttttggtcaggcagttgctatgtggtttagtggctttgtttagtattagggctcctagatgagcaatacagcaagagaagagtgtctggcacatagtgtgtagtaggtacccagtaaatgtgtattgaatgaattaattaaatagagaatgaatgactccagatcataccacaaagcctggactaaaccagttagtgaacaattttagaatgttagaggtaagtgacattagaagtcacttaatctactttcctgttgggagatatcaaatgaattagatctatttgctctagaaaatattttaaaggagagatttagagtattggaaaggataccagatttatagttcgatgatctggsttccatagacagctaaactcttgcttttttgtatgaccttggatacgttccttagtttttcgcttctaaagtatggataaaatgagataatggatgtaaaattgtggggtggggttcaagtatttaatctgcctagcacccttcttcacttctagcaacagactgcacacccatcctgaccacagggcatatggcctggtacctcacctcatctgaacacagtgattggctcaggaggtggtcacatgattgaaacagggccaactagagtcttcctgtgggatttttcaatgccatcctgacaggcgtttttctctagtatggtattgctgtaaggatcagcgtttggagctactggtagccaattgctaccttccgactccctctattggagagaatatgatagcatacaaagagtatcagtgctatgtttgaatatttatgtactcaccacagtttgtgttgaaacttaatccccagtgmacagtattatgaggtagggccttyaggagatgattaagtcaccagggcagagccctcaagaatgggactagtgaccttataagagggctggagggaactagctaggtccttttgtccctctttctctcctaccatgcgaggacacctagatggtgccatctatgagaacaggccttcgccrgagactgaacctgcgaatacctcgatgttgggcctcccagtttccagaactatgagataataaatttgatttataaaatgctcactctgtcgtatattgttatagcagcacaaatcgatgaagacaagcagatctaaggcagagrtgcaaggcagatggggtctaagtttctratttagttttctttgaggcaaacctaactcctatgtttacagcagttttttgttttgttttgctttgcttaaggtagcttgtcaggtttctatgatttgctgactgaaagagtttcaactcatctagtaaccagtgaattgaaaaaaacaagattcaaggggtctaaccagaaagcatttttattttcctattttccaattagagtgtattcagtagaggaagctcctccctaccccaaaatgaaaacttgggtggtcctatgatttttctcttaattttaagtaatatactttattacaatgacttttagttggaaattatcagagtagaatggccaattccatgaggtactcaaaacttcaaagttgatatgagttaaatcttctcccagtttcccttccccagttaagacctttgacagttagaaactctgtcttccttaagtttccacttgctagttgctgatcctgcagggtctaagctggaaaaggaaggaaaagagggagaggaaaagagagggggcaggaaagtgcttacttggctgatagtgacacatggcttcatgcttcagtgtctagttaagtgtttaaagctgactcttcctgctggtcactgtgagtttctgccatgcctaccctcttcattttatttacttgtagtgtagtcagtgcattttccccatatcctggttttcagcaatctgttccataaatgctccattgtgaggtcctttcactgctccaggcagtcctctggcaggatcgaagtggcttcaggccagctctctcccccttgtggctcgcatctgtccacagggagcactcatgatcctggacagacaagcactgggagtgcaggccagtctagcacagtccccaccaccttcccacctctccttcagcttctgctcttccagcttttccaggcaggagtcacacacatatcccctccaaactgtaggggcacatgccaggcttcctgaacagcccttttgaggcccctctctcctgacttgcccacgtcaccatcactcatccctctgtgttacatgtgagaagggggacactgtgctcccaagaaaccttcctcagaaactctcccttgatttccatacttttgactctttcattttgaatgtgagttagggctttttagaaccacaaaacaggtcgcaaagtgtttcttttacaaatgtacacgtgggcctggaacttcagagtggaatttcatgaacatgtcttggtatctgtgttgaaatttctaatttagcagtcccttaaaaaaaaaaaagtgttttgtaaactgtgaagtgctacacaaatgtggggaattaactccctttgccctgaagacatacaaggactgaatgaaacaaaagagagaataaaatgtggttgtacttcttgaagaagaaaacacttgcaagagatttatgggggctagcctgagtgacttgtttctgtatctcgttagttcatactttattacttagttgaggtagtattgttcataatacacagcttccaatttgtactgcttgtaaccgaattccggtttagctgctccccacctgaaaaaccaaatacatgagaggtgagatatggtgcaaggaaggcagttttattcaaatgccaacagaagacatgaccaggctgaagcctcaaaggaaccatctcaaaattttaggcggagtgaaggagtttaagagggaagcttcgtatgggaaacacgcaggagtggtgcatgctgtgggtctgcatgtcactttctgatggccgtcttcagttcttacacgcctggagtgagagctggtgccattttggttgcggctgggttgtagattcactgccttgaggtaacctctaactgggggagaattccatacctaagtcttcatgcctggttcatttcaagattaccccttgaatttctaagcaagcatatggttagataagtgcagagtgccagggagtgggaaagagagggaaacagtgaattttaaggtacattttaaggctgtagtttaagacaggggacaaaaaaagttttaaaatgcatttctaagctgagaggttcagttacatgctcttctaactaaatgtataaatgacactaattaagacagtaggggacaaacatttgaaataaaaaatatgagttgctcaggcagccagtatttctytgctttttggtttaggcagcctgaagtttgtacagacacataccatgtccacatactcagtgtaggtttttgtggttatggtattttgcctgtgtgcacaagctgattgaccatcctgtaccacaccagaaaagtactttctccactcaaaggttggagaaattgctagagaacaggagagatcaaatgggaagctgcacccatcacctggaatccacacgtcctcatttatccatttagttcattcagcaattatttactgaacacctactatttttccaaggcactatgctagccagtagggctatagtggtgaaakagagtttgctatctaatgggggaaacaagacatcacacattgtcatgcccaattataaattgtgctaagtggcaagaagaaaaagaaaaagatgggagaagagcagggatctcctaacttagtttggtatgtgtggggaaggcattcttggcagaggatacataaagggtgggtctcactwtttgtccttgttttcagttcacatatgttcctaattaaaattaaataccattagtcagtatctaaatatccttaggttaggatgtagtattttccagggttttgatgcaaacctattcttccaaaatgttttcttcttcagatggtgctttatacttttcttaagtagagctaagaatttgttttaaaaaggctactttgagaaacatcactgtttattggaatataaatttgtgtataatactttctctaagtagtcaattctgccttctcagagacttttttaatgccaaacttgaagagctcttgcagaggagtcattcttttgtttttttgctctttctcattctttatggtcagttcttccactaatttattttatttcaaagcagggatccaagggaaggaggagtgaggaaaacctttttagctatgtatgttttctcaaaaaaaaatttacctaaggttttcttcaagaaagcaataaagtgaatatggttttgagcatgttatgaacacagagcaatttgacttgactgaaataggatggattgagaaaagcctgtatttccactgtgatataatatctgcttaaagtatgggctacagggaatgcttggcacctcttcaagctatcagaagttttattttgatacaaattatttcccaaatgctgcatgacataggagacatagtgctggacagtgcattaagaaactttgtttctgacttctattttgtcacctatagtcttatttgggtaagttgtttagttgctgtatgcctcagttgccttagctacaagctgagggtggtgataatacctgcctcactgcttctcagaattgttggggaaatacatgaagtaatcttataggatgaagactcctttaaatgatcaaaatcttcacatttgataaatgattattattgccatttgtctgtttttgggtatgatattcatggctgatcttagtctatcaaatcattttccccaagttcatttatccttagaccaagattcatggcatcttacctgtgtgtctagctgggtaaatgttttatgacatggctgccactaatacagatattccaggaggtcatgtatattagaaaaacgtgtcttttgaaatagaactgaatttgaatttcagcctcatcattcactgctaaacgacctggggaatttaatctttttgtgcttcagttttctcattgggaaatggctgtgataattaaatgataaacactgtgaaaatgcttaacacactgccaggtgttatggtaggcttttaatatgtgctagttctctttccctttaaaacaagcagaatggaatccagtatttgcaacacaggttattttctttataagagatccatgaagggagtatgattaacacaaattcagtttctatttacattttgctgtagttgagaaagtgaggcacatctgtacttgttttctgataaaatcataatttcttagataaaattgccttgtattatatgccattttttttagagaactgagtattagctgtttgttgatagaaatggcacagaaagcaatttgttgtttttattttattataatttgaaatgctatattttgagtgaattttttttttgttatttacgtaggacttatatctacctatttctagaaaagtttttgaactgttcacaaaattaagcccaatagaaaacaaggcaattaaaaatgaaattgaaacaaaaatagggtaagcataaaggtatcttcagacacctgatgataagtggtataaaatggaaggacaagagctcttcttgtttgttgcatttcttgttgttcattatcatttttcattatccctgtttgagcatcccccacctccctctcttccttgcctcctcattatttggaggaatgggagacatgggagctagggaagttggtgggtaataagccacagctgaccaagaatttgcagcatgcaaatagaaagcatacattctttttgttgccttgacttttttttttttaattcacagcttcaaatattgcatctgcaaatatattgtctcttgcctggggtataacctttcttgctgtctttatttgaaatgtttctgagccaggaatgatggaatgaatgactcaatctgattacataaaaaaagattttgatacatagctttgtatttgtgaatttaaaatgactgaatttatctttaataaaagtgcctcctgagaaatgtgtttaatggaggtttatgctgttatggatatttcaacctaatagtgtaattaccatatgtcattaatcctatttctacagggaatttgtccccttgtttcttttaaagctagagggtaacaagagcaaatgtttttaactttagcacattattcattttagatgtaagttgacaagttgaagatatgaaaataagaaatctggatgatcaattttttaaaaagtggcaaccattaagctgtgttcaaaaagaatgcctcatggcatccccctcctgtgctgatattagtgtaaaacacttatttttagcttttgattttctgtgctccccaccccaaatacttttttggtaggcctcctgctgtgaccaaagtcaaataagtggaaatgagggaaggttaacatttaagtgataaatttaagagaagattacacattcagtgtttgcttgctcagtcttctgagagaaagaggtggtgtgatctgttgtttttttctcttcccttctttccattattcccatccaacattatgttataatgaaagtaatatatgttcattgtagaaatccttaaaratacagaaaacttagagaaggaaaaaaatgtctcatgtaattccttcactccaaaagaacaactattgctagaggttctgtaatgatatacatcattattttatgcatatatggattcaggctgtaggacagcttggtgaactttttttttccagttaccaatatactataaatattttacatcattggccgggtgcagtggctcacacctgtaatcccagcactttgggaggccgaagtgggtggatcacttgagcctaggagtttgagacacgcctgggcaatgtggtgaaaccctgtctccacaaaaagtacaaaaatttgctggatatggtggtgcatgcctgtagtcccagctgcttgggaggctgaggcaggaggaccacttgagtccagggggkttgcagtgagctgagattgtgccatcacactccagcctgggcaacaacagagtgacactctgtctcaaaaaaaaaagatcacatcattaaatcatgttttaatggctgtatsatgttttctctacaatataaatgtatctagatatggacaaaacatagttacatgaaaacaaaagcctttaagccccaaaccctgaaggtaagtcacaaatcatataaccctggcatgagtgaagacctgtgtgttactcagcagtggctgagctgcttgggaccatccagagagcttgtagaaccaaatatgtagtcgtcagggactgctcaacttcttttgattataaataataactcctgttaactttatattggcaattgtttaattctgtcaccctgaagatgtagtttcrattctgatctgttgctcttatctccaccctaacttaatcttctttaaagaatggtataatttacaacagtcagggtaacctttctggaggtaaggaggctaggagagtgactgggtgcgtacatctgtatgtgtatataaatgcccccttcttgtttggtttagcatagttaaaaaagtagtgatccatcagatagagtttgctgggccagaaatactgcagtgcagcagagaccttggaaaaagtgagatagcatatgcttaagcaatactgcactagtgttgcataaatggtggaggctgcggctcccctgtttgtttttcccagcagacttgtcctgaggcgaagctgtgctacctgaaaggagaagcttcagtgatggagtcctaattgtaccaaatcaaagttcattgagtcagctaggtcattaactcgttgatatttaattactagctgcttcactgctggaaaatgtcattaagccgttgtactaaatctgctttaaagaatgcattttcctttttgaatggttcatgttttgtagtcttgtagaaaaatcagaaaaacatctgaacaatccagtaaagctggcaatcccagctgctgtgtcctcagccaccattggtctctcaggcctgcatctgattgtgggcaggccctgcagaagaaacacatctggagattcggcaataaactaagacttacctgggtcaagggtgtggaagagctttgaagtgggtcgttgttctagatgttttatctgtttgggtctctcccacctcttctgttaacaattataagggttatgtgggggaacttggagagaattttttttttccccaggctggagtgcagtggcacaatctcgactcactgcaacctccgccttccaggttcaagcgattctcctgcctcagcctcctgagtagctgggattacaggtgcccaccaccacgcccggctaatattttttgtatttttagtggagatggggtttcactatgttagccaggctggtctcaaactcctaacctcgtgatccacccacctcrgcctcccaaagtgctgggattacaggcatgagccactgtgcctggccaggagactttttaatcaaatttcttgacattattttaatggtctgagattcattcaaccctaggtagcaatctaatgttgtgaagaatgtatgcaacagcttctctaaaacagctgtaagtgcataaagtttctcggatgtttagtattcccaagggtgtattttgaaatatggtttcagaatcaacaaaattgtttcttaatgtactgttttgcttgtgtaattatgccagttagttaatggcagaaacattataatggaaaacaaccttaaatatgaagtatttaaaacagttgtgagattttgtttcccaaatggacttaataaatcctacctgatattatatttcctttttaggagagtttaatccatttgtcgtcattataattatcttattgatcctgaccttttaaattactttcttatggtttatcatgtcacacaggtggagcctcatatgtattgatagttatacagtgtttgatataataattctaaaagtagaatgaatttcacttgaaaaaaccaatctagtgtgaattttgttcaggctgagcgggtttctttcccctcttaattttagtttaattgagagaatacatctgtggttcttagcttagtgcctggcctatagtaaatgctcaataaccgtcagcacttgtkaacatttttattatattcactaaaatatttcagttcatttgttttttacctctagtagaagctggtatgcttttgtttgaaataatgaaatctctcagtatttatatttacatagtcttacacaattaaaagaaaagtaaactctatgaatatattctaataaaatacgtttcccaggagctggttaaataatttaaattcatttaatagtcatctcagaattataacttttctcatttatcatccattttatttaatgatgaaagaatacaaaaccatgtaagaggccaggcgtggtggctcacgcctgtaatcccagcactttgggaggctgaggtgggtggatcacaaggtcaggagatcaagaccatcctggctaacagggtgaaaccccgtctctactaaaaatacaaaaaattagccagacgtggtggtgggcgcctgtagtcccagctacttgggaggctaaggcaggagaatggcatgaacccaggaggctgagcttgcagtgagccgagatcgcgccactgcactccagcctgggtgacagagcaagtctccgtctcaaaaaaaaacaaaaaacaaaaaacaaacaaacaaaacatgtaagagaaatctttgacccaattggaataaaatggctattgtctgcttaaagcatttcaatgctttgtactattttttgaagtccatatagtcaaggtcccaaatgttttatgccctcaaagcacaatgaatttacatgaagagtcactaaatggtaggaactgttgtgtctcaagttcaggatactttctaagtgtatgtgttttaatatttttattattgttcaacattactttttgcaggtatgatctacataaaattaagagagtgtggtttaagtttgttgatacttaaatttattttaaaagactgacctcaagagtgcttgtcctgaaatgttaagtgattttaaattcttgataggaagtccatacaagtatttttcctgcttcatccttatatcattacttcttattatcaccacactcttataatgttgaaaatcagtcacatttggtctcatttttgctgccttagttaaggctcagcaagagaattgctattatttaataaatagatttgttcattgtccctaatgtgacagcaggaatttgaagccatctgatttcttagctggttctgttaattcaataatggcgtcctactaccaactgatggctgctaagtcaccaaagctaaggtagaggtgttggagaaacttccgtttcaatgatacatgaaaatatgagcatatttgtaaccttctggataatcaatatgcttctatcctttaggtttatggagtttaaccttgcgagattaccacttaatatgatagctgcaaaatagattgtcatattaggagcctgtgaactattatctttactctgctattagtctatcaatattatggttaattctcaggatttccagattatataggctttgcagattctttgtagcctgccttaaattactcattaacacctccgaagtagggtagtttggtagagggaaataaataactaaaatttatggaataaaatttaagacataaagtgattttgaagatcttctaatccaatccctttagcccactcccctgttttacaggtaaggggactgacagccagtgaggttaagtaatgtgtacaagagcacacagtcacagaactggctgattgctgtgtgactgggaacccagatttcctagtcttgttcaggactccttccagaagttggaataacagaactttattgccctgcattttactatggaacagaatgaactgtgcaaaaacagcatgccttacccacttctaaagacttttgaaacaggtgagttgtggggcgcaactgttattagagcagctccaaggcaagaacccaaggacagagcaatgacagggctctgaaaaataggtatagaaatagcacatatgtttgagagtcataatgaggaataaataagataatgcatttatgcacttagcgtagtgttcaacatatagagagttttcaataaatattagctattgctatttatcatagaattaaaattcttaagtatccttatagagttccagcctgctgttagttctgatcttccgccatttcctttcccttcccctccaaacacacgtacatactcttccctccagctctrtaactctgcagctctgtagcccaattctaaaccccaaatatccatgtttttcatgcctttatgtctttatatagaatgtactctccacctggattgctacccagcccattattctgctccgcaactccttacatccctcaaaatttggctcacatatccctttggacatggtatgatatggtttggctgtgtccccacccaaatctcaacttgagttgtatctcccagaattcccacgtgttgtggaagggtcccagggagaggtaattgaatcatggggccctgtctttctcatgctattctcatgatagagaataagtcacatgagatctgatgggtttattaagggtttccgcttttactttttcctcatttttctcttgccaccagcatgtaagaagtgcctttcatctcctgccatgattctgaggcctccccagccatgtggaactggaaatccaattaaacctctttttcttcccagtctcaggtatgtttttatcagcagcatgaaaatggactaatacagtaaattggtatcagtaaagtggggtgttgctgaaaaggtacctgaaaatgtggaagtgactttggaaccgagtaacaggcacaggttggaacagtttggagggctcagaagaagacaggaaaatgtgggaaagcctggaacctcctagagacttgttgaatggctttgacaaaaatgctgacaatgatatgaacaataaggtccaagatgaggtggtctcagatggagaygaggaacttgctgggaactggagcaaaggtgatttttattatgttttagcaaagagactggtggcattttgcctccgccctagagatttgtggaactttgaactggagaaagatgatttagggtatctggcagaagaaatttctaagcaggaaagcattcaagaggtgacttgggtactgttaaaggcattcagttttataagggaagcagagcacaaccatttggaaaatttggagcctgactatgcaatagaaaagaaaaacccattttctggtgagaaattcaagccagctgcagaaatttgcataagtagcaaggagcctaatgttcatccccaagaccatggggaaaatgtctctagaccatgtcagagacctcatggcagcccctcccatcacaggcctggaggcccgggaggaaaaagtggttttgtgggctgggcgcagggtccctgtgctgtgtgcagcctagggacttggtgccttgtgtcccagccactccagccttggctgaaaggggccaatgtacagctcgggctgtggcttcggagggtggaagccccaagccttggcagctttcatgttgtattgagcctaggggtgcgcagaagccaagaattgaggtttgggaacctctgcctagatttcagaagatgtatgaaactgcctggatgcccaggcaaaagtttgctgcaggcgtggggccctcatggagaacctctgctagggcagtgtggaagggaaatgtggcattagagctcccacacagagttcctactgggaccctgcctagtggagctgtgagaagagggctrccatcctccagatcccagaatggtagatccacccacagcttgaactgtgggcctggaaaagctgcagacactcaacaccagctcatgacagcagccaggagggaggctataccctttaaaaccacaggggtggagctgcctaagaccatgggaacccacctcttgcatcagcgtgacctggatgtgagacctggagtcaaagatcgttttggagctttaaaatttgactgccctgctgaatttgggacttgcatggactctgtaacccctttgttttggccaatttctcccatttggaatgactgtatttacccaatacctgtacccacattgtatctaggaagtaaatagcttgcttttgattttacaggctcataggcagaagggacttgcctcgtctcaggtgagactttggactgtggacttttgggttaatgctgaaatgagttaagactttggaggactgttgggaaggcatgtttggttttgaaaatgtgaggacatgagatttagaggggacaggggcagaaatgacatgcttggctgtgtccctacccaaatctcaacttgaattgtatctcccagaattcccatgtgttgtgagagggaccccgcagaggtaattgaatcatgggggccagtgtttctcatggtattctcatgatagtgaataagtctcacgagacctgatgggtttatcaggggtttctgcttttgcttcttcctcattttttctcttgccactgccatgtaagaagtgcctttcccctcccgcgatgattctgaggtctcctcagccatgtggaactcttaagtccaattaagactctttttcttcccagtctcgggtatgtttttatcagcagcatgaaaatgaactaatacatggtgtttctgaggcttctcaattagagaatttgttgtattattttgtagttatttatttacaagtcatctgcttccttaagtgataagctctttgaggtcaagtactgtttcttttagctctatgtgtttattagcaaatgcttggagtacgataaacatttgataaatgttaaaagaatgaatacttgaatgaattattaggcttactttgtaactcagttcagccagccctctgcttttcatagctgtgaattttgacagttgctcatgtagtagacaagaggacaaccacgcttactactttattcattttccctttcgagtgtcatagatgttaaacatttcacttgattcatgggtgccatctggtggaggaaaggctaactacagatgcatgcttcaccaaaacatgtagaagtttaagattattactgctcattaatatggaagttgtcactgtttcctggtagtttccagaagtgtagtcaggaaaaactccttggcgactgcttttttcattcctgtacattggtttcttatttttattttgtagagatgggagtcttgctatattgcctaggctggtttcaaactccctgactcaagcaatcctcccaccttggcctcccaaagtgctgaaattacggatgtgagccatcacacccagccttaattttaggaagttgttcattcatgaataatgtttgaaaatattttttaaaaagatacgtgttattaaatattgtttacttgtcagtgtggcaatttatgtgatttaaggtaaactgattatttaaagtttgagatactgaatttttaaatttttccatgacactgagttttttattcattcattctccaagcatttattgagcatctacctaatgcctgacattgtaaaaagtgctaaagaaccagaaatgaaagacagtatgagtcttggtccaaagaatagttaggtaagaatgtaaaccatgtaacttttcataagacaaatcatacaaacttcatttagattttcataagaattccttatgtgcatggacccctccatgtgcatataaacatcatagatataaagctaccagttttagacttgccattttgatggattttcttcgagtatataaatctaaagggaaattctttatgatttttcataaaaagtagatatttattcaatattcacatttctgtactgcttacactctacctatctgaaggatagactttttttttttaagctacctggaacattgtaatgaagcaggaagtaaacaaaaaggaactgaggagtaaaaaacaatcacaaaactcatgtacctttctccagtaagaaggttaaacattttccaagtcttaaggctagataattgtgcataaagcagcctcttagaaacaggattatctgccaatggaggagaaccaagagcttctcacagcgatcagggtaatgtgctgtggaaaccaaactcatatgcaggagacatgcatgccacaaccctccctttgtgttcccaaggtagccctaaatcatcaagaaaatgctggattttcttctgtgcattctttttgaaaaactttgagaagtatgttttttcattttgaagcattttcatcaaaagaggttaaaataatttttcatcagttggagtattaaagttgagttaaatgggacattcacttacgtggaactcttcattccctgatggcactcattaaatgaggtattgtggaatttagctatcatttacagaagttgtatttgaaagattatacaagatacacacatagaaatccaaacttaattttctttttaattgaagaactggaaaggattctgagaatttacctagttcttaggaaggataccattaaaatattgtattaaaatgtgttatatgtaaaattttgttttgtactgctcttgaaggaaagatttcaaacagaattggcatttcatttaattgatagtagaaattcagtgcaaaaatggccagccacctgtcttctgaagttctattaatcttcactatttaattgcctgaatgtggacatagatttgtgttagaaaagaaagcttggtttgttgtgtgtgtctcataagtcatgttgacttatttagtgacttctttattctagggcacttgtatcaacacaatgtgttttgaagaagaatcacaggtactaccttggggaatataaggaaattaataattgggtatattgtagatggcaaagtttataatttttctcatctctttccataatgctttatgacatctggaacttgcttgttgcaaccataaatcttcacgtggatcatccttgtttatggactatttgggyataggacataaagataggacactgttccacagcagatttttttttcttgctgtttgagagacaccagccttcactaagcagttcattattttctaaggttggagcagctgtggatcaccataattatggatttagtatgtccctgccaacctactgtgaatcttaattcaaattttacatgtctctttggggccttgttaattttctcattattatgtggttcctgacaaatgacagttttgagaatcyaaagttgcttaagttagttttttatgaggtattgccaattgctcattgtttttataatkcttaatcacatttttatttttaatcttacattaaataaagcagctgccctttataatgtctgggtgtatttttacccatccattttctctgaggactgctaaaagactacaatttctaagactctctaactttttaggttatatggtcaagcagaaagaaagaaaacgcctaagaaaaatatnnnnnnnnnnnnnnnnnnnnnnnnnnnnnnnnnnnnnnnnnnnnnnnnnnnnnnnnnnnnnnnnnnnnnnnnnnnnnnnnnnnnnnnnnnnnnnnnnnnnnnnnnnnnnnnnnnnnnnnnnnnnnnnnnnnnnnnnnnnnnnnnnnnnnnnnnnnnnnnnnnnnnnnnnnnnnnnnnnnnnnnnnnnnnnnnnnnnnnnnnnnnnnnnnnnnnnnnnnnnnnnnnnnnnnnnnnnnnnnnnnnnnnnnnnnnnnnnnnnnnnnnnnnnnnnnnnnnnnnnnnnnnnnnnnnnnnnnnnnnnnnnnnnnnnnnnnnnnnnnnnnnnnnnnnnnnnnnnnnnnnnnnnnnnnnnnnnnnnnnnnnnnnnnnnnnnnnnnnnnnnnnnnnnnnnnnnnnnnnnnnnnnnnnnnnnnnnnnnnnnnnnnnnnnnnnnnnnnnnnnnnnnnnnnnnnnnnnnnnnnnnnnnnnnnnnnnnnnnnnnnnnnnnnnnnnnnnnnnnnnnnnnnnnnnnnnnnnnnnnnnnnnnnnnnnnnnnnnnnnnnnnnnnnnnnnnnnnnnnnnnnnnnnnnnnnnnnnnnnnnnnnnnnnnnnnnnnnnnnnnnnnnnnnnnnnnnnnnnnnnnnnnnnnnnnnnnnnnnnnnnnnnnnnnnnattctgcagattataacatatattatatataactatatataacatatatataactatatataacatatatattatatataactatatataacatatatattatatataactatatataacatgttatatataactatatataacatgttatatataacatatatgttatctatctatctatctatctatctccactgattttgttttagtttggccatccatctgtaacagtgtttggcacacattttctgtaaagagccatgtggtaactatcttaggctttgcataccatccagtccctgtctcagctgctcaactctaccattatagtgcaaaagcagccataggcaatatataaacaaatgggcacagctatgttccagcaaaactttataaagacggatgtttgggcttcagtttgccatcctgaatttagaccaaggctcataaagaggtctcatctcatgtgctaactttgattgattggtggctgccttggaatactgtattgagaaggaatctcagggtcaatctaggttcagtggtaaataattcattagttaatggctgccataggcattgttttgatctgtcctataatttattttgaggacactgtgacttgtgcagatggttgcctttatttctttgcattgggtgccaagaaactcagagttactttttaatcatctgtaacaaatatagttgacccttgaacaacctgggtttgaactgcacaggtccacgtacacacagattttcttctgcctctgtcaatcctaagacagcaagaccaactcctcctttttctcctcctcctcagcctactcaacatgaagataacgaggatgagacctttatgatgatccacttacacttaataaatagtaaatatgttttccttatgattttcttaataacattttcttctctctggcttactttgttgtaagaatacaatagataatacatataccatacaaaatatgtattaatcaactatttatgttattggtaaggctgtcattcaacaataggttattagtagttacattttgggggaatcaaaagttatttgtgggtttttgactgtgttggagttaagggtcaactgtatgtatgtaaccccatgttgtttaagggtcaactgtaaaaggaatagtaaagcacatattttgcatctaactttatccctagcttcatctcaattttaccatcttacttttcttagcccagagttcctaaaacttgcctacataaaatatttatgaaaccatagactttaccaaagagcaaaggcttactgggggtttgcaaggacacatctacaaaacattgataatcatacctaccttgcagggttggtgagaattaaatgaagtaattaatataaaataccaagcacagtacctggtacatagtaaatactgcatacatggtagctgttaaatgtatgccttcagagagctccgccaacccacatagaagggtaaatcacattacttctgatttctccagccctccttgcagataggtggaaaaacccctgaagatgtaaaaactctctcttgattacccagatttcatcttgtggaactgagtcctccctgtgggaaatactaggccactctatacatttgagtatttttttttcctactcctctgtttgtgggcaactttctgtgtggaataggaccacgtatccacacaggaaaataacaaggtgggatttggagtggrgagaccattgggcttctttcctttgcctttgaaagtgccactttcttgtcatactgggcaatttccatgcaattcttaaaagttcattttaattttattccactgagttttggggcaagaattttacaaattgagatgaatgatttgaagttagttgatgcttatcaattgatgctattttagcccacagttcccttcataaaataatatcttttctgacttaaaaaatgactggtataagacacccagatattttacaattctacatgctatagcaaagaatcaaaatggtgtacattctacacttgagagaaatgtgaaaggagagttgccaacactaaagcagcagcatgagtaagaaagagaaagagtgaaaaatacacaaagtgttaactggcaagtcaggagctcattaggcctaaccttgttcttaactcagactcttcatcataaacccattttratgaaaagaaattcggaaactaatttttccccacaacaaatagaaagttagtattggttttagctgggcaaatgtagtgatatttctcccttccttaatgttcctcagcagtcccaatggccggtatctagcacctcagagcaattttgaagccttttctcctgtaaaatacaacttctattcacccatggctctaatttatccacatttttgaaaattcatatcaataaaatatactgtttttcctgtctgtgttagcttcttcttgctccttatccctttgtctgtgaacctcctcatcattttttagatcttggctttacatcactctctcaggaaaccctcttctccccattcctccttcacccccaaccaggctatttaggttctttgttttatctcatcaaagaatcttgttcatttctatctccccactagaccataagcaccatgagagcagggacatgtctacttctgcccactccccaagaacagctaaaagagcacacccgtctatgtagcaaaatagtgggaagattcatgggtagtggtgacaagccctccaagcctggtgatagctggttgtccaagatagaatcttagttcaactttaaatttacctacagaaccacttaattcccctgtaaatttaactgttagtctaaagacggacagctctttagacactaggaaacaacctttatgtagagagtaaaaaatattatttccataattggcccaaaagcagccatcaattaagaaagcrttcaagctcaacacctaaccacccaaaattctaatcgcaccactgaactccttacatcacattggactaatctattactttatagaagcagtaatgttaatataaataaccatttatctctagcacctagcacagtgtccagcacatagtcgacatccaataaatattaattaaaaggatatacttctagcttatgactgtgactgcccgtccagctattttcttatggagttgaagtcagacttgggaaaaagatatatttttctctgtaaggttcatgaactgtatgcccatccaaattttaaaatatgtcattttctatttacacaagcaggtgcagtcactgctgaaactatagcttttccacacaattaggtatctcattttcctcttgctawrataagataccctttcaaaccttgtttgcatagttaygcaacactgccggtgatgctgagttcctttcccttctgctatattttgctgcagctttccaggattcaragtcccacttgcagtcctcggcaggaggggtcaggtcagtgttcttaccatgcctgggatggtcaagaggaaatcattgtgttttcacagtgctttgccacaggtcattttgtggcctgttttacgcagcttgctgagatttgcctgattgcccacaagctgttgggaaaggattccaggtgctcccttgcattagaagtacacaaggtcagttagtttgcttcaggaaagggctcagccttcttgaggctgagcagactagcaattttgtatgatttaaaaaagctgtggcactgagggttgaaaggccatgtaggaacgtcattgcatatagtcaaggttttcccaggaattaaaaatgtttacttgccaaactctgtcttgggggactcttcttgtggagggtcttgtacaaccctagatgtacatcagaatttgttacaaagctttgtaaaaatacacatgtctagaccttagaaaatcagaatctctagggggtagaatctggtgtttttcacctgttagtgagcctgttaaaatacagcaaacatttaaaaagtagattctagagtcctaccctaaaaaaagttgatttactaaatatggagcaggccccatgaatctgcgtttttaaagaaggcaatcccctctttccaccctaggtgacttagaagcagttggttggaatactagccatgaagaaacactgatgaagcccagtgaccgaattttgtagaaaaaaccgaagccctgtcctagtgcccttcccctgtatggagctaataaggcttcaccatgaccctgtttatgagctttatacctggattcctaaaataagacattagatactgtgtgtgtatttctgggaaaaggatttgttgctctcagagattttttagtcgggttgaaaataatacaaaaatatttgaaaacacatttttatcatgagatacaacaggctgtggctctgtccaaaccagcagtccttgcaagtgggttcctgtggtataaaataaggtgtgatgctcggcaagtataaaatagtctgacatttatatgatttatggcagaagagaggcaaatgtcagagtgataggaagaaacattgtgggcacggtcccttttatctttctttgtggtcatgtagagttctcactcataggacattaagcctggttttaaagcacccattccccatccttttctgccatcgtgcctacattggactaagtgtcagggaracccacatagatgaaaaagcttctgtcctacctgctagttgctcataaactagtgggaaggcaaataggtgactagatagagacactttgaagtggttgagagctgtaacggagatctgaacatagtacattgtggtgacaagtgggaaagcaattgctttaattctgagagactacttttgcaaccaaggtgatgattcctatttgtacagaagttttaaaactatatgtatgcagtagatgctactgaatttgttctttatttacccatatgtgagatacaacaaattaagtttgcttcgttaggttagcctcaaataagctttgatggcaggtctcgaagtgggagccagagagagaagagtaatttagaccttcaaggagcacagatctttgtgttttcctccacacaaagttaaatttcagagtagagaacatttgtctttctttatcttcactttcatactttacactccattcccaggagtctccttgggtgccttattgcttgtcaatccacctccttgtaggtaaaaatctgatcaacttgctcacactaagactgaatatttacttagcatactacccctccttaaaatatttaccttttggtaggtgaagagctggcattaaccgaagattgaagctataatgatagaatttcaggcgtcaaaaaagggaaaacgatttggggatggggatccttttggggttactcacatcacgctaaataaggcagttaccagctctcaggrcagaaagaccaggccttctccataccccaactacacatacaaggagccttaatctaatacaggttttgaaggcacttcttaaagtcatgtcagatgggagacagaagcccaactggcattcgtctggagcttccctgccaccctggccacacctgcctcctggaggtccactctaaagagccttgtaggtagctgcagggcagaagccaaataaggcccagtaggagatctctggtgctactcctatataaatagtggttgccggccaaagaacagttttatctgaccatgttttggctaccttctaagcagctgctctactgtcatagcttcagagttctttttgattaataactcatgagtgttttagagttcacttctaccagttccactggcttcctgaattcccaagggcattttcagttagcattccacagggaactttctggaatacatttggatagcactaatggaagttaatatttctccaagctctatagcccaagattcagaaagggaagggaattttatcagtaattaaccataattttctctgatttatgaaacatagttctctctgtaaacaaatattacttttcatttttcttctatggatctcaagtgcatagaatgtgaaacatcttctttctgtaactgcagaaaagacaggaactcacycatmacaaaatttagccasattgctttggctgagtgccgcttgttttctcaacagattgatgagaaagtccgacattaggctgtttttatgttgccatccctcaggggaacatagatgtgtatttgtgctttaaaacaaaaacatcatgaaactagtacaaactattccccctgaatcccttaacctatccctggaatatgtgtaatattgaggggcaaagaattcatcatcactgtggcagtagggaagtaaggtcaactttttgttagactgtaaagcagatacattttttaatcctttagagtttgagggtaggttttgatcgaaataataagataaggaaaatgggccacatagctgaacaatgtttgataatttgrcaaaattatattttattgcaattacagggtaagatctagaaaagagaggtaagttattttttatgtacaaaaacatccatctgcaattagggaagccatcayacagaaagtgggatttgagtgatattttcacactctggcatgcttggtgctaccacatgaatatagtgtcagattgaatatgaattagatgactgataaagttatttgaggttcgtcacattaggaattccaaaggaattgtctgggataatctgtaacttagtagtccatcactttaatgcttaaatgggaactttagtcttcatattcagccgtttagatgatttcaagtctttcacacactgagtgttatgccctctgtggtagtcgctttaccacatgactagcatttgcacgtctgcagctttggctctccagagcaatcttaaatctctgtaataggtgtaagatttcatttttatgcttctggtttaagcctgggactttttcctgatgccatctctcttgaaggaatcacatttgccttcttgaggcagaattatgaattcaggagtgcaagacggtcatctcaaagacacttttcttatttgaataacctctccaggttagaagtgccaaagactaaaaatggcaagaaatgacactcttggcaggcatgagagaagaataactcccttgccttatgttctcttcctggtgggcaagggcactcactctgactttattttaaagtgcctggagccaaagagcagctgtcaaaagttaatgatatgttaccgtaagaaagatggattccaaggtgaaactaagtaaattaacgtgtggtctgtgtgctggctgctgccagatcagcaaacacacatccccttcttttcaagggcagggaaaccttgcctgcaataaaatattactcccttctctcttctttcttgctctggtgtgaatttcgaaggattcccatgataatctctcctgtatcttgtgaataccttgtgatcatccctcggtgaccatttccctaaattcagccctttttctactcagtatttgcagaattgattctcatcttacttcccttgtatgtcttcctcagtgccaaagtctcctcacaggagagggccactgatcagatgtccttaaagccagatctagcatcttatttaatgatttatcagtgttttaaaatttatcagtgttaaatttactgttgacatgagtgcaaagatcagcccttttgcttttgtccctttttttccagctttagaaggctgtgtccattcacagtcaacacacataactgaagcagaagccctgtgtgttttttaggcatatatgtggtgtaaacataaattgaaaggcagtaccatcaattatttgtcccattcagtttaatggagcttgagggtttctctctcttttcagattataattgtgtgtgttcatgtgtattaaataaaatggagggggaaaggtaatttataaaactgtgaaatttgaggggtattaaaattcttaaactttttatcttggcaaagcactctgtagaccatccataaggcaaaaatcccttttcttcttaagatgcatgtctgaggttttgaaatcttaaaatctcaactcttggtttttcagttacttggaaattgggtctctatatcaggaccaacatttacaacatacttcattacaaagttaatgataaatccatttcttggtttaaaaaatatcttctaaataagaatttattgagtatagaggcactttctttttgattatcattacctaaaacttcataaaattgcttactattcactaagtcttagaattggtaataaaatagattatttgttaaaaagtgaaggaacaaaaatgaaaaactcacacaaccatgacatatgaattattaagtaaaaattattatgtgatgagacatattttcatagttaaggacatcagaagcctgtttttattttaagtccactaaaggtcaaaatgagtaacgtaacaaaatgagtaaaggaaattgaccttgacactttttttcccagagaaatatactaaaagtgatttgaaacataggtctagtttacttgtgatctttttctaatggcggttctattagaatttaattacatcacttattatctcttcttgaagagaagcttttttggctccctggaaacttgcaaataagtttaatacsttttcctcacagagattttggaggggtcatcgtgatggtggtggatattccctaaaatatggagagatgaatagttttcaggcttactgttaaattttcaagagtaaatttaatatgttgtgtaactttattcagttttcccattgcttttaacagctttgccctcagctttagcttccaattacgcagcattgaaggcatgtttttctttcccatctgttgggaagctttgctcatgtgttcttttgttctattctgggttttatgccagcctggggctgctttaccttgtaaagaagtgaccacagtacgcattgccatctttgtaaaaaattaatttttttttctaatttaaaagcaatttgtgtttcctgctcccatactcactgtataaccgaggataagtttcttaacctctctgagtctgtttcttcatctgtaaaaatctgttagggttgttgtaaggattacatacgctaacacatttaaagcattcagcacagtgctggcacatagaaatattgttttattttatagaatttggaaaactttagagagaaaaaataaaaatcaccccaatttatattactctgacataactaatgatatacattaatttaattcacccttttttttttcctcacacatgaggtatacaaactactttgtaatctccttgtttttgaaaatgtctcaccctgtcactcaggctggagtgcaatggcggcatctcagctcactgcaacctccacctcccggggctcaagcagtccacccacctcagcctcctsagtagctgggaccacaggtgcgtgccatcacgcctggctgtttttttgtatttttagtagagacakggtcttgccatgttgcccaggctggtcttgatctcctcagctcaaatgatccgcccacctcagcctcccaaaatcctaggattatgggagtgagccactgtgtccggacttaatctgctttttattatgaatattttcctacataatttagtactcttttataacacaatttttaattgcttattctgttgatagtttcttttgctgtgtggaaactctgtagtttaattaagtcccatttgtctatattgttgcttttgcccttagggtcttcataatcaattctttgtctaggccaatgtctagaagaatatttcctaggtttttgttttccctttctttcttccttccttccttccttccttccttccttcctytcctttcctttcctttcctttcctttcctttcctttcctttcctttcctttccctccctccctctctctttctttctctctttcttctttttttgacagagtatcactctgtcatcaggctggagtgcaatggtgcgatctctgctcactgcaacctctgccttccgggttcaagcgattctcctgctttagcctcccgagtagctgggactacaggcatgcaccaccatgcccagctaatttttgtatttttagtagagacagggtttcaccatgttggccaggatagtctcgatctcttgacctcgtgattactgcctgcctcggcctcccaaagtgctgtgattacaggtgtgagctacggtgcccagccttcttttttaaattattttttaaaattggtctttaaattctaccagaattatttcctgattatttttctgtgttccctcctatcttaatttctctccctaaaggctgtttagcacctaacataactcatgcattaaataaatatattaatttatctcgggattcwtgcgtatttttgcattactttgtaaaatgtgtttttctagtatttcatgtgtgttttgtttgcatattaaaattgcagtttcctttatggtaaaggcttgttttcccaacagttcaagcctaatatgtattactcagcagacagtcaataaattagaattggccggctaacaagttttctttttttttttttttttgagacagtctcgctctgtcgcccaggttggagtgcagtggtgcaatttcggctcactgcaagctccgcctcccgggttcacgccattctcctgcctcagcctcccgagtagctgggactacaggtgcccgccaccacgtccggataattttttttttgtatttttaatagagacggggtttcaccgtgttagccaggatggtctccatctcctgacctcatgatccgcccgcctcagcctcccaaagtgctgggattacaggcgtgagccaccacgctgggccaagttttctttttaagatgaattgtgaaacatttagcagctcttgaaatatacttttgcaccaccccacctgaattctttaatatgtattagttcttaaagaatataccatataatagtaaatagtattttagcctaatgaccagcatcagcattctacctacatttccagaatttaggttcttaatcattctgcttcttttcatttatccttcttacccactgagttctttttatggagtttactgtaaccctttaatgtcttccagactaacgctagaatgggtaatataaatatatgtaaattctgtaaaaaggcacattcagcaccttttatgccctgccttgtaagtttttagctcatctttttactctagctgttgccgaagtcatcatcttttcaggtctaactggagggaacctgtgaacttttttgcactttcttccctaagatttctcttcagccatttaggatatgtctggctaaacatagagctgaaagtccaggtgtaattaacatcctgcaaggcaacctttaattcaggtgtacagctctgatgtacattgcacgtgattcctcaaagggtccctagaagaatcagtcaaccccattgccaaatgcagaaataaaggcaagaatggagaagatcaaatgattatggagaggaaagcattaaataaagcctcatacagctttaagtgtgaaacacataatttgccattttggcgtgtgaattatgattgggtttgagctgtttacttttctgaaataatggcatgaaagaaaattaargaccaagaatagttccatttgccagtagaaaaccagacttttattctctatctgaaattgtgaaaggaagatctgtatgcaagaaagaattaggaactgtcaaaacattttttcccaagctatctgaaagtacttgatttttgcatagtgtcaaastattgagcttctatggtataaagcattgaaccagatgtgggggaacacaatagtgtgtaagatacagtccttatttccaccagttggaggagctaaagtacctatacctgtacaaatacaaaataattggaaagctgttggatgctcttagatgttcaagttaggttaggcaatactaacagtatatacatggcatttgagccaractttgaaagatatgaaggattgactaaaaccaataagagaccagagtatttggttttctgttcctgtgttactttgctaaggataatggcctccagctgcatccataagcctgcaagggacatgatctcatttttttatagctgcatagtattccatggtgaatgtgtactacattttcttaatctagtttatcactgatgggcatttaggttgattccatgtctttgctattgtgaattgtgctgcaatgagcatatgcgagcatgtgtctttataataaaatgatttctattcctttgggtatatacccagtaatgggattgctgagtcaaatggtatttctgtctttaggtctttgaggaatcaccacactgtcttccacaatggctgaactaatttacactcccaccagcagtgtaaaagtcttccttttcctccacaaccttgctagcatctgttattatttgacttttttttttttttttttgagacggagtgtcgctctgtcgcccaggctggagtgcagtggtgcaatggcggctcactgcaagctccgcctcccaggttcacccattctcctgcctcggcctcccaagtagctgggactacaggtgcccgtcaccacgcctggctaattttttgtatttttagtagagacggggtttcaccatgttagccaggatggtcttgatctcctgaccttgtgatccgcccgcctcagcctcctaaagtgctgggattacaggcgtgagccactgcggccggcctctcgttgtgttttaatttgcatttctctaatgatcagtgatgttgagctttttttcatgattgttggctgcatgtatgtgttcttttgaaaagtatctgttcgtgtcctttgcccacttttttatggggttgtctttttcttgtaaatttgtttaaattccttatagacgttgaatattagacctttgtcaggtgcagaattttcaaaaatgttctccagttctgtaggttgtctgtttactctgatgatggtttcttttgctgtgcagaagctctttagattaattagatcctatttgtcaatttttgctttttttgcaattgcttttggtgtcttcagcatgaaatctttggccatgcctatgtcctgaatggtgttgcctaggttatcttccagggtttttatagttttgagttttacattaaagtctttaatccatctcgagttaatttttgtatattgtgtaaggaaggggtccagtttcaatcttctgcatatggctagccaggaatcccatggtgtgctttcaataatatagagtacatcaatatttgtaaaatgtgaattatggaactatttcctgtacctcataggcatttcaaggaaaaaaattaatgacagatattacactgagtaacaaggtagtgtgagtttaaaaacagttattgtgcagtgtgtctcttcattttccagtgtcagggaaaaaatgttattaaattttacaattatatatgttgcacaaatgtgctgagtccatttacattttatggaataatttcatttgttctgcactagctggctggcagagaaattgaacaatgtttggtgatgttaaagttgtaattttgtcagcaacagagttaggaaatataaatataaatctggaactaaaacgtgttgtgttacctttggctactctaggggctaaaatataacttttcaccaccacttcccagtggacttttcctgggaagtcagttgtcattgttctggcaagtttcttttcatcctaaattttgttatcatttaaagagaaaatcatgaaggttataaagaaatccattttagggtatctacccaaaggaaaagaagttattatataaaaaagacacgtgcatgtgcatgtgtatagcagcacaattcacaattgcaaaaatgtggaaccaacctaaatgcccaccaaccaacaagtggataaagaaaatgtgttgtatatacaccatggtatgctactcagccataaaacagaatgaaataatggcatttgcagcaatttagatggcgttggagaccgttgttctatgtgaagtaactcagaaatggaaaaccaaatatcataaattctcacttataagcgagagctaagctatgaggatgcaaaggcataagaatgatataatggactttggggacataagggggagggtgggaaggggatgagggataaaagactaaatattgggtacagtgtacactgctccagtgatgggtgcaccaaaatctcagaaatcaccactaaagaacttacttatataaccaaaaaccacctgttccccaaaaactactgaaataaawtttttaaaaaccaaatacactttaaagacaattttaaaaaattacaatagtaagaacatggaaacaatacaaaaatgtggaatgtagaaagtattgtctgtgcgtggttgctcacgcctgtaatctcagctttttcggaggctgaggcgggtgcatcacctgaggtcaggagttcaagaccagcctggccaacatggtaaaaccccgtctctactaataatacaaaaaaaattagccgggcatggtggcaggcacttgtagtcctagctactcaggaggctgaggcaggagaatcgtttgaacccaggaggtggaggttgcagtgagccgagatcatgccattgcactccagcctgggcaacaagagtgaaactcagtctcaaaaaaataaaaataaaaaaataaagtgtcttccacagttggagtatattctttcataccttctcctatgcctatatgataatgctaaatacactatatatatatgtgttrcttaattatgctcatatatatgtatatatatgttgtaggatatactgtacctgatattctgtgactttgatttttaacctcaacaatatattatggtattcttcctggtcagtacatatagtcctatctcattttttccaaaggctatagaggatactactctataaatgaaaaaaactgaacctctgttgattagcgtgtatcatatatatatatatatcagtatgtatgtttaatgcatacttattttaagttgtacaattaatagctgtacagaattttaaaaactgatacattgtaactttacatatttatgaggtacagtttgatgtttcaatacatgtatatcttatatagtgttcaaatcaaggtagttagcatatcccttacctcattcatttataatttagttatgttgggaacattcaaaaacctttattctagctattttgtaatatacgacaccttactgataaccatagtcaccctactgtgcaacagaacactatgggtttttcttttttctatgtagatgtgtctttgccttattctaagcaaagattgccccagataccatctttttgtttgtttgtttgttcgttttttagcagttttgtgtgtgtgtgtgtgtgtgtgtgtgtgtgtgtgaagttttatactggttatgaatataattttgaacaatatatggtggacttcattgattgatttattaaccttagacactatgtgagtaaagcaggactgcactgcaaggagatgctaaacttttgacattcctgagagagaagttttataaatttcagaattcccctgatttatgcatgcctctctgtcacttaattatgctcataaaattctgcttaactagcaatgggattctcaacttggagagaaaagagtatgctaccactgcagcctaccagaagaacatatcagaatctttgggaaaatcttttcaaaatatgcatatcttccttcctacccccatgtggaacgtgcttacctgattgaaaatcactgcatgtaattagttgttactaattggaatgtaactatttgggagtgtgttgtacagatagtgtaaaaacaaaaaacaaacagcaacaacaacaacaacaaacttgtcaaagtaagaattatatatatgtaagctttaaggcatttaagtggtgaagaggtttggttttgtttgtttgtttgtttgtttgtttgttttgccccaggttaaggggcattgtcttaaatctcctcattttctgtttatcccattatttcattatcagccctagcagaggactctcctttataaaattcactttacaagagttcttatgtaaacattaatgagtagagactaataaaacaaagtagggatgtggatgccgtagcatggatggggtcattgctgagatgagtgactgtcttctgcattgtagacaagggcaagtcaaatttgtatccagcaaaatcactgtcaggggccttcagttcactataatagttgaaactctgagcactaaatctgcgaatatctaaccaagtctatcatcttttatacctttaaacctagtagaaaactcttagaggtctgtgattctatttgaagatcaccttactgggtccagtggatactaaaaatgacgatgacaaggacatgcttgtctggagggttggttycacagtgctttgagctttctctatagcacctgagggtaagtaaaaagtctaaggggagaatttctaatggagttctctctctctgactgttttatctgcagactgcagctgaatatgtaaaatctcgactcccagaggcccttaaacagcatcttcaggactacgagaaagacaaagaaaatagtgtattatcttaccagaccatccttgaacagcagattttgtcaattgaccgagaaatgctagaaaaattgactgtatcctatgatgaagcaggtatgtttgtttttaaaacacacattttttttccttgcaaaaaaawttcattataaaccttgattaaacttggtaaaaggttaagggcaaactagattcaaagttatgtaacatggactaatagtaagtttcttctctgcagttttagtctcaagatggtcagaagattcctaaaaatggatcttaaatatcaaatgcctttaaaattttgctgttttttattgggatttttttggccttttattaactgggtactcctaaagtgttatttcaactttggatagcaactgaaaacttttacatccgagaatccaagaaatgttattcgattcaaatatttgtgttaatattagatattttcttttctaaagaggtatttttttttctcaaactgttaagctaatcattgctttcttttccttagcaactcagacactaccacatcagagacttcatctcactgcctgccataggttcttcccatccaagggagcttattaatgaagtcatggacagaactccttataacattattttaatctattatatggtctgtcagctaagacccaattttaatgaaattagtgtagtattacttggaattatgaaaatctttaataaaattaaacttaagcagcagaaataccctgattaaaattgctatacctctccacctccccctctcaaaaaaattggagaaaaagtacaggaaaaaaggtttctaatggtcaaatgttaatggtattaattcttatattaatgccaagaacttctgcttctatttttacaagtattttttagcatgcatcttattttcttcatcagaatctatgcatgctcgatactttcttaccatttgatttcaagttcaaatagcaaacagaagagcaaataaacaaaacaaaacattatactacattcacctaaccacttaaacaatatttctagttactaagctgcccccatgtatattccaccctctaaccccttcacctccctctcaagcaggatctgtatttccagttttgcccaggacatctctgctttctcttattcttctttgcttttttttttgttttccagacacattggctttcttctgcctagcatttttgttactttcaatattcttctcattggaattcttattcatctcttctctcatccttaatggaataaagttaggttttgatcagtcccaaccaaaataatatttaaatattcatagcatcttatagatcatagaactcatatagtccgcccacttcttgcccctgtgaccattttatggtgagaaaacaaactcatagacttgcctgaaataatgcagttacttacttgtaaaactgggacgccaacttcctaattactaatcaagctatgcttttactacactaatgcaggttctcatttgctcagtaagcaattgttgaatgcacggcaatatactaggttgttgaaggaaagagaaaagcagtgaaaacatgaaaaggaatctgagatgtagaaaatagatcttgcagaaagtcttgctggaggactaaaacatacatgtatgagctttagagaaaaatttctgaggaatttgggactaaatacaccctgtaatatcttcgcgttattaaagttaagatgaaatgtggagccaagaaatagtggaaatggctgaaattttccatgaaattctgtagagggggcattattttaaaccttgaaggacaaatggtgggcatgtatttgtgaagagaagggggatgcattctagtggatgaaggggcacaagtagacatcaaggtgagcatgaacattagctgcaatcacccaccactcaattttttcctgcttcagacataattttccactctcctgcactgttgttgagcagcaacagatcctcagaggtaggcttgcacatrgcttttaggggcaaatagtttggcatagaattaatctgtcaataagccctgtagcatgaaacagtagaaataaacacaagattgagagttagaggatctaaggtctaggccttccaccaggttaatactggtgtgatcttcagcaaattaacctcttagaacctatgtttcttcatctgtaaaattgggctaatataatctcacatgataataataaaatattatcatgtttggggaagtccttagagatcatattgcaaatgctagttaatgccactagtgatgaatgagaacagatttggaccttgtctatcccttaaaccagtgtaaagtacagctgacccttgcacaacatgggggttagggatgccaactctctgtgcagtctaaaattagcataaaacktttgattccccaaaaatcttaactactaatagcctattgttgaccagaagccttactgattacataaacagtcaatcaacacatattttgtatgttatgtgtatttatactgtattcttaagactaagctagagaaaaaaatttatgaaaatcataaaaaagaaaaaatatatttactgtattaaatggaagtggaccatcataaaggtcttcatcctcattgtctttactttgagtaggctgaacagactgctgaagaggagaggaggagctggtcttgctgtctcaggggtgtcagagacagaagaaagtgcacatataaatggacccatgcagttaaacctctgttgtttaagggtcagccgtattctaacttagtcttttcgtggcatacagtgtttgggaaggcagaggggaagtttttaaagtgatcttcagcagctttgaaaagtctagcaacatctatttgataaaacacccrctctgagctcagtttgcctttgctcatctctgcatgaggtgatgcaggacagtggatgtgggagggtaggctatgtgtatgcatgagtgaatgagtgtygctgtgtgttgcaaaaccaaaagttactacctcctcctccataacccatacgttaattatttcaatcaaagaaagaggataaaataagaaaaaacattactatttagcagaaaaatataataatacaaaagaattaggatagaaaattggtagtagtaggctggttgcagcggctcacgcctgtaatcccagcactttgggaggccgaggtgggcggatcatgaggtcaggagatggagaccatactggctaacatggtgaaaccccatctctactaaaaatacaaaaaattagccgggcgtggtggtgggcgcctgtagtcccagctactcgggaggctgaggcaggagaatggcgtgaacccaggaggcggagcttgcagtgagccgagatcgcgccactgcactcaagcctgggcgacagagcctccatctcaaaaaaaaaaagaaaaaagaaaattgctagtagtatccaatatgtgcagatgtaaccatcctacacagaagcttcctgacttcagatggtttaatttagtactttttgactttatgatggtgcaaaagtgatacacattcagtaaaatctgtacttcacatacacccattctgtttttcattttcagtatagtattcactaaattacatgagattcaacactttattccctttattataaaatakactttgtgttagatgactttgtccaactacaggctaatgtaagtgttccgagcatatataagttaggctaaactaagctatgatgttcagtaggttaggtgtattaaatgaattttcaccttaggatattttcaatttacagtgggtttatcaggatgtaatctcattctaagtcgaggagcatctgcactaacatgctcatttgcttcaactgtttagcttctttctattctatcttagttttgacttcctcacattcttgattcagctctcccagttttaggaggtagttaattattagttagaagatatcttggtctctagagaggttaatttgtctttaatgctccttcactgataaatcagcctgagtgacttaatgacaattactgctatttgtagcgtctaaacttctattaataaaaaaacaattaatgaaaaaaacacttagacatttttctaaaatcattgcctcagaattttttcaccctctcctttttctctttctctctctcttcccctttaatacatatataccttaatgccttgcctatccatgaattcagctatctagcaacctggaattcagcaaagaaatgggaagtgagcaaaaaccatgtgtgtgcaaccctaccgtgtcacagaactgtggacaagtccatacaacagaggctttcagttctcacctagaatctatatatttttattttatatagttctgactcattaggttatattttccaatgtggtatttccttttataaaattatctgacttaaaatgttatactttaattgcagaaatgaacagaaatatgtagaacagtataatatgagaataataattgtcagtaatcttactattgtaaacactttggtatattttcctcactctaagcattttaaaaatgtagttgatatctggtagttttattgtgattttatatcctgctttttgcatttaacattattacataagcacttccttatttcattaaagcctcttcatgtgaagataattttaatggctacatcatattctatttgaaagtaccactcactaaatattctcttatgttggacattttcatttttgttttgctcttatgaataatgctgcaagaaatatgggattcatttgtctgcattttatattactctagaggatagacttcagaaaacataagagtttagaattgaaatgagaaggtggggaaggggatgatacttggagcagcatcactgaaaacagtaagtagtgagagcaaagagtaaatccataaaaagcacttagcagattcctgacattgcactacactcaaagtcacattagcattcacagactgtgagttcacattgttgaacttcacaatagtgaccttgattcacagagaaaaggttcaataatgttttttatattctgtatataaaagcaggaattacgtaaaccagtgtattaatccagtcagcctgtgatatggtttggctgtgtccccactcaaatctcatcttgaattgtagctcccataatccccatgtgtcataggagggaccaggtgggaggtaattgaatcatgggggtgggtttttcctgtgctgtttttgtggtagtgaataaatcacacaagatctgatggttttataaagggaagttcccctgcacatgctcttctcgtatgccaccatgtaagacatgcctttgctcctctttcaccttctgctatgattgtgaggcctcctcagccatgtggaactgtgaatccattaaacctctttttctttataattacccagtcttgggtatttcttcatagcagtatgaaaatggactaatacaccctgctttaacaaaataccatagactgggtggctgataaactacagaactttatttctcacagttctgtaggctgtgaggtccaaggtcaaggcaccagcagatatggtgtctataagggcctggttcctcatagatggttgtcttttcactgtaaccttacatggcaggagggctgagagatttatctggggcctcttttataagggcactaattccattcacgaggggttcacccctttgatctaatcagcatcccccacctcataataccatcaccatgaggattagttttcaacatatgaattttgggaggacacaaacatttagaccccctttctaacattagtttagaaagtttttcattcaaatggtttatattttgataatttcaagaactgatatgttttgtggtatagttgaaagaaaacttggaaccaaaagatccagattctatttctagtctagctctactgccaaccatatacgtgaccttgagcaagtcacaaaccttcctaaagcccattttcctataaactgatggcatgaacaggacctcatagatgtcttctagttctaaaactatgctttgggtcttatgacaatggaacactcaaatagctataatatctgcaaggcttcctgtagctatggcttttctgctttttctattygttttcttctttctccttacacagccacataatttgtacctaatttctgaccaaaagaagaccatcactcagctttcatagcatctgctcatgaatattcccaggcatatttttattggtgggatggggagtgagactgtatgagtcaagcaaaagtagattttggaataagaggttctaagctatcattcatggatcctcattaagatagtttagaccttttattgtattagcatgtattaatactaagcaaaatccagagtaacaagtaaggtgtggtttatatttgatctattaatgtttttatttaattgaagtacaagttttcgtacacttcagtagattgggtttaacacagagaagttttcaaggaaagcaatggcataatttgagatgaagagatcaaaatagcattttacactgtccaaagcatcatcaacctaaatatttattatgtgtcatagtgggcaaaagtcaaagggttaaaataccaagagagggaatctttcctcatatttatttttatgctggagtattatttatgtttctgtagctaatctcaaattctgtttttaattatttttgagtttgggcatgaataaatattccctacatattcctttgttaaggatatggtttgtaatgccmtgtgtttgagggaattatgaggagagtaggcccatttatttgagagtgatattttctgtcacaggctcaagaaccctaagccatgggagcggaagtctggaaacaggagtgaagagctgcatatttttccctttgggaaaagctgagtacacctgcaatgggtagaatgctcaatggtagcatcttgttgcaggcctcaagatagttgcctaagctgctgcttagatctccttctcagagttctcagaccagcaagggctttctgttcttacagtttggctagaaacctatacagccttccaatgagcacatgcttctgcaatgtggaaaatgcacttacrcgtagaaagtgaaccagatggtgcacatgagggaagaagagagctcagctggctgtttcttgtgttcctttgggtatcagagttgggagcctgcatattcatttataagtgtcaggcagtcacatacagctttcccagaggaggtgagaaaggaggagcagcattaatttctcagcttttgctttatgattccctgatgtagctctacctgcaggtgaaagctacctgtggtgaagacacaccaagcactataatttttggaaaaatagctttttaaaagcgtggaggaatgtgctctaagcagcttaggaagtagctggagggttacctcctattgagctgattttattcttcttaaaatagatggtgcctgaaagttacatctacattttaattgggacattagtgtcatagtaatcagtaatctcaaaagaaaggccatttactgtcatgggggaaaaaattgaacatacatccagcaaccaaacccaggaaagagtgtgttgaattatttagggactttccaggttttctaagaacataaaaaatctagtaaaaggcatttgcaggaagttcttcactccaacaaatagagtgaatttctcagtrtatttctcaaacagctcctaagggaagaggtgacactaaggtttccttactttatatcttcaatcaggaccccatttcttagctcaaaagataccctctccagggacttgttgacaagaattggagaatttggaaggaagacaaaaacagagacccaaaagaaactaataaagggaagttcaatattgactgtgcaacctctgacaccaacttcttattttctgtagaaagatttaatctattttatttttccattataaaagtaaataaatatactttagaacattttttaaacgtggaaaaaggaagagaaaaagataatctttaattctactacctaaacataatcaacatctttggtgtatttatttcttgccatttttctctgctgagttttaattatttatgccaaattttatatcttttttatttaacatttttaatcatattttatgctgttataaactacctataaaggtcacttgtaataactgcagtactctattgagtggatataccacagttattctcacaaccttttaatatttttaatatggttcctgtcttgtatccatgtttcagttctctttaccacatagaatcccagaatttggtggtctgtttcttatctgtgaaaaaaatgagaatggtagtatgaataacaaaaacataaggcttttgtaatgcagacgattactagccatgtataataacagtaggaagaggggagtaaaatgggtactcaaaatccacttataaactgagaacttatttctggcgataatattaaatttgtttttgaggctacgtaggtgactaatttatcaatctttttaaccaagctgaatttttttttttttttttttttgagatggagtgtcactttgttgcccaggctggagtgcagtggcgcaatcttggctcactgcaacctccgcctcctgggttcaagcaattctcgtgcatcagcctcccaagtagctgggactacaggcatgtgcaaccacgcccagctaatttctttactttttatttttttggtagagatggggtttcaccatgtttgccagttggtctcaaagtcctgacctcaagtgattcacccaccttagcctcccaaagtgctgggattacaggtgtgtgctattgcacctggcctaaccaagctgattttaatttcagttataattytttttttttttttttttttgagacggagtctcgctgtcgcccaggctggagtgcagtggcgcaatctcggctcactgcaggctccgccccctggggttcacgccattctcctgcctcagcctcccgagtagctgggactacaggcgcccgccacctcgcccggctaattttttgtatttttagtagagacggggtttcaccctgttagctcagttataattcttacactttccatttagactgtggattttaaaagccaaattatcttttggtgatggggagcagtaactaaacaaagtgactttgacatctacaaaatagaaaactattggccatagttgtttgaaagtaccgaaacatgtaatttacaagccccagcctaggtttttgtctatggtgggacgttgcatctctctgcatggtttcttcaactgtaaaataaaggtattggattagatattttcttaaatctcttccagtcgtaacaatgtgtgatttttgtctgtttatttaacagttattggttcattcatttattcactctgtaaacactgactgaatgagcatctttgagccagacacagtacccaccactagaaatgctcagatgaccacgtggcccttaactccaggtgcacagtgtgtgcatttgtatgtgtgctcatgtgggagggcagagagatagccagtaaaaacagacaactagagtgtagtggaattggtgttataggggacggtagatgtgcagaggaggaagaaattaggtttggaattggtaaagagttcttaaatcagaaaatcatgagagaacccgtaaatcttgtgaactgttcatgttgaactttactgccagttgcgtttttaaagacaggctttgaataatgccttgttttcttctttgcttctgtaactgtggttatatgttggtgccttatacagaccaattcttgccttctgccatggcaacacctaccacattcttttttttattgagacagggtctcaccctgttgcccaggctggagtgccgtggcatgatcttagctctctgcaaccttgaactcctgggctcaagggactctccagcctcagcctccagagtagctgatactacaggtttacaccaccatggctaattgttatttgtaaaatttttctgtagagacgggttcttactgtgttgtccaggctggtctcaaactcctggcctcaagtgatcctcccaccttggcctgttaaagtcctggaattacaggaatgagccaccactcacagactcaccaccacattctaactgcagctctccaactgatattaattagtttattttagtttatattaatatgctatcagcattgcctgtttgcttatgattcctccaatgtagaaaaaatgataattcagacttaatctttttttttattatactttaagttttagggtacatgtgcacaacgtgcaggtttgttacatatgtatacatgtgccatgttggtgtgctgcacccattagctcgtcatttaacattaggtatatctcctaatgctatccctctcccctccccccaccccacaacagtccccagtgtgtgatgttccccttcctgtgtccatgtgttctcattgttcatttcccacctatgagtgagaacatgaggtgtttggttttttgtccttgcgatagtttgctgagaataatggtttccagcttcatccatgtccctacaaaggacatgaactcatcattttttatggctgcatagcattccatggtgtatatgtgccacattttcttaatccagtctatcatcattggacatttgggttggttcaaagtctttgctattgtgaataatgctgcaataaacatacatgtgcatgtgtctttatagcagcatgatttataatcctttgggtatatacccagtaatgggatggctgggtcaaatggtatttctagttctagatccctgaggaatcgccacactgacttccacaatggttgtactagtttacagtcccaccaacagtgtaaaagtgttcctatttctccacatcctctccagcacctgttgtttcctgactttttaatgatcgccattgtaactggtgtgagatggtatctcactgtggttttgatttgcatttctctgatggccagtgatgatgagcattttttcatgtgttttttggctgcataaatgttcttgtaaaagtggtatgataggaaggtattttaaaaaatcacattccccaacttcatcttacctttctaatagaacacctcatatccactctgaaaatacattgatctaaattttatggtgggcaaaattttaaagaactttgctgagaaaaccagaaaccacaaaggaacactgatatttagaatcaggaagtgccatctctagtgattaaaacatttggactggagctgtatttatctttttaatcaagttgtccttgtttgccacaagggaagtagtgttacttcctgtctctgaagtagtatttgattacaaggactaaaggaaatgtgtatacttcaaagaaaataattggaccaggtggtcatactttagagtacattagctatccagagacaagatgccaatgccatcggtatctcttcctttctgtactatcgggattgtgtaaacaagattttatagaccttgttagaatgtttgtaataaattttaatgacatacacattaatggtaagaccttcagtttatagagaaaaataaaatagtttttaaagtgccaggatttctaatgtattgtgatggtccatttgtagtagtgagaggtaggtaaaatgcatccttggttgactctcagactctgaagatatgtaatcatagacagctgggctgctgtttaatgccattttgcaaatgttatgttcagtctttgggatctactagacactttaagaattcatctggtaaattgccttctgaaaggccctgttttttttttttttttttttttttttttaacccaaaactggccttaatttttttatttttttttgagaatgattctatttagtttttctttttttttctaatttatttatgtattttttattatactttaagttttagggtacatgtgcacattgtgcaggttagttacatatgtatacatgtgccatgctggtgcgctggacccactaactcgtcatctagcattaggtatatctcccagggttatccctcccccctccccccaccccaccacagtccccagagtgtgatattccccttcctgtgtccatgtgatctcattgttcaattcccacctatgagtgagaatatgcggtgtttggttttttgttcttgcgatagtttactgagaatgatgatttccaatttcatctatgtccctacaaaggacatgaactcaacattttttatggctgcatagtattccatggtgtatatgtgccacattttcttaatccagtctatcattgttggacatttgggttggttccaagtctttgctattgtgaataatgccgcaataaacatacatgtgcatgtgtctttatagcagcatgatttatagttgtgtgggtrtatatccagtaatgggatggctgggtcaaatggtatttctagttctagatccctgaggaatcgccacactgacttccacaatggttgaactagtttacagtcccaccaacagtgtaaaagtgttcctatttctccacatcctctccagcacctgttgtttcctgaatttttaatgattgccattgtaactggtgtgagatggtatctcattgtggttttgatttgcatttctctgatggccagtgatgatgagcattttttcatgtgttttttggctgcataaatgtcttcttttgagaagtgtctgttcatgtcctttgcccactttttgatggggttgtttgtttttttcttgtaaatttgttggagttcattgtagattctggatattagccctttgtcagatgagtaggttgcgaaaattttctcccattttgtaggaagcctgttcactctgatggtagtttcttttgctgtgcagagcttctttagttaattagatcccatttgtcatttttggcttttgtgccatgcttttggtgttttagacatgaagtccttgcccatgcctatatcctgaatggtaatgcctagattttcttctagggtttttatggttttaggtctaacatttaagtctttaatccatcttgaattgatttttgtataaggtgtaaggaagggatccagtttcagctttctacgtatggctagccagttttcccagcaccatttattaaatagggaatcctttccccattgctggtttttctcaggtttgtcaaagattagatagttgtagatatgcggcgttatttctgagggctctgttctgttccattgatctatatctctgttttggtaccagtaccatgctcttttggttactgtagccttgtagtatagtttgaagtcaggtagtgtgatgcctccagctttgttcttttggcttaggattgacttggcgatgcgggctcttttttggttccatatgaactttaaagtagttttttccaattctgtgaagaaaatcatcggtagcttgatggggatggcattgaatctgtaaattgccttgggcagtatggccattttcacgatattgagtcttctgacccatgagcatggaatgttcttccatttgtttgtatccttttttatttccttgagcagtggtttgtagttctccttgaagaggtccttcacatcccttgtaagttggattcctaggtattttattctctttgaagcaattgtgaatgagagttcactcatgatttggctctctgtttgtctgttgttagtgtataagaatgcttgtgattttggtacattgattttgtatcctgagactttgctaaagttgctaatcagcttaaggagattttgggctgagacaatggggttttctagatatacaatcatgtcatctgcaaacagggacaatttgacttcctcttttcctaattgaataccctttatttccttctcctgcctaattgccctggccagaacttccaacactatgttgaataggagtggtgagagagggcatccctgtcttgtggcagttttcaaagggaatgcttccagtttttgcccattcagtatgatattggctgtgggtttgtcatagatagctcttattattttgaaatacgtcccatcaatacctaatttattgagagtttttagcatgaagggttgttgaattttgtcaaaggctttttctgcatctattgagataatcatgtggtttttgtctttggctctgtttatatgctggattacatttattgatttgcatatattgaaccagccttgcatcccagggatgaagcccacttgatcatggtggataagctttttgatgtgccactggattcggtttgccagtattttattgaggatttttgcatcaatgttcatcaaggatattggtctaaaattctcttttttggttgtgtctctgcccggctttggtatcaggatgatgctggcctcataaaatgagttagggaggattccctctttttctattgattggaatagtttcagaaggaatggtaccagttcctccttatacctctggtagaattcggctgtgaatccatctggtcctggactccttttggttggtaagctattgattattgccacaatttcaggtcctgttattggtctattcagagattcaacttcttcctggtttagtcttgggagagtgtatgtgtcaaggaatttatccatttcttctagattttctagtttatttgtatagaggtgtttgtagtattctctgatggtagtttgtatttctgtgggattggtggtgatatcccctttatcattttttattgcgtccatttgattcttctctctttttttctttattagtctgctagcggtctatcagttttgttgatcctttcaaaaaaccagctcctggattcattaattttttgaagggttttttgtgtctgtatttccttcagttccgctctgattttagttatttcttgccttcagctagcttttgaatgtgtttgctcttgcttttctagttcttttaattgtgatgttagggtgtcaattttggatctttcctgctttctgttgtgggcatttagtgctataaatttccctctacacactgctttgaatgcgtcccagagattctggtatgttgtgtctttgttctygttggtttcaaagaacatctttatttctgtgaaaggcactgtttttttaagtcaccttctagtgcccagaggaattatctttgtgtttccttagttgataagtttgtctcaaggctgtgtggcttaggccatttctgatgaagctggtttsataaggagtttctttagtatatacactggaggagctcctggatgtgctctttagttctttaatcaatcctagggaattctaaatcgactgtgtagaaattgctaggacatacactgttcattcaacacaaacatttactatgtgccaagttctggctacgtgccgagagtctaagaaatgggtaaagacagatgagttagaagtctgcttccttcgaatttattgctaatctttgacttctgtatctatgaatctattttctagaatttgtttcaaaataacacctgtacttaactgacttattccttacctgagtcactctgatttccattctcctgtcttagtctgcctcattcaaggaaggaagtaacacaaattatatttttattatttatatcccacttcttccctaaaagtttgatttgccattcttataataataatgttacaataaaaatagatcaaagccataaataaggacgaaagcaaatgtactatccataaagaatactaaagtataataatatactttaattaagcatccaatttctcctaagctttctgataaccagagcaaaaagagaaacctaatgacttataaagttctcactgttttaatagataaaataaaagtttttcagtggagacaacttctcttttggcactaaagatcataaagactttatcacaagacttcctgtgtatgggacattgaacaacattgtcttagtctgggttcctcaaatrtagagcctgaagcaaagacttgcttacaattggtttatttaggaatatcaccccaaggaacaggagtgaggggcactgggaatgaaagaggaaacaaggaaacctactatgaggacacttatggagttgggctcatctgaggacaaatgctgcttaagcccaggtaccttctaaggtagcttgtgaatagcatcccagaccatttagctaccagtaccactcccacatttggccaatggtagttccacagacattaacttccctgaatttctggtttatgtaggcctgaaggctgagtgagttctgtgggcatcccatgccttggcatcagggaatctccaggggaggaagcaagcaataaatagtttagtccgaggcagcatctgrgcagaactggtctccacagtggtggcggraataagaggtacgggagcaagagagtatgaaatggtgcccaggagatggcctaggcaagcacaacaaataaaatcttaacttcatagcaaatgcatgtgagcccatcttatggtcatttcttgcrtaacaaccatctataaaagctgagggccaggcacagtggctcatgcctgtactaccaacactttgggaggcttaagtgggagaattgcttgagcccaggagttcaagatcagcctgggtaacatggtgaaaccccatttctataaaaataagaaaaattagccaggcatggtggtgcatacccatagtcccagttacccaggaggctgatgcaggaagattgcttgagcccaggaagttgaggttgcagtgagccgtgttcatgctactgtactccagcctgggtgacagagcaagacccagttaaacaacaagaaagaaagaaagagagaaagagagagagaaagaaagaaaggaaagaaagtattattcatgtttttttaaagctcttgtattggacaggaaaatgcatctgaatactctctatgttggacatactctatactggaatactctctatattgaacatgtagaatatcgagtgtattcacatgcatttatagaaaaatattgcatatagcagaagatgaaagaaaagatgttttgtttgatgtaayggctcaacaggacaggatcctaactcaaacctaaataatttatcttcacttttatcactaatgaatttaaatacctgggcccttcaacctgagtagcatggtgagatgtaacattcaaattggggtttatttatttgacagtaatttgtattcatttattgattttccaacccacttattccagttcagggttacaggtgtctggaccctatcctgacagctcagggcacaaggtggaaacccaccttggacaggacaccatctcatccccatggtgcactcacacacacccactcagactggaaccatgtagacatgccagttcatctaaggggcacaactctaggatatgggaagaaaccagagtaccttgggagaactcacacagacatgggagaacatacaaattcctcatggacagtggccccagccaggaaacaatttttttttttacatcaatattctagcaaaatgatgttgaatgaaataacattattcaatgacctgctatatgtaaaaattagttaccttccacagataagaaactcacaagagtggttactttgggaatgagraattgaggaaggagacttactttttcactgagtactcttactatattgtctgaatttttaactttgtccatgtattttgtatttcttaaaatttataaaaataaaactaaacaaaaccttcctaatccatttcccttatcttcagtgctagaaatggaatgtaataccacagaaaatcatacttcttgttttcaataaaacttttcatccttaagtcatatgtatctttggaataagtcgacaaaggaactcagcaacaagaccagacatcatggaactgcagtgccaaggtcagagaaggtcaataataaggtccaaggcatgcctggacaccagggcttctaccataggtgcttggtagcctttctaccctgggccagaactggttccagattccagggtagggctggccttattggaaaaaaaataaaawttcatctgaaagagagcaggattcatcggtagcatgctggtggggatccagcagagtttctgatgtcaatttctgttggttgcctctgcttcatctcagagcttgatcttcttgtgtctgacaagttattagatttgatgctttacttggccttttagtcagatttcttctctcctgaactatggccaaacctctattgcttttctttcaaggcggtgaagtatagtgaaaagagcccaattggcttcatgataattctttgtgatattatacttaatggggctttttatgaagattaaagataatgggccaggcacagtgtctcaygcctgtaatcccagcactttgggaggcgtaggacgggggattgcttgagctcaggagttcaagaccatcctgggcaacatggcaaaaccccgtctctacaaaaattagctgsacacggtggcatgcacctgtagtcccagccactcagaaggctgaggtgagaggatcgcttgagccctggaggttgaggctgcagtgagctgtgatcatgcaatagcactccagcctgggtgacagagtgagaccttggaaagaaagaaagaaggaaagaaggaaagagagaaagagagagaraaaaaaagaaagagagagagagagagaaaaagaaagagaaagaaagaaagagaaggwaagacggaaagaaaaggagagggagggagggaagggagagagggagggagggaaggaaggtagaaggaaggaaagatataatgtgtggaaaatgatggacatgcagtaaacactctaccaatgatagtctttctcttgtttttgctgttacatgacgtagcatgtacttgatgtggtgtacaggggtatttccccaatccccttcatgatggagaggattacctattattatacttggcacaaattaacttcctgtccagagcatgacagaaaccagcaaaatgctgactccataagcctcctcttccttccttgccctgtcctgtatggaaaaatatttcctcaagttaagagtatttgtatgggtttaatatctttatcttttctaatactgtgtattagttacctattgctgcataacaaattactccaaaatttagcagcttaagacaataaatgtttattagctcatataatttctgaggatcaggaatctaggttggttctctcatgtagttgcattcaagctgtcagccaggggagcagtctctgaagatttaactggggctgttctgcttctgaatatactcatgtggctcttggcagaaagcttcatttcctgtctacatgggtttcttcataaggcctcttgccacatggcttccctcagtgtgagtgatgtaagagacagagagcaagggggcacccaagaccaaagccacagtcttttataatgtgaatgtcgaaagtggtataccacagtttctgacagaagctggggttggtcaaacaaaccaaccctaatttggtgtggtagtattcatactaagcaagggtatgaatactaggagatggagatcattgggggcctcttggaggctaactaccatagggtgtattgcaaaaatatctactcttactcttccaactcctccactctctcttctactattatcacctttccttctcattttatttatttatttatttatttatttatttatttatttatttttattgagatggagtctcgctctgtcgctcaggctggagtacaatggcaggatctcagctcactgcagcctctgcctcccaggttcaagtgattctcctgcctcagcctcctgagtaactgggattacaggtgcacaccaccacacccagctaattatttttgtatttttagtagagacggggtttcaccacgttggccagggtggtctcaaactcctgacctgaagtgatccacctgccttggcctcccaaagtgctgggattacaggcataagccactgcgcttggccccctctcgttttctaatcactacctgcatctcatttcttggaagtccaaagctggagtgttgagccctgcacctggatggctttaggattatttagactcagcatcctttccagtaatcacagtgtacatttcatctctccagggtcaatgcctttgatgtatcagtttttaaatattttgactatcacttctgactcctctaattcattaagatatttccttctagagcttcctaacactgtgcctgggcatctcgacagctttgaaatttcagatcagttttttatagyggcatcctaaatgcttcaagattaaggcatgactctctggatagcaagaaaaaaaaatgtctctctcctttatcactccctcctcccttttgtttttctctttgtttccttaactgtgttctaaaatttatcacattttaaattatatctattaaataatttgatcactcattctgttaattttttaaatggatgagtaaagaaccacataaattgcttttatatttcactttaatgttcgacccagcagttgccctcagtacaagtttcctatcccttttttattgctcttggttgccttttgtattgtgtagagaaaaaggaatgcagcaaaaatgaggaagtcactgargagcttgtctttttctttcactttttactatgccataatttcccttactgtggtcatctattttttcaccaaatctccacctctgattctctgttcctaaagaaaacaacagtaaacatgtaagcctctcattgtatctccattagtggaagaagactgtgatggaactgcaagtaactttcctagggactgctccactgtgkctagattttttaaaaatgttatgaggaaagcattattttttaaagaactcatatttttaacttttttctcgtttcaaattgcttttttgatctatggtgaattcaatctgagattaagcattaaagaacttgggaaaaccaaaatgccttcacagaattagagatgcatttgatttttgtactcgagaatcagcttgtgagaagtattggcccctgtaaatagagataaactaagccaaatttgtctgtaggccttgcrttttaaaatcacacctgaaagtgttatgagcctgatataattgcatttgcaaataaaatgcaagaaggtctagggctcagagtacaattaaatgtattaaatttttctttttgctgtaatgacagtaactttaggcctcttcagttgactgtacctctttgtaaaccttcccctgcaggataatcagcattccacagccactaaagaaaatgagcttgtctaaaaatagttgcctgtttactagattttagcagattttttggggggtggtgggatagggggtgggtaatatgaaagctttacaaaatgaaatgaggtcaaatatgacagatgtgatcaaatgtacttctaatctgtaaatccctgactakctacagttgtgctatttttaaatgtatactttgaagttatactgaatttatgacattctcagcattttcctatatctacaagcatttgggattactctgttgtattctgtggrttggcgatcagtgcatcattgctggtgcccactggctctttattgggggaacccacccctgataattcttcgtgggttcttttctatttacmtaagtgtcagccagtctgagaaataaagggaaagagtacaaagagagaaattttaaagctgggtgtccgggggagacatcacatgtcagcaggttccatgatgtcccccaagccacaaaaccagcaagtttttattagtgattttcaaaaggggagggagtgtacgaatagggtgtgggtcacagagatcacttgctttaagggcaacaaaagatcacaagacaggaggttagggcgagatcacaaggtcagggcaaaactagaatcactaatgaacttccrtgtcccgctgtgtatgcattgtcattgataaacattttaccagagttcargagcagagaactggtctgactagaatttgccaggctggaatttcctaatcctagcaagccttggggcactgcaggagactagggcatgtttcatccctatctacatctgcataaaggcagacactcccagagcggccatttcagaggccttccctgggaatgcattctttttccagggctgttaattattaatattccttactggggaaagaattcagcgatacttctcttacccatttttggtaataagagaaatatggctctgtcctgcccagcccacaggcagccagactttaaggttatctcccttgttccctgaaaatcgctgttaccctgttcttaaggtgcccagatttgatattgttcaaacacacatgctctacaaacaatttgtgcagttaacacaatcaccacagggtcctgaggcgacatacatcctcctcagtttatgaagatgatgggattaagagattaaagtaaagacaggtataggaaatcacaagagtattgattggggaattgataaatgtccatgaaatcttcacaatttatgttcttctgccgtggcttcagctggtccctctgttcagggtccctgacttcctgcaacaggtcttacttagtagagtgtcaaatgaggtcctgttttgcactgcttttatttgacaggaattattttctaaccaccaaaaataataaaattgatttactatgaactctttcctttacaagcagtggttctctaccagaggcgatatctacctccacccccatgggacatttggcaatgttgggaggcatttttagttgtcacagcttagaaaggggaatgggagggagggctggtggtgtctagtgggtagaacccaaggatgctgctaagtaagcattctataatgcacaggacagcccccaacagcaacatttatctaaccaaaatgtaagtagtgccaaggttgtctttagaacaatagttttcaacctttgtagcatattaaagtcaccttgggaggctaatgcccaggctgcattcagatgaattacactagagtctttgagcagtgggactcaggctttagtatttttattttattaatttttaatttcaataggattttggggaacagatggtgttttgttacatggtgatttccgagattttggtgtacccatcaccccagcagtgtacactgtacccaatgkgtattctcccccaatgactccactgcgtaaccaagattgagaactgttactttagagcaaaattttaaagggtaagactagtttagacatcatcacaaatagttcccttactaaagtagatgaaaggacctcattaacatgtggttggaccaatcaggcatgtcctagtatagtattatagtgaggttcaaatgaacttttaatattctctaaagccagtacttaaaacatgagaaactgctattctcattcccatattggaagtttgttttccttgtttttttctaataagttctttctttttccaagcaagtggtgataaatatttactggtagctttagttagtaaagttctttcaaataacaccttgggtgtttgagcattggtgatttgttttccttgaagatgtcttatgtatctttattacttgaataaatatcatcatgtagttatttacctgaattgataatgctgtgcaaaggagctaaagtatcctctctaaaaatatttttttttcataattttggcctttcattcctttaaccatttcctctcaccaaaaattaaatcttaaaatttatggacagttactctaaacagataaatattctccagggatgattaatgtatgatttttttattttattatagatgcctatattgatggcacagttctcagggaacactctccacccacccaaaaaaaaaaaatagcacctcaaagcttttgagagtcagggtagatagaacaatttttaatgatgtattatatagtaaaaactagtccatttataaaaacctgcctagcaaataataaaactgtcttctttcacatctcaacgtctcagtgagagttcaggctgtcgaactatggaaagcatccagcttctttgaagaaatagagtgaggtattactcacagagagccatctggtatcttggtcattaacccacttttgctacccatgcccacatgcttgtcaggagatgctggagaatgaaggaagggaacagattgaggaaggaaatggcagtgattgcagagcccagaggctcccatattggtaagaggttagtcagattcctcagccagggcagagactggcccaggtttcctgaggcctgagttttacacaatttagagaaccctctttaggaaaaaaataaaaaataggtacaaaatgatttctttagaatgagaaaagaaatcacartaaattacaaattgtaaagagttaaccactaccactgaacctagaaaaataacatttgtattaawtaattgcctgatatatgctatagtctgacatctgctacagtttttcccacatctttggcagcatgttctttggttacttcttcatagaacagtgagtttgtaacatcatttcctgcagaggggcctgggaagataatttaatcttccctttagcatggttgagcaaaacttgggatttttatcttgctttgttttttaattcatacttcagagtctctttcagcttttcattttgttattcgtaatgtcatacaaatttttagagttgctgccaaatcttggaaaatttatatcaaagtttcttacatattctttctttcttacaataaaagatttcaggtcatttgaagtttccttatacagttactaataaatagtccttgaatttacaacactcattagctgattggttgtcattgtccttgttgtaatggtgaataatgagttttatttgtcttcacttaatgtcgcattattcataagaacctgagctgtaatggagtgagaacatttcaggtcaagggagaacaaaaggtgtgatctggcaaaggcatggtgtccagtttggatggaatatcatgtacaagtagtgtagcagtgggccacaggactagaaaggtatgctggagccagacaggcaagtgggaagggttgtcaatacttggtaggtggctaaaaatagactctatgttgtatcataaagttaagaagcccaaggccatttgtggaccactgagcatatgaaaggcagcatggtgtaatgttaacatcattggccttagaggcagccagattctagtctgaatactagctttccccccaacaggcctgggaagccttgctaacaagaactatacgtgaaaataatgkcaaactacatatatatttcactatacccaaacttgatgtatccttgacttaagttcctcttagatcccagccagaggccaatttagcatcagtgtatatacagggaatatgatcaaagggaggtagaagtgaagagacagtgctcttacctgattacttcttacttctccaagtatcttcttcaaattttcggaaacatgacccaggcctttgaaagtgcttgggcaagggaagggctctcaagtttgaagcttcattagcttcaagtaaatctgcaggtggtctaggacttattcttcctctcctatatgacttcagaatcagacaggtgagttttagtgcaatgatttaggcagttattgtcatttctgatagtaatgaasgatatgctctgtgttttaaactaaataataaaatgagtttttaaatcgtcacatagcttcactttgttccttggcttaaattcttgaactagggaagcacattgtatggattggttcttctggtcctatcggctgtggcaaaggggccaggcttatatggcggaattttcctttcctgaccctggaagaggcagattctctaagagttaacgattgagraggaaataatgggatctctagagtagacactgtcaagagtggcagtcacatgactgccttccacaagaataggggaacctgggcaagagaggaggaatagggcagacgccatgaggtgactgaagctcatgggagacaccccttgtcaacttgtagaaacacttggacaggttctgtcaagagcatgacgtttacgttattaatgtttatatgacatccatrggaaggtgaggtctgcaaacattcaggttaaggagttaggaatgatatgagaaaagaaaaaaaaatcaaccttgttcttgaaatgagaacagacttgaccttaagcaaaatcaaaaaacaatagagccacttcacagttgctatagatttccaccttttagaagcagatgcaaaaaatcagattttcttggcttttggtctgtcagccccagtcaataattaacaacactgagtgaaacatttttcctctgagatcctcaagctgcttaactgatcagcttagcttagctgagcatgttagggtagtaagaaaagggaaaatatggtttcaattttggtgtatgtgccactagagcaggcactaaaaaagaaatagaatgttttctaatcttcctttctgcttgggagatctaattcatggagaagttaagtgattttctcaggatctcagaacaacttaccagaatagaacagccagtctttaactatcaaagccttcctgggagccaccacttaagctctgctaacctgcttcctctgttcagatatagtggtagtgcagttaacagaagatgtctgtacaattctttatgcttaggaggccagggaatgtctatgatttcataaactagttctgtggttctcatgagcaatagattttaaaggctttaacaccctagtaatcagaagaggggaaggcatcaatcttttcatgccttcaaagagatcaaaccatagccagctgatataaaacccaatgtattgattaaagggaatgtgttactcacttctgatgtgaaagggaagaaaggaggaaatagaaacaaataagacaatcctttagaaaaatctgaaaactgaagaatatgagcacttcagtgcttcatgctaaagccctgcgtttcctattaatatttcttaatctgtttccttacttgctcatttctcctcttttaatttttatagtaacatgtcctataaaaccaacatgataattgtcctataataagttcctctgcagtgggaagtttagggaaaaacaatttaagtacctttcctctctaaagtagtaactctaacccttacagaaccaaccagcacttttttaaaaaaataacgattattttatttattatttattattatttaaaacaattttttttttttttgagcagagtttcactcttgttacmcaggctggagtgcaatgctgcgatcttggctcactgcaacctctgcctcccaggttccagtgattctcctgcctcagcctcccgagtaactggaattacaggtgccctaccaccatgcccggccaggctggttttgaacccctgacctcaggtgatccacccgtctcagcctcacaaagtgctagggtcacaggcgtgagccaccacgcccagcctatttattawtttttagaaacagagtcttgctctgtcacccatgctggaatgcagtggcgtgatcatagctcatcagagccttgaaatcctgggctcaagtaatcctcccacctcagcctcccaagtggctgggactacaggcataccccactatgcccagctgattattattttttattttttgtacagacagggtatatctttgttgcccagactagtcttgaactcctggyctcaagcaatcctcctgccttggcctcccaaagttccagcattacaggcatgagccagtgcacccagccatagcaacgttgtttttgttttgttttgttttgttttgttttgtttttgagacaagatctcattctgtcacccaggctggaatgcagtggcatgaacacagctcactgcagcctcaacctcctgggttcaagtgatcctcccgcctcagcctaccaagtagctggtactacaggtatgtaccaccactgcagctgatcttttttttgtttgttttttgtaaagacaggagtctcatcacattgcccaggctggtctcaaactcctgggcgcaaatgattctcccacctcagcctcccaaagtgctgggattacaggggtgagccaccatgcccagccaacaactattttttaacattgtttttaccatcctaaaatgaaattcatagataatataatctacctatatgtatacatcatgatttaaaaattcagcaaaatgccctaacataaaggggaaaacaaagggaaaataatatataattatatgtatttcaatatgtaaatattcaagcaccaatacattagaagtcataatggagttgtcagatgtgtgtacacagatgtacarcagctgcaaatgaagactaacagttggattattttgataactccaacacagtaagtagcattgtcattgatgaagtgatttttttaagatagcaattcctctttgtgaagttctaaacaaaacaaagtgaaaggtcccttcatttatacagtagctgcattcctggaaaattcattgtatactaaagcgattcccaaaatactctttgtttacatgtaagacaagttccaagcccatgtgattataaacagattttcacttctactatttgcaagttgtatgggatgtgacgaagtctcttttgtaggactgtctattacattgcagaatctctagtgtccctttcccttgctgaataagtcccagtcatacccacagttattttgacaaccaaaaatgcccccacaaatacccagaacatcctcattcaggatcactgctttgtaggggtgccaatcttttggcttccctgggccacattggargaagaagaattgtcttgggccacatataaaatacattaatactaatgatagctgatgagctaaaaaaaaaaaaaaagaaaaaaatcacaaaaaaatctcacagtgttttaagaaaatttaccaatttgtgttaggcyrcattcaaagtcgtcctgggctggtgggccacagattggacaagtttggctggaacaaaggtgaagaawtaaattcagggaagagacattgagttctttcccaaaccattttgaatgtttttggttccttttctttggatttgagatgttgagagcccctgtttcattttcagttactgaaaacttaagaccccagggtattctcaggaaaaagaaagatggtgatggtgtagttatagcacattaaatttatggctttcatcaaactacttgagttaagaatccctaaggagagtttagttagggaaagaagactctcaattacagatattgattcaaacctaaataccatgctaaggaacctagaaaataggaacagttatacctcaggcaattatgtaactacttgatgaaatttttttaaatgttctttcygggattaatctagagttactataagtctattacagtctcccataagtcatacttattttctgtgaagtccttgaaccctgggccttaactgtattcctaacgactgtggcctaagaaaaagacccactggaggagctacccatgtgccaatgagaacccaatcttcaactggaaattgaccagcctactgtctacaagtgtatgccattcatctcattatactgcattctgtatacatatgatacatctatagtaaattcatgaagacagctcaatctcttggtttccctaggtaacataataataactaataatgataactaataattattgagcacttctatgtgctagatgctgttccaagctcttgatgtgtattaactttttgaattctctcaacaaccctaagatgtaagtattattattatcctcattttacatagggaaactgaagcacagggaggttaagtagcttgcctaaggttgtataactagcaaagccagaattcgaacccaggaaatctatatctccagaacccaaattcccaaccattatactatgcatatttaagaaataacaaggcttagtaaaggatatgggtgggtaactaataatccatgaagaggattaaataccatactgcttccagttctgatcaagctaaatatttgtgggtgataatagttgagaaaattggtagtgctgttacagctttattcttttaagtatctgcagtgttagatgtggtaaaacagaggacacraacaccattatctctaaaacrgagataatgacaagtgtagcttccactcatatcatcaaaattagggcccaagacactctatccaactaacagaaattcaattcaaactagcttatgcaaaatgaaaacaacaacagcaaaaaagaatgtgaagtttagtagttctgtaagtgaagaattcgagggatatacctgattaggaatggtttgacccaggtctcaaatgatgtcaaaagcctttctcttccttactcagctctttctctctttgcatgttaaccatattcttgtccattgcaaacaactttatccttggagccatagaagatgttcacagtttaccaatacagggaaagaaaggaagagaccctctctttcctggtatctgctggacagattttgatccagtttggatcacatgttcttctacaaaccaagaactgtggccaaggagaaagaactctgattggctagcctgagctatgtgctcatctgactcatctctctgaaggaaggtgggcatgcaccatggacctcatggcttggaagacagatcgttctcaaggggaaagggatgatgggcagttaaaaataactgctttaaggagccaaactgagccataacctgactactactatttttataacactaggccrttgaatccctaactcataactgaattgttgatccaggtacggtgtacactggtgttacaacaaggtttttttttttttcttggttttgttttatacatgaggatatagaattatacacagkgcctgatataggttaatcattcagtaattgttagctgatattatatgctaataagtaaaaatgatattcctgctattgcctttataatgaatatctaacaaaaaactttctgcagggtatggcagtctgaggtgatggccagcatcaatattccaaggcatgtcaacaactatatgaattagggagcatcactttctaatctagattagtctcgagtttgataaattrtcctgattctctacaggagatttgggagggttgggggaaggaagtcaggtaagaaaacatgggagctgaactacaatctttcatactaaagagtgtccgaacagaagtggtcacaaggtggtaaaaaatagcttcttgcctgctcaggtctggcagttggaaaacattgttctggtgatgcttctaaaccatcagtagccctctgcttgcattgggtgaattggggagctttatagaactagttcatgggcctcagcccttaagaatgttttggtaaatgtggagggaccgagattcccattttcagacccaaggtaagcctgacatgccgctagacatgagaactgcaataagcaatctctataattcaaaaagagaaaacagttgtcatagtaagaacacagagtagcagttcaggcacagccaagttacaaaacttgaaccgacaaatggtatatacagacagacagtgtttataccctgtcccctcttttgatgacaaagccattagttcctttttgtttttctctcctcagggactgataacacaaagcctgctctctccccaactcccatttttcctctttttttttcattgctcagttaatttcactttgttccatttctttctcatgtatgtaagtaaatttatcctgatgccttttctggtctttttgcagattttactcaggatttataggggggtgggggcggatattacttctctctattaattcatgaataaaaattaccttaaatatacttgatgaattattaattcatccagaaaatagtaattgggcacctatttgttatgctgacccttatcaactccagtggggaaggcaccaagttgaagaggctgaagaagaaacctagagccagcaaacaagatatggcttttcccaggggcttacatgcagaggagggagttcagtggcagcagccttggcaggatatctgcatggcccagtggcagcaggctgggcagaagaaccacagctgcttgcaaaaggcatgcagtttaatatggcattttcatttagcaccatttccccagtgatcttcacctggcaatctacattcaacccaaaacctggggcctcgatcccctgtacagcctgtgttccatgggacagcctgggggctcaactgttcctcatagaaatctccaggttggccactcccaagttccctagctcagaacatacattcaggtgcatctgccctacagggttattctcatggtatgcttaagttattgctatcaggtatgtttaccacacactactatgtgcaggcatagtactaagttctggaaattcaactgtgaacaactcacacaagattcctgtcatcatgagatttcagtgtaaggaaggagacaaaataatgaacaaatgactatcagggtgccagatgatgctaagcactatggagaaaaataaagcaggacaagagacaagagcttgacagtatagggaataggagaggctgaggcacaggcagtcagagaaaggcttgaaggaagtgaaaaagtgaccctttccaagatctgcaagaaaggcgctccaggcaagttaccagccaatgcaaggaccctgaggtgggacaaggcagaggatgataggatataaatttgaagagatgatgaggaaggttgtaggacatttcaaatggtgttttaaacagcgttattaaaaggtggtgtaaaacaaaaagcaaaggttgacaattggatttcgtgagatggaggttttcaatgttctcaacaagagcaactataatggcaatgtgagaacaaaagcctctttgaagtggcttagggaaaaattatggaatgtgaggaagtggaaatttcaagtaaatacaagtttgttgggtgttttttcagtccgctatgaagattagcaaagaaatgcaccagtagccagagggtttgtgatacgtaggtagagatttttttttctttttcttttgagacagagtctcactctgtctcccaggctggagtgaaatggcacaatctcgacttactgcaacctccacctcccgggttcaagtgattctcctgcctcagcctcctgagtagctgggattataggtgcctgccaccacacccagctaatttttgtatttttagtagtcacggggttttgccaggttggccaagctggtctcgaactcctgtccccaggtgatccacctgcctcaacctccccaagtgctgggattacaggcatgagccaccatgcctggtccaggtagagactttttttaagatggaagagatgatggcatattgatatgctaatgaattattctaaagaatgagagaaactattgatgcaggggagagaaatataattacaagagcaaagstcttgaatagatgtgagagataggaacaaggagaaaggaaagcaagaggtttttggttttgtgggttgataaatcgatcatgggaaaacaccttagttttctaatggcatctcttggtaaaataggtgagatcctgcattgagattgaaatagggaaagtggtattggaagtttgagaaaagagggtaagatgtgaaatattcaacttggactgaattaaccaagaagtgggctaaggacatgaatagacaattctcaaaagaagatatacaaatagccaacaagcatgtgaaaaaatgctcaacatcagtagtgatcagggaaatgcaaatcgaaaccacagtgtaataccaccttactcctgcaagaatggccataatcaaaaactcaaaaaataatagatgttggcatggatgtggtgaaaagggaacacttctacactgctggtgggaatgtaaactagtacaaccactatggaaaacagtgtggatattccttaaagaactaaaagtagagctaccattcgatccagcaatcccactactgggtatctacccagaggaaaagaagtcattatacgaaaaagatacttgcacacacattttaatagcagcacaattcacaattgcaaaaatacggaacccacccaaatgtccatcattcaacgagtggataaaaaaaattgtggtatatatrtcatgcaatactactcggccatataaaataatttaataatggcattcacagcaacctggatggaattggagaccattattctaagtgaagtaactcagaaatggaaaagcaaacatcatatgttgtcactcataagtgggagctaagctatgtggatgcaaagacataagaatgatacagagggctttggggacctgggggagagggtgagaggggagcaaaggataaaagactacacattgggtacagtgtacactgctctggtgatgggtacactaaaatctcagaaatcaccactaaagaacttaacaccaaacaccacctgttccccaaaaacctattgaaatcataaaaaatattttaaaaattaactagaaaaatacagtaaaaatgcagtgatgagtgaacacatcatgaagattgtgttcacagagcacagatacaaagccaaaagatggttggatttaaccagagttgtggttgttctaggcaaggcaatagcaggaagagcaaaggaggatttcagtggtgggcaggctaggagggataggaggacttaaggtgagtgaggaacagtgaaacagtggtggggctaatggatcagatatcctgttgggctgaagaattattggagtccaaataccagtgtgaatgatctggaaagttaaaaggtagtggttggagagagagatttttcaaacaaagatttctgaggtggttcaaggagtagatggtctatgtggactgtgacaatgtcagtggtatagaaggtgacagagggaattcctagtcattaaatgaatgaggaggtgaaaccaaggggacagtaaatgcttgcaacaaggagcaggagttggataaactgattgcacatgtttgaaaggagctggatatgtgcgggaggtggactctgttcctcaccagttatcaaatgatgaagatatccccaaatatgatatctatccactggaaataacctttgagtttttgacctttagtaaaagggagaaggataacattgttggcagaaatgtggatggtgataggggaaaccagaatgggaaaccatttgttgaatttttttacgagactcaggtatagttatttaagtatgtcataagaaattttggcagttccaagaagtcacattgtcagatgtcaaatggtctggtttaatgactagcttgttgtcctcttaaagataaccttaggtaggataggcctaaataagactaagaaaattccaggtcttggtagctggcctcattctggctctaaaattcttttgaagagtgggtgtggtggggaagggtcagttggacaagcaggaagcaaagaagcacatatagtctgcagttttgtttttcgcattttataaatttcctcctttcttctagattaaataaggacagcctatcactaacaatctcaaaataaaattgtatatgtcctgaagaacctccaaaactttcaatagccaagaaccatatgaagcaggatccaagtaccacatgaagcaggatccaagtcttatacacaagtaaataggtttgaggaaaattttcagaagagcatatcacagaacatatttggaaaatataatagaaggaaaataatatagaactaaaagttcctattatgtaattactttatatatataagtagcttttgcattcaagacaaataacattactggaaaaatttctctcttggaagacatttccacattccaattttcacattaaaaatgacataatgaaagtgccccaagttgtattgaaatgaccacaagcaccatacttaggtataacaggakttcacctgggactcactaatccagttgtttacagccrgactctgttctaattgattagcacctgtgtctcactagttgttaatgtttttattaacactcttgctagaatatgtatttacttgtcaagtagcaaaaattatgtacagaaccagaacaaaacacataaaaattagtttatctggtgtggttcttatccatgtcattcttgtccctctctcttccctcccttttttttccctttgcagcaaattgtaaaggtgactttatcattaccttcttcagggtcacagagttcaaaatgactttcctgagggagatttttgacaggcatctttgaaaagatgtctagggagacttggaactactggatgacattttgatgtcatggaaattgaacaagagtaaataaatrtattggcaatattagaaagactgttaaaagtcatttcttcagtgtaaatttttgtgaaggaagaataaatattgaccattaagttatatcactgtaatacaaggtctgtttgttaagcactgtgtgtggaaaatgatatgatcctggtaaacccagaactgagggggttgacctgaaagttatttcataattgtatttattagtaatgagttacaaaggtacatgactttttaataaagaacttgacctggtaaagagaatgggtttcagtttttatgaatcttaaacaaaaaaagaaaagaaaagaaagccggtggtgaaaagaaccatgttttctcagttaaggctactcagaggataacatggttgctaccgcctggcacaataaatgcaattttggtgcaatgttggggaaagtgtaaaaatactaataatagcctacattcttcagcacattctatgtgcctgtactcttttattcattctacatgtaggaactcatttaatcctcacaaccaccctataaagaaggaaccattaatatktccatttttatagatgaagagactgaggttaagtaacttgctcaaggacacagtacttgaaaacggccgcgtgtggtttctactgcagacagtctgatcccagaccctatactctaataaagcttaagatcatactgtggttgcacttagtaagccatatttcactgccctaatctacctatgactcataacatatatttgtgaattcagatgattgtaccatagatccccacctggccgccagagggaaataagaatctcttacaccccagttatttcttctcagggtaagccttcacttgtgctcagtgttttctttccagcattcttaccttgttgctgtggtttctgctgccacactcttaggaagttactgctgtcaggcgtaaacatgttttcaatgcaaccactttaatgctcctactctgccttcagtaaagacatagcttcctgtaattccccagagttcaactagatcaaccagtgactttcaggagtcctggcacatgccaagtttacaatgccagtatctcagtctgaagcatctataatttgggtcattttactgtattcagaacttcactaggaacaaagcaaaagtacttacctttgactcaccagaagtgtcctcagaatcaagacaggacctacagcttaattctaattactaccctaaaagagacagtatgcatacaacgcttaatgtggcggttattacggctgaaaatcttggatatttttattgtaagtactgatttacaggtatttctccctcccaagactctgagatactgcagagctggaattgtcatgttcacctttgtatccgcagaatccagcacataatagatgttcggtaaatgtttgctttgtgaacaggtgatggcataaaggccacggaaaggaacagctctttgccatcacaagttccattttggacttgtccagtttaagatggtacaacattcaaatacacatgtgctttaagtaattagaggttaggtgatataaatttgataagagcttagaactgcagatacagacactcatattgtctataaagaattcgaagtggaagctgtaattcaaagtagatcttaaagaaaaaagcagtgaaggatgaggaaacaaagaatgacctttcaggagcacacacaaagtttggaagaggaatgtgatccagcagagaagcattcagtgaggaagaagcaattcaagagcatgcatatataagaagctaagaaaaagtaagtttcaaaaagtgaccagtaaaaatacaaacaaaacacataaccagtaagcaaggtcagatatataagagaggccaagaaaaaaacagggagagaaggctgatgaatctggaaaaaaagttattagagacctttagaagtacattttcaatggagtagtttatgtttttcacatttgtgacttatttatattgattgcaatgacttttataacaaaaaatattgcccaatacctagccttttattttgtaagatatactcgagaaatttaccaattagaaattatcatttgatcctgagttcactggaatcattttagaaatttctcctgactagtactgtgtagagaagacattccttagttggttgttggattttctataaatactttacacagctcaaagatatatctgattaaaacctctttaatccttyagtgaccacattaaaagctatactgagtgctttctttcaggaaacagaacaccagatcattgaagatttaattttaattcctaagattcagtttacttcctaagattttaaactcttcctaggcatttaatttcaagaatataacttgagtctacttcaaattattgagatttaagatctgtaaataactaatatttctgattgagtctagtaacaataatcatttgtttctgtcagttattctgttcttctagaaatcacaaactatttaaatttagctaactctcagaggatctatgggctagattgcaaaacaaaacaaaaaacaaaaacaacaacaacaaaacaaacaacaagaaaatacccaaggaactaaaagtctatagttttttgttttttgttcttttgggagagtctcactctgtcgccaggctggagtacagtggtgcaatctctacttactgcaacctccaccttcccgggttcacgtgattcttgtgcctcagcctcccgagtagttgggactacaggtgtgygccaccatgcccagctaatttttgtatttttagtagagactgggtttttccattggccaggctggtcttggacttctggcctcaagtaattcgccccccaaagtgctggaattacacagttttaaagcaaacaaaactaccttttctcaatgataggaaaatatatgaaactcaatactatatgtttatcaggcccaaccattaaaaaattatttcataaataacacccccagctctttttttcttctatcaaagcttcactagctaccagtgccctcacattctctttcttctccatcctattaggattaggattggaaaagatctgtgatccactcataactaagtatgaatttamtacaaaccctccctaaagtgtttacattttaaggatctttcttttttttaattcattattattatactttaggttttagggtacaggtgcacaaggtgcaggttagttacatatgtatacatgtgacatgctggtgcgstgcacccactaactcgtcatctagcattaggtatatctcccaatgctatccctcccccctcccccaaccccacaacagtccccagagtgtgatgttccccttcctatgtccatgtgttctcattgttcarttcccacctatgagtgagaatatgcggtgtttggttttgtgttcttgcgatagtttactgagaatgatgatttccaatttcatccatgtccctacaaacgacgtgaactcatcattttttatggccgcatagtattccatggtgtatatgtgccacattttcttaatccagtctatcattgttggacatttgggttggttccaagtctttgctattgtgaataatgccacaataaacatatatgtgcatgtgtcttcatagcagcatgatttatagtcgtttgggtatatacccagtaatgggatggctgggtcaaatggtatttctagatctagatccctgaggaattgccacactgtcttccacaatggttgaactagtttacagtcccaccaacagcgtaaaagtgttcctatttctccacatcctctccagcacctgttgtttcctgactttttaatgatcgccattstaactggtgtgagatggtatctcactgtggttttgatttgcatttctctgatrgccagtgatggtgagcattttttcatgtgttttttggctgcataaatgtcttcttttgagaagtgtctgttcatgtccttcgcccactttttgatggggttgtttgtttttttcttgtaaatttgtttgagttcattgtagattctggatattagccctttgtcagatgagtaggttgtgaaaattttctcccattttgtaggttgcctgttcactctgatggtagtttcttttgctgtgcagaagctctttagtttaattagatcccatttgtcaattttggcttttgttgccattgcttttggtgttttagacatgaagtccttgcccatgcctatgtcctgaatggtaatgcctaggttttcttctagggtttttatggttttaggtctaacatgtaagtctttaatccatcttgaattgatttttgtataaagtgtaaggaagggatccagtttcagctttctacatatggctagccagttttcccagcaccatttattaaatagggaatcctttccccattgcttgtttttctcaggtttgtsaaagatcagatagttgtagakaggtggcgttatttctgagggctctgttctgttccattgatctatatgtctgttttggtaccagtaccatgctgttttggttactgtagccttgtagtatagtttgaagtcaggtagtgtgatgcctccagctttgttcttttggcttaggattgacttggcratgtgggctcttttttggttccatatgaactttaaaatagttttttccaattctgtgaagaaaggcattggtagcttgatggggatggcgttgaatctataaattaccttgggcagtatrgccattttcacgatattgattcttcctacccatgagcatggaatgttcttccatttgtttgtatcctcttttatttcgttgagcagtggtttgtagttctccttgaagaggtccttcacatcccttgtaagttggattcctaggtattttattctctttgatgcaattgtgaatgggagttcactcatgatttggttctctgtttgtctgttgttgktgtataagaaggcttgtgatttttgtacattgattttgtatcctgagaatttgctgaagttgcctatcagcttaaggagattttgggctgagacaatggggttttctagatatacaatcatgtcgtctgcaaacagggacaatttgacttcctcttttcctaattgattaccctttatttccttctcctgcctaattgccctggccagaacttccaacactatgttgaataggagtggtgagagagggcatccctgtcttgtgcccgttttcaaagggaatgcttccagtttttgcccattcagtatgatattggctgtgggtttgtcatagatagctcttattattttgagatacgtcccatcaatacctaatttattgagagtttttagcatgaagcgttggtgaattttgtcaaggccttttctgcatctattgagataatcatgtggtttttgtctttggttctgtttatatgctggattacatttattgatttgcatatattgaaccagccttgcatcccagggatgaagcccacttgatcatggtggataagctttttgatgtgccactggattcggtttgccagtattttattgaggatttttgcatcaatgttcatcaaggatattggtctaaattctcttttttggttgtgtctctgcccggctttggtatcaggatgatgctggcctcataaaatgagttagggaggattccctctttttctattgattggaatagtttcagaaggaatggtaccagttcctccttgtacctctggtagaattcggctgtgaatccatctggtcctggactccttttggttggtaagctattgattattgccacaatttcaggtcctgttattggtctattcagagattcaacttcttcctggtttagtcttgggagagtgtatgtgtcaaggaatttatccatttcttctagattttctagtttatttgcatagaggtgtttgtagtattctctgatggtagtttgtatttctgtgggatcggtggtgatatcccctttatcattttttattgcgtctatttgattcttctctctttttttctttattagtcttgctagcggtctatcaattttgttgatcctttcaaaaaaccagctcctggattcattaattttttgaagggttttttgtatctctatttccttcagttctgctctgattttagtcatttcttgccttctgctagcttttgaatgtgtttgctcttgcttttctagttcttttaattgtgatgttagggtgtcaattttgggtctttcctgctttctgttgtgggcatttagtgctataaatttccctctacacactgctttgaatgcgtcccagagattctggtatgttgtgtctttgttctcrttgrtttcaaagaacatctttatttctgccttcattttgttattggtatgttgtgtctttgttctcattggtttcaaagaacatctttatttctgccttcattttgttatgtacccagtagtcattcaggagcaggttgttcagtttccatgtagttgagcggttttgagtgagattcttaatcctgagttctagtttgattgcactgtggatctttctaatttatttattcacccaggaaatatttcttgagttttcagcacagtactagtttctatgaaaaaacaaagtgagttatgtatgaagcctaccttttaaagtggcatgaaatgatgcaattaactatgatctcataaaaaagtgatatgtattatgagaggtacaggttttctggagtttaggaaaaagagatggccatctcaaggtcagagtgggaaggtgttcaagaagtggtatttgataaggtaccacagcataatgattaaatacagaagctctggaaccagccttgcctgcgtttaaattctggctatcacttaccacatgatctcgrgcatgttattcagtaagctgccactcagttacctctatgaaatcaaacagtggtatatactttatggatctcttgtgagtattaaatgtgttatgacatgtaaagcacttgaaacacaatataagttttccacaaaggttagctattattctttagactgggctttgaaaaacaggataaataggatttagacatgcaaaaatgagtcagaaattaaatttcagaaggtgcaaagattaaaatataaaaaggttaaaccataaaattattagaagaaatcaggaagaaatcccagggtggggaaggctttcctaggtatgacttcagacccaaaagctataaatatacaattttaaaagatgcattaaaaaaacataaaaaaatacaattttaaaagatgcattaaaaataacataaacaaaaaacacagtctcaacgagatatttttacaactatgctcattgcagcattattcacaagagccatgaggtcaaaacagcccaaatgtccatcaacagatgaataaagaaaatgtgatatatacatayaatggaacattatttagccttaaaaaaagaaatcttgttaaatgctgcaacatggataaatcttgaggacattatgctgagtgaaataagctagacataaaaaagacaaatactgtatgagtctattaatgcaagatatgtacagcagtcaaaatcatggaaacagaaagttaaatgatgggtgccagaggctgagggaagggggaataggcagttgttgtttgatggggatagagtttcagttttggkagatgaaaaaattctaaagatctgttatacaaccatgtgaatatagttaacactaatgaactgtgcacttaaaaatgactaagagggtgaactatatatttttttaccataataaaagataaaaaagttttttttaaagtaaactgaataatgctgaaggtgaggtgaaaaactttttttaataattggttttcctcataatcccatttcttttccctttactctggtgtttaaagcttttatgccatcaaacacttcagaaaacccaccgtctttccttttttttttttttttttttgagacggagtcttgatctgtcgcccaggctggagtgcagtggcgccatcttggcttactgcaagcaccacctcctgsgttcacgccattctcctgcctcagcctcctgagtagctgggaccacaggcacccgccaccacgcccagctaattttttgtagttttagtagagacggggtttcaccttgttagtcaggatggtctcgatctcctgacctcgtgatccacctgcctcagcctcccaaagtgctgggattataggcgtgagccaccgcgcccrgccccctaccttctttcctttatgccattaggagaatgtgccacttgtaattacttctcttaccatcccagtcattcattcatttaatatgtatcaagcacatactgtgtgctagatcctgttctagacagtgtggatttagcagtgaacagaattcctacactcaacgacctatattctaatggagggggcacattaaacaacaagtaaayatatagtctgtctgatggtgtcaagggctccagaataaaagatgagcggggcaaggaatgccaggacataagtaggttactattgtgcacagtgcaatcaagggaagcatcatgtaagctgataacttgagtaaatacctgaataaaatggaccatgaaggtggatatccagggaaagtgtgtttcacatagagggaccaccaagggcaaaggcccagaggcaggaacagcttgatgggtttgagggaaagcaaggaggcccatgtagctggaggagagtgaacggacggggagagaaatggaagttgtgtggggagttggtgctaactttttgggtcattatatagaccaagctgttcaacctgcgacctgcagtctgcatgcagcccaggacagctttgaatgtggcccaacacaaattcgtaaactttcttaaaatattatgatttatttatttttttatttttatttttttagctcatcagctttcgttagtgtattttatgtgtggccccagacaattcttcttcctgtgtggcccagggaagccaaaagattggacacccctgaatagactttggtttttactgtgagcaagatgagagccattggggatgctgagcagagtggcacgatgtaacttatgatttagatggtttctctggcagcagggtaggtaataagagggagaagatagaagtagaaagatgagtcaggagagaggtggtggtggctgagaccagatggtattgtcggggctcaaaaatgataccccaacatgaaggcctcagaagcaaacatctatctctatctgaccttttcctgccctcctggctctggcttctcattctccctgaggctagccatagaaagtagaattactcttccccaaggcagttcatagaaaccagaactccttttccccaaagctaaccataaaaccataagtatttttaaatattactctaactttccctccacctttttgtgtaaaaactggccctaaaggaattatctgacctttcttgtttgattttaggccataagaccgccattccagagagggccctgccccatacccaggaggaaggaatgctgcacagagcggccaagaaaaatctgaacagacaagccttgcagggtttccccattcaatctattagaattagatcatatcctttttgtccaatcacatttcttcacagctgtttatactttgttgaatctaagcataaaaatggatagtttcccctgtatctttgggtcttcattctgaaagctccaatgtcacataaaactatgatcgaggacatttatgtgccttttctcctattaatctgccttttgtctgctggttttcagcagccttcagagggcaaagaagtcttctcttcaccttactatagcaatggaggtgtgaaaagtggtcagattctaggtacattgtgaaggctggtggagatttctaatagattggatgtgaagtgtaggaaaaagaacagagtcaaaaatgagtctggagtttttgacccaaacagctgccagaatggagttactgtatactgagacagggaatgctacaagagaagaagatttgctggaatgatattaggagcttagtttgggacatgctaaatcagacatgcaaagttgggtcaagtaggcaattagatatatgagttttacgctcagtggacagatcaaagctgggaataaaagttaggacatcatcagcatagagatggtatttaaagccagtagactagatgagaccagctagagagtaaatgtaattaagaaagagttctgtggaaggagccctggggtgctttagggtggggacatagggaagaagccgcagacagggaagaaaagccagtgccagtgatgtgggagataattgttttctcagaaaatatccctttttgaatgactctgattatcaaataactttttgtttggtcaatgctaatatatatttctacagtgtttttaatcagttgccataatgctgtttactcctggttacatgagctgtgttgatcctggatcactcttgaatggtaaggccaattcactggatagagtgcccacagtgttttccctatagatgctttaaatgtctttttctttttggaatggaacacatgttattatataggcttacatatgaatagttaaaatwaggtaatttatcaagaagttttttaaaaaatatgtgaccgtatttagagatgcagtgtttgttttttaataggatgcaaatcaactgtctataatgttttatctcaatgaaaatcatgtataagaatcccagtcatactatatttgttacctaaccttccttttcattcattactcatcctcagcaatcaataacagcctctctgcagcctcttaaaatgcagtgaacctattgatttcacttgttattgcatctccctcccctgccgctggctacaaattactcttaagtcagaaaaggtggtaagatagtaagactatatatagactgtcctcttctgttctctccaaaaagctttttttttctatttaactaggaagtgataaaagcaaagctcaggaccagctgtaagttatatgtcctacagttgaaatcttctgtactttaaaaccaaacattttgacttgctctatactattaattaagcacaggaagcaatgcttactgtgatttatcttttcctaaagatgcattacagaagatattcaaatataatatgtcacttaatggaagtagttgtttcaactccaaattataaaatatccatgttagttgtttttatgtctctattctaatttatacttatactttaagttctagggtacatgtgcacaatgtgcaggtttgttacacatgtatacatgcaccatgtgggtgtgctgcacccattaactcgtcatttacattaggtatatctcataatgctatccctcctcctccccccaccccatgacaggccccaatgtgtgatgttccccttcccgtgtccaagtgttctcattattcaattcccacctatgagtgagaacatgcagtgtttggttttttgtccttgygctagtttgctgagaatgatggtttccagcttcattcatgtccctacaaaggacatgaactcatcctttttatggctgcatagtattccatttatggctgcatagtattccatggtgtatatgtgccacattttcttaatccagtctatcattgttggacatttgggttggttccaagtytttgctattgtgaatagtgctgcaataaacatacgtgtccatgtgtctttatagcagcatgatttataatcctttgggtatatacccagtaatgggatggctgggtaaaatggtatttctagttctagatccttgaggaattgccacactgtcttccacaatggttgaactagtttacagtcccaccaacagtgtaaaagtgttcctatttctccacatcctctccagcacctgttgtttcctgactttttaatgatcgcctttctaactggtgtgagatggtatctcattttggttttgatttgcatttctctgatggccagtgatgatgagcattttttcatgtgtctgttggctgcataaatgtcttcttttgagaagtgtctattcatatcctttgcccactttgtaatggggttgttttattcttgcaaatttgagttctttgtagattctggatattagccctttgacacatgagtagattgcaaaaattttctcccattctgtaggttgcctgttcactctgatggtagtttcttttgctgtacagaagctctttagtgtaattagatcccatttgtcaattttggcttttgttgccattgcttttggtgtttcagacgtgaagtccttgcccatgcctatgtcctgaatggtattgcctaggttttcttctagggtttttatggctttaggtctaacatgtaagtctttaatccatcttgaattaatttttgtataaggtgtaaggaaggtatccagtttcagctttctacatatggcaagccagttttcccagcaccgtttattaaatacggaatcctttccccatttcttgtttttgtcaggtttgtcaaagatcagatggttgtagatgtgtggtattatttctgagagctctattctgttccattggtctatatctctcttttggtaccaataccaggctgttttggttactgtagccttgtagtatagtttgaagtcaggtagcgtgatgcctccagctttgttcttttggcttaggattgtcttggcaatgtgggctcttttttggttccatakgaactttaaagtagttttttccaattctgtgaagaaagtcrttggtagcttgatggggatggcattgaatctatraattaccttgggcagtatggccattttcayaatattgattcttcctatccatgagcatggaatgttcttccatttgtttgtatcctcttttatttcgttgagcagtggtttatagttctccttgaagaggtccttcacatcccttgtaagttggattcctaggtattttattctctttgatgcaattgtgaatgggagttcactcatgatttggttctctgtttgtctgttgttggtgtataagaaggcttgggatttttgcacattgattttgtatcctgagaacttgctgaagttgcctatcagcttaaggagattttgggctgagacgatggggttttctaaatatacaatcatgtcacctgcaaacatggacaatttgacttcctcttttcctaattgattaccctttatttctttctcctgcctaattgccctggccagaacttccaacactatgttgaataggagtggtgagagagggcatctctgtcttctgcccgttttcaaagggaatgcttccagtttttgcccattcagtgtgatattggctgtgggtttgtcatagatagctcttattattttgaggtacgtcccatcaatacctaatttattgagtgtttgtagcatgaagggctgttgaattttgtcaaaggccttttctgcatctattgagatmatcatgtggtttttgtctttggttctgtttatatgctggattccatttattgatttgcgtatgttgaaccagccttgcatcccagggatgaagcccacttgatcatggtggataagctttttgatgtgccactggattcggtttgctagtattttattgaggatttttgcatcaatgttaatcaaggatattggtctaaaattctcttttttggttgtgtctctgcccggctttggtatcaggatgatgctggcctcataaaatgagttagggaggattccctctttttctattgattggaatagtttcagaaggaatggtaccagttcctccttgtacctctggtagaatttggctgtgaatccatctggtcctggactcyttttggttggtaagctattgattattgccacaatttcagctcctgttattggtctattcagcgattcaacttcttcctggtttagtcttgggagagtgtatgtgttgaggaatttatcaatttcttctagattttctagtttatttgtgtagaggtgtttatatattctctgatggtaktttgtatttctgtgggatcggtggtgatatcccctttatcattttttattgcatctatttgattcttctctctttttttctttattagtcttgctagcggtctatcaatattgttgatcytttcaaaaaaccagctcctggattcattgattttttgaagggttttttgtttctctatatctgtctccttcagttctgctctgatcttagttacttcttgccttctgctagcttttgaatgtgtttgctcttgcttctctagttcttttaattgtgatgttagggtgtcaattttagatctttcctgctttctcttgtgggcatttagtgctgtaaatttccctctacacactgttttaaatatgtcccagagattctggtatgttgtgtctttgttctcattggtttcaaagaacatctttatttctgccttcatttcgttatgcacccagtagtcattcaggagcaggttgttcagttyccatgtagttgaatggttttgagtgagtttcttaatcctgagttgtagtttgattgcactgtgatctgagagacagtttgttataatttctgttcttttacatttgctgaggagtgctttacttccaactatgtggtcaattttggaataagtgtgatgtgatgctgagaagaatgtatattctgttgatttggggtggagagttctgtagatgtctattaggtccacttggtgcagagctgagttcaactcctggatatccttgttaactttgtgtctcgttgatctgtctaatgttgacagtggggggttaaagtctcccattattattgtstgggartctaagtctctttgtaggtctctaaggacttgctttatgaatctgggtgctcctgtattgrgtgcatatatatttaggatagttcggtcttcttgttgaattgatacctttaccattatgtaatgaccttctttgtctcttttgatctttgttggtttaaagtctgttttatcagagactaggatgcaacccctgttttttttgttttccatttgcttggtagatcttcctccatccctttattttgagcctatgtttgtctctgcacatgaaatgggtctcctgaatatggcacactgatggatcttgactctttatccaatttgccagtctgtgtcttttaattggagcatttagcccatttacatttaaggttaatattgttatgcgtgaatttgatcctgtcattgtgatgttagctggttattttgctcattagttgatgcagtttcttcctagcatcaatggtctttacaattttgcatgtttttgcagtggctggtactggttgttcctttccatgtgtagtgcttccttcaggagctcttgtagggcaggcctggtggtgactttatactattaattaagcacaggaaggaatgcttactgtgatttatgcttactgtgatttatcttttcctaaagttgcattacagaagatattcaaatacaatatatcatttaatagaagtagttgtttcaactccaaattataacatatccatgttagttgtttttatatctctattctctaatttagggaatagactgacactgtcagctcatactgccaaatatccctttttttcaagtcaggattttttttttttttttttagatggagtcttgctctgtcaccaaggctggagtgcagtggcacgatctcagctcactgcaacatccgcctcccaggttcaagcgattctcctgcctcagccccctgagtagctgggattacaggcacacgccaccacgcccagctaacttttatatttttagtagagatggggtttcaccttggtcagccttgtctcaaactcctgacctcatgatccgcctgtctggacctcccaaagtgatgggattataggcgtgagccacygctcctggccaggatttttaagtgtagtagaaactagtataagcactaatgcttcagatttctcagacttgccttcatgttttggtttgggatatttggggatggggggagtcatattgtaacacctccaagcaactgaaatccaccacttacggtgcaaaatcattatgcctgagtttccttggtgctgtatgcaggcaaccacttccatttattggagctggcaaagaatctttgctattaaatgggaaaaggtcacagttgtaaatcaaggagcagtaagtcttttaggtgtgtgtagggcagttggtagggggagtagcaaaggggggtgaatgggagaaatttgtaatggcttctcttaacaccactcacacacatcaaaagcatcataatacacatttctatttggacatattctatttttaaattaataatcatgcgctatccttccttcccctaaaccagctggaaagcttagtagttatttacagggcacctcagtgaaattagcagtagactgaaacatgactgtgccactgatatgtgcaagttcttcataaaacctcattaccagggcctggagataatgcagttgtagtaaaacaaaacartttgtcaaatgtgatctgaaatcctaaaggggattttccagcagctatattttgttaatgctggtgctgactgagttgatcagaatatgcaaactatatctctaaactggtcattatttacatgcttcagctgcactcactaattaaatccctggagttatttctgacacctaccacctgggacctgtttccagacaaaggctttcctgtggcacacagccgagataggtctgggcccttctgtttcatgtcagaataaatatttcagctctgaggctttttgtttaactggattcagtggttctcttgatttgcgttatttcttttaccaggaatcagtttacyaagctagctgttgtttggatgggctaattaaaacctgctcagtgtgtgtgcaggcagcctctaagccaaatattgccctacccagaacttggataaaaacatggcatttgtatttattagaacagatgagccttgtgacttacccctagctaatctgactctagtgtttgcttttttcattgtatgcccttctgaatgtacrtcccaccttaaaaagtgaggagtgcccacagttcccagcccttgagaaatcccatggaaaggagagaygtggcctgggtgttcctgagaacagtcctgctgtcaacttcatgggtggcaggtcaccaaaaggtgtgtctatatcacatatgatatttggtctcatgagacacttcggaattagttatttatactrtttttatcaaggtttcatgcaaagtggataaccagttatagaagctttgctgatactgccgttcttttgagtggaggcattctatctaggcaactggtaaaaaaaaatccaaatattgtttcagatagttaaatgcattagactatgatctccatctacatcaaacatttattcatttctgtcatattgcatggtcctatattctaggagaggcctatcatattcccctaaggagcttgtagtcttgtgaatgaaacagatatgcaaacaaatatttccagtacaatgtgataaattgtctctcagatttctaaattgggtaagtatgtgtatgatgatgccctaaccaagatatggaacgctgaagaaggaacaggttgaaggaggagagatggagggagatgttaaattggatttcacacgctcacaggacattcaggctgaagtttctagtaggcagttctaaatgcrgcttataagatagatgaggaactccttgccagaaaatattatttcatcatgttcctattagagggcgaggcatggtacaaatatattttgataggagaggtgaataaacaaaagattgagagtggaggctaccctggtaggacatcaggttggggaaaagtaagcttttcaagagcagctttcctaattctcaattttatttagagtgtgctctgattataacaatatgtggatggtgtggagactttctgagagattaaccagtgaataagtctttaagagaagaatgcttgctcatcgactgggtattcatttggagaagattgtgttttccagtttcttagaagataatatttggagtattakctgaacaaaacataatgcacttctttttttttcttcttctttatgcttatcttgccaagtcatgaaagagccaatttgaaatatttcaactgatatttctagctagaaatgaatggatttttgaaacatttcattactgtacttagaaagtgtaactgtggatagagatgattcatagtcttctttttcggaggtggatttttagaaaaaagagtggggtgtgtctccagttatcttaagggtgaaattctcccaaatgatctcaaactaaagaacattttaaaatcagtgccatggtgaaatttgaagagggaagaaaatgtcacagaatacaataaatagaaaattatcagaactccaaggaatttgagggagattagatatagagaagtgtcatatttttgtttagaccaattatggagtctgagcatcttgacacaattgattatgttgattggctcttcagtagcattttcatttcttcacaaaacttatccaaaaaccttcaagtttcgagtacctagctgaataaactacctactttttggtgccttaccaagggtccacagtgttctattttctgaagtaaatgccaacctcagaagtaagtgcccattatgcctattgtattacaatttttctaagcccagaattgtcgtgggaggttgaaaacattccagtggtcaaagaaagagagcagttagctcatttaaaccctcttccatatcccattctgtccttggtgaaaaggtgccagcctgtttttataagaataaatctatttgacagacctggggcagttcttgtctgctgctaaggtttccactacaaatacaaggaaaaagtattgccgaggttgagtagggaaatacaggggaaaaacagagtttttgcatcctaaaataaccttggaatctgtaaagcacctgctttactccaatgaagtacctaaaatttgagtttacactagaggttctagaaaatttcccctattaccctaacctgattgaatatagctttaaaagcttaaaattaataacagcaagatacttttaaaagcttaaaattaataacagcaagccaatgactccttaaaaaaaaagaatggggtatacatcttgacattatttaattcagctgtcaatcttaaaagataaatttgcattcagactgtgtatgcatgtgttagcctcctcacagattacgtgctggcaaccccattctgtgcagggactccttaggaaggccatctttatagaattctccatggtggatcacaaagagaggatttgcatttacacataaaagaccataacgcatcaattttagaaagagcttctttcattttacaaataaattggccctaaataagaatatttcatgtagaaatcttgaaatgtattttgtttattcaatagtaataatatcaaatggttttcatatgttctctcttctttctatgaacatgaaaggtagcatagatatttttacaaatggaattccaatattattgctttggaatttttttaaatttgtgtttaagatactataaactacaattgatgataaagatcatttaattagtttaggactagagttaattagcattttaatgaaatggaatcatatctctttaggaattttgtagcatttcaggattatggatattttttcttgtagtataaatatttattatacactttccaattattatgaagctgatataaaatttaaacctaaaaataatgtttctaacaatatcacttaatagtcagaaaaaattttgagaaaacaaattaaccatcttacttgtaggaagctgatgacaagaatcgaagcagaactgcacattttccaaggtatgttccttggcatctcggcattccaggcattctggagggaaaaacatttgggatatgttgcataccatgaccttctttggaattcactatttgacattatattaaaggctttgtaagactgatagatagtttaactggctttaactttgagaacttgttatttccccaacttattgaggcatgaacccttttactgaataacttctatctatattcagctgaattggctatccacagaaaccacttcgggaaacattgaactagaggataagattatttgattaatttggttaattattttagataatactatagatgatgctcaaaattgcaacccaaattaagatacttgtggtcattctgggtttgctgttgttgttgttattgtttcttgttaggaacaaggtctcattctgtcacccagcctggggtgcagtggcataatcatagctcattgcagtctcaaactcctgggttcaagtgattctcccacctcaactccccgagtagctgggactataggcatgcgccaccatgcctggctgatttaaaaaawttttttttgtaaagatagggtctcactatgttgtccaggttggtctcgaactccagatctcaagtgatcctcctatcttggcttgcaaaagtgctgaaattacaggcatgagtcaacatgtctggccaccaattcttttttaactactaaaataaattctggacactttttggtgaggtcaacagctggtttttagctactacaaagatggaaatttgttcagaagtaagatagaatcaaagtaccatttagcagtaagagttttgtatatagaacaaactttcaaataaataaatttgagtgagtttgtgttacctgtcactgctgcatcatcagtcagttagctcagggcatttactgcatgatatatgtccactagggtcacagtaatgcattaacaagatgatatgtcatataattagttggcctttttctctaaaatcataaacgaagctaactataaaatgttgtgctgctgggcatggtggctcatgcctgtaataccaacactttgggaagccaaggcagcggatcaccaggtcaggagatcgagaccatcctgaccaacatggtgaaaaaccccctctctactaaaaatacaaaaaattacctgagtgtggtggcgtgtgcctgtaatcctagctactcaggaggctgaggcatgagaatcacttgaacccaggaggtggaggttgcagtgagccaagatcgtgccactgcactccagcctagcgacagagagagactccacctcaaaaaaaaaaaaaaaaagttgtactaagcctagaaaaaacaagacatctcctaactcaattttatactctaatatatactggcatttcaaaatatttgaacatatatttaagtcctgaaccctcgtgtaggcaaattggttatttatttctacaccaggacatctaaaataataccctgtttcctccctttaaacttataagtaattgagaaataagacataggagacagtcaagtagcaagaagcaaaataacagctttacttctaataaagctgattgaggaaactgaccttaacataagcaaggctcatgtttcagagaagcatttcagagaaggggaaataggaatgtcccttaaatagttgctaaaccttatcaactaactagggaaatgcaagtgaaatcaccataagatactgttttgcccataccatagaattaattggaagtgctccttcctcttgtattttttggaaaagtttgtgaagaaytggttggcattaattcttcattgcatgtttgatagaattcactgatgaatccatctgggtcagggtttttctttatgggaagcttttgattactaattcaatctctatacttgttataggtctgttgggatcttctgtttcttcttgagtcaattttatcagtttgtgtttttttaggaacttctaagtttcatctacattatctaattaatctaatttattggtatacattaaattgttcatagtattttcttattatccttttattttattgatataaagttggtaatgatgtcccttcytgtattcccaatcttggtaatytgagtcttctcccctttttttcttcatcaatctagctaaagtttggtcaactttggtgatcttttttaagarcctacttttgtttttgttgtatctctatttttgtatcatttatttatgctctaatctttattattttctttcttctttggggtttagtttgctcttattttctagtttcttagggtggtagcttaggttttttatttgagagctttcttctttaatataggtgtttatagctgtaaaaacactttagctgtatcccataagttttgggtgtatgttcatttccactcatctcaaaatattttctaatttcccttgtgatttctttttttgatacattggttatttaggattgtgttcatgacttctttatatattgttacattttccaaatttattctgctattgatttctaatttcattcgtttgtggtcagagaacatacttagtatgtttctaacccttttaaatttatttaagttttgttttatagtctaacctggagaatgtcctgtgtatacctgataagaatgtataatctgtctttattgggtggagtgttctatacatgtctgttaggtctagtggttttctagtattgttcaagtcttttatttatttatttcctttttaatcttctgcctcgttctatctattagtggaagtgagattttgaagttgtcatctattattgttgaactatctattttcctctttaattctgttagtttttgcctcacgtattttagagctctgttgttatgtgcatatatatttatctccctgatgtattcacccttttattgttttaaaatatccttttttgtctctagtaataatttgtctgaagtatattttttctgatattcgtaaagctactctagttctcttctggttttttttatagcatactttactctttactcttaacatatttgtgccattggatctaaagtattttctagaaagcacatagttggataagatttaaaaatctattttgctaatctctgcctttttattagaatttttaattcatttatgtttaaggtaattacctacaagttaaaagttatgtttactattttactatttgttttttatatgtcttatgtattttgttcctttatcactccattattgcatacttttgtgtagctagatgttttctgttttaattccattttttttttttttacccttagttactttttgaatgactgcttggagactgcaagtaacaccttagcttcaaaatatctagttcatattaattctaaactaatttcgattttaaacaaagactttgctttaatataccactattccctccccattctctgtgctgttgtcaaccaaattatatgcttatacattataatgtcatcaataatttcataattatttctttatgcatttattttttaaattagaagaaaaaagttaacaaataagatcaaattagaacaaaatataattctttttaaattaaaatcctgcttctgtaaaaaaatacatttctattgtctattatatttacttaattattggttacatttgtttatatattcatgtggattcaaatcactgtttagcatccttgtatttcactttgaaggattctattatgaaatcctttttttgttcagggcttcaagtgacaacttttctcagtttttatctgaataacttacttaatttctccttcttttttttttttttttttttttgagatggagtctcgctctgtcacccaggctggagtgcagtggcacaatcttcgctcactgcaagctccacctcctgggtacacaccattctcctgcctcagcctcccgagtagctgggactacaggcacctgccaccatgaccagctaatttttttgtatttttagtagagatggggtttcactgtgttagccagaatggtctcgatctcctgacctcrtgatccgcctgccttggcctcccaaagtgctgggattacaggcatgagccactgtgcccagcctctccttcatttttgaagcacaattttgatggatggagaattctttgttgacactcttttcatgagcacttcgatatgttgtcccactgccttctgatgtccatggtttctgatgagaaatcagctgttagtctcatttgaaactttcttgtacattatgagggttttttttttttttctcttgctgctctcaagattctctttcagtctttggcttttaacagtttgattgtatgtcttggtgtggatttcttagagtttattctacttggaatttgttgaggttctaggatgtatagattaatgtatttcatcccattttgtaagttttggccattatttcttcaaatattcttttgttcctttctctgtctcatctcctttagggaatcctatatatgttgttgcaattcatgatgttccacagattgttaaggctctgctctattaaaattttttaaaattcttttttctatctatttctcaaattaggtaatgtcaattgacctatcttcaagtttgctgattctttattatgcctcctcatatcggctgtaaaatccttctattgaatttttcatttcatttactacgcaaatataaaccagaatttctatttggtaatttggtaattttttcattgatactctccattcaatgagatatcatccttatactttcctttagttcttcagacacagttttctttgattctctaaacatactatgatagtggatttaaagtttttttcttgaaagtctaacatctgggcttacttgggggtagtttctactattagttttttatccctgtgtatgggccgtactttcctgtttctttgcatttcttattttttttcacttcttgcttgtgtagggccataaagtcatctagaggtaataaattagggccttttaaggtcttttctgcacatgcacacagtcttacacatgtatcccaggaatatgttggagcttttcaaattccactgtggacatccatttcccaaatcttccccttaagatttttggggctgggcatggtggctcatgcctgtaatcccaacaccttgggaggcccagacgggcagatcacttgaggtcaggagttcgaggctagcgtggccaacatggtgaaattagctgggcaaaattagccggacatggtggcacacacctgtagtcccagctactcaggaggctaaggcaggagaatctcttgaacctgggaggcagaggttgcagtgagccaagattgtgccactgcactcctgcctgggtgacagggcaagactccgtctcaaaaaaaaaaaaaaaaaagatttttggatagtcttttgtttggctttcacatgactgcagtgttaaataattgccactgattgcttttaaccaataccctggggatagggctttcctacctcggaagctctgaatcagatcaaataagctctggccgggtgcagtggctcatgcctgtaatcccagcactttgggaggcggaggcgggcagatcacctgaggtcgggagttcgagaccagcctgaccaacatggagaaaccccatctctactaaaaatacaaaattagctgagcgtggtggcacatgcctgtaatcccagctactcgggaggctgaggcaggagaatcacttgaacccaggaggcaaaggttgtggtcagctgagatcacgccattacactccagcctgggcaacaaragtgaaactccatctcaaaaaaaaaaaaaaaggaagctctgcaaatgaggtttttccagtgagctcccagacaggtcagatggtgacagttttctggggatggagctcttcttcagagttccaaacctcctcatccccttttcatgatggttaggctgctaattttcacaaccactgtgaatacaaggctgctagttttcaaggttgccacagagttggctagagaggaatgagaatagggtgagttaaaacaacacaaagctcactcttcttaccaatattcagccattttcttcttaaataagcatgccttagtttgttgaaagcttcaggctaatttctagaattctgaaaaagttgtttttaacaattttttccagtgttctcatagtttcgtggaagagcagacttttggaagtgcttaccctgccattccagaagtctcttatgtataggtgctatggtttgaatgttttctcaccaaaactgaggtgttgcctgtgtgacagtatcaagaggtggggcctttaagaggtgattaggccatgagagcttctccttcatgaataggtataaggcccttataaaagatccttcatgccaggtacagtggcttgcgcttataatcccagctactcagagggctgaggcagaagaatcacttgaggccaggagtttgagaccagcctggaaaacatagtaagaatccacttctaaaaacttaaaaaaaataaataaattagccmggcatggtggcatgtgcctgtagtcccagctactcaggaggctgaggcaggatgatcctttgagttaaggagttcgtggcttcattgagctatgatcacatcactgcaccttagcctggatgacacagcaagacctcatttgtaaatgaaaaaaaaaaaaaaaagagtcttcatgcagcatttggttagcttgcccttctatcttctaccatgtgaggactcagcaagaaggccctcactagaggctggtgccttgatcttggatttcccagcctccagaactgtgagaaaattaatttctgttctttataaattacccagtcactggtattttgttatagcagcacaaataaactaagacgataggttaagcaaaatggaaattaaatataaacaaaaactctttgagattgagtttattttgattcactaggaaattaatagttccatgtattttcttataataatattttaaagatctaaagcaaataaagtaaaatcttaaaagttattaaagttgagtggtaggtacgtgaatatttgttatattttacattttctagttagggaaataataacaaacataaaaaaatctttttaaaagaaatataattaagactagttttgcaatgtagtcctaaggggaagtccaaagaaggaacccagaaaggaggtaagaggtgagggcctaaaagtgccattggctgtagtttacattcaaacattaacagatagttattaactgcttcccagatgcaatggtaagagtttgtactgcccttaagggggtactcactggtgaagggttagacaagcaagcaggtgtgcatggtatagtttcaaaagatagctaagtgctaggtgctaggggaatttccacaaaaggagggcctttaatccacagctgctgaggaagagctgggaagacctctcagaagaggtaacatcttagtcaagctttataaaggatgaataaaagttgacggccgggcgtggtggctcacgcctgtaatcccagccctttgggaggccgaggcaggaggatcacctgaggtcaagagctcaagaccagcctggccaacatggcaaaaccctttctttactaaaaatacaaaaattagctgggcatggtggtgggcgcctgtaatcccagctgctcaggaggctgaggcaggaatccctcacttgaacccaggaggcagaggttacagtgagccgagaccaygccactgcactcctgctggggaaacagagtgagactctgtctcaaaaaaaaaamaaagaaaattgacaaggagatagaagtgtcttggtgtcttgtgcaggggaaaatgtacttgccaaactggtttktaatggccagactcaaggaacaaggtaatgggtggtgaacaagaacaattcacataggccatgccaattgttgagtttaaatcctggaggctattgctctttggaagattttaaggtggagaaatagcaggggaagaagggcagtgagtacactggctccagagatgagggctggaatctggtgtcaaattctggctctgaaacttactaccttggatcktggacaagttacgcaaggtctctatgcattggttttctcatctgtaaaatggagataatattgtctacctcacagagctgttctcagctttaaataagctaactgatgttaatcactcagaggtatatctaaccacattgtaaatgcttagcagctactaggaaattcaagcaattttatgtaaagattggatcatgctttagaaagatggctttgacagcactgtggagcagctatgatgggagtggggagattgcaggccaagagacctttagacgattggtgcaatcaaggtgtaggcctaggagcagcagtcagcatcacctggtgtattagtccattttcacactgctgataaagacatacctgacactgggtaatttatacaggaaaaagggtttaatggacgtacagttagttagttccctgtgactggggaagcctcacaatcgtggcagaaggcaaggaggagcaagtcttaccttacatggatggcagcaggcagaaagagagaacttgtatagggaaactccttcttatagaaccatcagatcttgtgagacttattcactgtcacaagaacagcacgggaaagacctgcccccgtgatccaattacctcccaaagggtctctcccacaacacgtgggaattcaagatgcgatttgggtggcaacacagccaaaccatatcacctaggaacttgttacaagtgtagactttctggaatggggcccagcaatctaaggagcaccaaaagtccctccaggtgaatcttatgtacatctaagtttgcaaaaagagaactgaataagtttgcaaaaaaatttgcaaaaagagaactcagctggtcaagctgagaagaaatgagaaactgaataaaacctaaccatatggagggctcctcatggcctaggtactgaacattaactggtttaaacagtaaatcaaaggttatcctcattttatagataaaccaaggcttagaaaatgtggctgaagtccttgttcggcctcatggctggcaagtggtgacactaggaatcagacccaaaacctgtgctcttaaccactaggctcttctcataatcagaaagtgattgaggagaaggggaatttcagaaatcataaagtaatagaattarcaaggcttaccgggtgatttgctatggtcatggagtcattgtggactcccaagtccctggatttggataaatattgatgacattctgtgattcaggctgcatgaatgaaacggcacgtgtaaattctaagaaattttttttaacataaggagtttgaggtccctacaggaaaacagaatgtagagtccctgtagtttggacactcaggctgggaataaaaatttgggaggcctaagtatacaggtggatgcagctgaagatgtgggtgtgagtgagacaatcttaggcaagtatggcaggagaaaagaaagcgggccaagggcagaaccctggggaacaggtagaagaagaagcttctgcaaagtagacagtaaaaagaaccaaacagaggtaaaggagaaaagggaaaggacccagacatccaggagaaaatcagctcaaagtcagctcaaagagaggctgggccagcatggttgttgctgagaatctcagccttactgcaaggcagaatcaaattactatccctctcctaccacccctcccctatgaataaactgggatacatgacaccaacaacaaaaaggctctcccgggtggtagaatgttaggagagggtaccctaggcctgaggcagtcattaataaaagcttatcaggatgctgacagaatgccagtgtacgtgccctctaaaattgtaattagtgagattgtactccttaacatgcaacttggtgtaatagcagtaatcttgatgaactgtggtcagtatggattcagggaggtcatccgtactaataaaagtctaattcatcacagttaatacactttgggtttcatattacactcccagtgcctttaagcacttatggtgagcataatacttattattttccacctcagttctagtgtcagagccagcacatatacaaacaaacaaacaaacgaaacctaactgtatgtatgtagtctaatggccgctcaaatatctgaaagggcagatatggatttgaagtctcacacataaggaaacatttattgagtgcttctggtggccaacattttacataggttatttcattttatcctcataagcaccctctgagatagttacagaaagagccagacttagtgaacaaatgaagttgagttttacagtgctattaactagctaaggtcatacaaatagtaactggagctaagatttgaaacccctgtccatctcattgcaagttyatattattttcattaatgatgccagaatggaattggtattaaatcatcttgcacattttacaagaatgtcatacaattccagtaaataagctgaatgaaaccacttttaaactttgagaagaagaaagcgatatgtaggcaggatattttttatttccaccatgaatatcagaagtagcatctgaaaatataaaagaggcctcaaaataatctctaaaagcacattcttattaatagtttccaaaaagaaaaccttaatctatttccatttttttcttgactttgctgtttatcagtacccccaggagctcatttttatacatactactttatggaaaccacctacccctctactgtcacccttaatatacacagccccatagaatttctcctttccttgctattctactgagccatagagcagaactggcaagagaaaacaaaagagagcaagccgttaacctctctgcctcagtggctgttttataaaatgacatgacttcattatattcctgatatcagarcaactccctgccaccaccaccaccctacagcctccctgaagttttcagcaaccatgaagaaaagactgagcacaagctggcccatggaaacttgggaaacttttttacctcatgcctgcagataccgtgggagtagactttgagctgcttcatgcctgtctcagacaaaattttacagactgtctcctattttccattttacagtttccaaatcagcaactgctatggtctaaacatgcctccccacctgaattcatatgttgaaacttartcacaaaagttagtactaaaagatagggcctttaggagacgattaaggattagtgaccttatgaaagaggttgaaaggagtgccctcgtgccttttgctcttttwtgtcttcgccatgtaaggacacagcattcatccctcttcccccacttttttttgtttgtttgttcgtttattaatttgcccctctgccttttccaccatgagaggatgccataagaaagtggcacttatggatcaggccctccccagatactgaatttgccaggacctagatcttggacttcccggcctctagaactgtaaaaaataattttctgttatctataaatcacctagtctcaggtattttgttatagcagcctaaatggactacgacaacaacctcctcctgtcactattataataatatcaataaccaagagatgccaaagtgggaatttgggtatttcatcatttagaggactaccaattagagtcagacttctagatgggcccaggctcccaatatttttgcttccaaatatgtttttcaaagccatatatctccttccccatagatagcatccatacatcaaaatcctcagttatatgaaataagagaaagaaggcctctaatgtgcctactacattctactcacaacacaggatatagaaacaatctctgttgagaaaaaaaaaggaaagcttccagaagttcttcctttggtatactccaccagaccttaggaaaggaatgggatgtcagagaagacttctaatcaaaataagaggaggaagaaattttagacaaatggacttgatctcaaaaaccacacctaccctccctcttgaaaaggggcccaaaatggttcacctccactttcttttattactttcctttataagctgctgtcacaggctccagaggactggtaagttctcttccagagaaattcagacaggtcagaagattgtatttctgagaagtactgagggctggaagaatcagatgtccttgtctgtttgataaagcaagaggtcagtgcaattatggcagaaaattcatgaagatamcacaggcgcaagctggaaagtagtggttatggtggctttgtagattccagtgacctggaaagaaaaccatgggaacaaacaattgttgagcaacaactatgtaccaggatgcatattgctgaaaccaaaagaggtaaggtcatttgcctgagggcatttagctagactgtgaagctaggttgtctgactccaaagcttatgttcttttcatcacactctgtgacagaatagctcttctctgacttgtgaatggcagctatgtattctgtcctttttttttttttttttttgagagagagtctcactctgtcacccatgctggagtgcagtggtgcgatcatagctcactgcagcctcaaactcctgggctcaaagggtcctcccacctcagcctcctgagtagtaggactataggtgcataccaccatgcctggataattttttaaaatttatatttttgtggagacaggtctcgctgtgttgcccaggctggtctcaaactcctgggctcaagtgatccacctcagcctcccaacgtgctgggattacaggcatgagccaccacaccagacgatwctctataccttaaagcagcaacaccagcagtccatgaggaggttttagccaatttaacttacccgctaatgatgctgttcccaaacagctttctataagggccactgagtggaaaatagggcaacaagggttcatagtagcatcttcctctgcctgtgggggaagaaaagagaaagaaagagcaaagtctaacagggctgacctatcaccttcttgtctccttaccacatcccatactccttcagcccattttattttagggcttgaacacaagagaccattttaaaattactcctttgtaatagtagcagtagagataaccaaagggctaaagagatttcaccaaatggttaaagtggagccactttattttcctgtaagtggcagcatgaaattaccttcattctattctgttagggttaggtattccagtatttcaaagagcgatcctaccctcacctttgtccatttctctatcactcaataggtcaccccagaataatttgtgaatactcaaagtgtacgaaaaatgtattacaagggctgtctttacacataaatggagttgctcatcacctacctgatacactttgaaaagcacatggaaggctttcttacttacatatataactcctactagcatatgacatttcctgaaatcccaccattgaggattcctgcccttgtgttagtagatcaattgctattatagaaacttgctattctcaggtgttcaactaacacctaggatcctcaaaccaaggcaacaggaatcctaatgaggggatgggggtgaagagggaggaagtagaggtggcagattttgaaggcttggagcatgcttatgaagaacaaatatgagtacagtgcctcagtacagagaagtcctttttttttttttttgagagataagagtcttactctatagcccaagctggagtgcaatggcatgatctcagctcactgcaacctccgcctcccgggttcaagtgattctcctgcctcagcctcctgagtagctgggattacagatgtgcatcaccacgcctagctaattttggattttttttttttttttttttttttagtagagatggggtttcaccatgttggtcaggctggtcttgaaatcctgacctgaggtgatccacccacctcgggattacaggcatgagccaccgcccctggcccacagaaaagttgtaaagtattgggtgttaagggatgggtcacatccagggaggagatagagtatcctttgagataagagtcaactcccattcacagtttctacaaagaaaataaagtacctaggaatacaacttacaagggatctgaaggacctcttcaaggagaactacaaaccactgctcaacgaaataagagaggacacaaacaaatggaaaaatgtttcatgctcatggataggaagatcaatatcatgaaaatggccatactacccaaagtaatttatagattcaatgctatccccatcaagctaccattgactttcttcacagaattagaaaaaactgctttaaatttcatatggaaccaaaaaagagcccgtagagccaagagaatcctaagcaaacagaacaaagctggaggcatcatgctacctgacttcaaactatactacaaggctacgataaccaaaacagcatggtactggtaccaaaacagagatatagaccaatggaacagaacagaggcctcagaaaaaaatgtgacacatctacaactatctgatctttgacaaagctgacaaaaacaagcaatggggaaaggattccctatttaataaatggggttgggataactggctagctatatgtagaaaaccgaaaatgcaccccttccttataccttatacaaaaattaactcgagatggattaaakacttcaacgtaagacctaaaaccataaaaaccctagaagaaaacctgggcaataccattcaggacataggcatgggcaaagacttcatgactaaaacaccaaaagcaatggcaacaaaagcccaaactgacaaataagatataattcaactaaagagcttctgcacagcaaaaggaactatcatcagagtgaacaggcaacctacagaatgggagaaaatttttgcaatctgtccatctgacaaagggctaatatccagaatctgcaaggaacttaaacaaatttacaagaaaaaagcaaacaaccccatcaaaaagtgggtgaaggatacgaacagacacttctcaaaagaagacatttatgcagccaacaaacttatgaaaaaaaagctcatcatcactggtcattagagaaatgcaaatcaaaaccacaatgagatactatctcatgccagttagaatggtgatcattaaagtcaggaaacaacagatgctggagaggatgtggagaaataggaacacttttacactgttggtgggagcgtaaattagttcagccattgtggaagacagtgtggcgattcctcaaggatctagaaccagaattaccatttgacccagcaatcccattactgtgtatatactcaaaggatcataaatcatgccactataaagacacatacacrtgtatgtttattgtggcactgttcacaatagcaaagacttggaaccaacccaaatggccatcaatgatagactggataaagaaaatgtggcacatatacaccatataataccatgcagccataaagaaggatgagttcatgtcctttgcagggatgtggatgaagctggaaaccatcagtctcagcaaagtaacacaggaacagaaaaccaaacactgcatgttctcatttataagtgggagtcaaacaatgagaacacatggacacacagaggggaccatcacacactggggcctgtcgggggggtggaggactaggggaggtaggggagggatagcattaggagaaatatctaatgtagatgacgggttgatgggtgcagcaaaccaccatggcacgtgtatacctatgtaacaaacctgcatgttctgcacatgtatcccagaacttaaagtacaataaaaaaataaaagaaaatgtggcacatatacaccatggaatactatgcagccataaaaaagaatgagttcatgtcctttgcagggacatggatgaagctggaagccatcattctcagcaaactaacacaggaacagaaaaccaaacaccacatgttctcactgataagtgagagttgaacaatgagaacatatgggcacagggaggggaacatcacacactgaggcctgtcagggggtggggggcaaggggaaggatagatgactagttgatgagtgcagcaaaccaccacggcacatgtatacttgtgtaacaaacctacacattctccacatgtatcccagaacttaaagtataattaaaaaaaaaaaaaaagagtgagccatcttgcagttttgactgagctttgttctgcttattgaataggtaagtaacccaaacggaaagaagtggtgagcaatgcaggaagtgctcaagcctgatgtaaaacaggaaaacttctgtttcatggtttgtgttgcacagcgcccctcggccaaagaggaaagagctaattttgagataagtaaccattgcttctaattctttagaaagtgcttttgactgtagacagacatgctaaaggctgtgcctcattgtttgaagtccagatacgtacaactactccttgttgttactgtaaaaatagttcctgaaagaatgactaaaaagaataggagatgcaagattaaaataacatgaatgggagaggaagtacaagactaaaacttcctcatgtcagaggtaagattgctttatttcccaactaaataaaatcaggtcatgtatgattgttaatggcaattcttgccaggaacttaaccaaagttaaaataattttacaggttgctctaactttcccagtttctggacattcccaatagatgactttgttattttcaaggacattcttggggtttgaacacattgtttcttttttgcagtgcttttcagcatatgattgaacgtactcaagaagggtcatggttagttcagcaagctgatttcaacatttggtgattgtctccagttaatgagctatacatatgatgtccgcttttattttcatcatcataaaccacagaaaaaaggggaaacagtataccagcaagtcagcaagtccaaatcaagccatgactcagatttcctaagaaagaaaagatcagactctgctttgacatattctatcttaaattttgaaattactttggggacaacattaattatccaggtcagtgtgggggaatagcagttcctccttgatcatcctcttcatatggtataatcactaacttcacagatctgtactgaaaagttgtttacctttggggaaatggctcattataagtatgtatatagggaatagtaatataagaaaaaatcataaagatttgagggtaagtagagaagatcagaccctgtggaagttaatagcatggcccttggaaccagattacctagattcaaatcccatcttctcttcttaatacctctgtgaccttggacaaattacttaccctttttgtgtcttagttcaaccatctgcaagatggggatatgagagtattattagtagattgatgtgaggattatgtgaatgagtgtttgtaaagcacttagaacaatgcttgttacagagtaggtgctcaataaatgtgacctgtaattgttatccttcagtaattggtaaattttatgtctgtagtcatagagtttggttcttaacccaggcccggtgccattcaagacactgcagaacatagtgcatattccttcatgtttatctaggtttttttctcctttttaatgttacctttagtcccatactagtcattatcaacctgtggtcaccagtcagggaagtacattcgtattgattgctgcaaatgcaaaggtgctttcagagcagagatccttgattttaagggactcccattaaggttgaaaasatgggacaagtcygtttttcctgccaagaaagacatggcttccatgaaatcttatttactatatttttgtatctaacaagttctctaggaagcctctcatttttgaatcgtaaaaaaggtctgtattcaaagcaaaaatcctttaaaaaaatctttgataattctgatctctgtgctttgctagcccagatttttattatctgaccctatggtatccataagcatggttttaaaggtatgtccacaagttatttgatacttctctcattgcggtggaacttaattcttctccctttgagtgcagggaggactttatgattcctttgtagtgaatgaatatagcagaagtgatgggataatacttctgagactgggttatataaagactggcttctgactttggtttgctcctttgctctttgtctctggaatcacrtgctcagggggaaatcaactgccatgtcatgaagagatgatacttgggcagccagtggagagacctacatggtgaggaactgaggtttgccagaatccatgtgaatgcacttgggaatgtaccctcccctacttgagctttttttttttttttttttgagatggaattttgctcttgttgcccaggctagagtgcaatggtacgatctcagctcaccgcaacctccacctcccaggttcaagtgattctcctgcctcagccttccgagtagctgggattacaggcatgcgccaccatgcccggctaatttttttttttttttttttttggtatttttagtagagacggggtttctccatgttggtcaggctggtcttgaactcccgacctcaggtgatctgcctgcctcagcctcccaaagtgctgggattacgggcgtgagccactgtacccagcccctacttgagcttttgagatgactgacagcttgaccacaagctcatgagagatcctgaggcacaaccaccctactaagcccctcaggattcttgatcctcagaaactctgagataataaatatttgttgtctaaagcttgatgaccgactgtcaaaccaattatgttgaatgaatctatcttgtgttcatttcttcagcaagactgagtcacattgcctcataaaaatgtatgacagtggccgggcgccggtggctcacgcctgtaatcccagcactttgggaggccgaggcgggcggatcacgaggtcaggagatcgagaccatcccggctaaaatggtgaaaccccgtctctactaaaaaatacgaaaaattagccgggcgtagtggcgggcgcctgtagtcccagctactcgggaggctgaggcaggagaatggcgtgaacccgggaggcggagcttgcagtgagccgagatcccgccgctgcactccagcctgggcgacagagcgagactccgtctcaaaaaaaaaaaaaaaaaaatgtatgacagagggttggttgtaggttgcaaatatcaataaacatagttaagagttttatttttcttgtattttttagagacagggtctctctctgtcacccaggctggagtacagtggcacaatcatagcccactgcagcctcaaacttctggactcaaccaattctctgacctcagcctcctgagcagctagaactacaagcatgtgccatcatgcctggctaatttttatttatgtgtagaaacgtggtctcactatgttgcccaggctcaaacttctggtctcaagagatcctcttgccttggcctcccaaaatgctgggatttgttttaaaaaaaaaaaaaaaaaaaaaaaaaaagcaaaattgactccatcctgacatctttttcattctttattgtcagcacatctttttggtaaatattatagtctagtctcccctcttaagtgattaatctgaaaatcatgtgaacattcttccatttcctttagtgattctgtcagaggcatgtgaaccagagcaactctatcttaaatgggagctgggaaaaatgagctgaaatctaccgggctgcattcccaggcagttaaggcattctaagtcacaggagagataggaagtcagcaaaaaatacaggtcataaaaaccttgctgataaaacaggttgcagtaaaggagctggccaaaaccagaaccaaaatggtgacgagaatgacctctagtcctcctcactgctaccctcccaccagcaccatgacagtttacaaatggcatggcaacgtcaggaagttaccctatatggttagaaaggggcagcatgaataatccaccccttatttagcataacatcaacaaataaccataaaaatggacaaccagcagcccttggggctgctccgtctatggagtagccattcttttattcctttactttcttaataaactggctttcactttgcactgtggactcgccctgaattctttcctgagcgagatccaagaactctcttttggggtctggactaggacccttttcctgtaacaattttgcctctcaccaattaagaatgagacaattctgaggactctcctttggaaaaatgatcaaggttcttggaactcagccatgttaggaagtaaggtgactgaatggggaagcagtaaggagggggcgtgtattttttcatcygaagctgttctagtgttggaactttcaaggttccagcctcacttggaattttatgaaactcatacctcatattttattttttatgttttattttttgagacagagtctcgctctgtcgcccaggctggagtgcaggggtgcgatctcggctcactgcaagctctgcctcccggtttcatgccattctcctgcctcagcctcccgagtagctgggactacaggtgcccgccaccacacccggctaatttttgtatttttaatagagacgggtttcactgtgttaggatggtctccatctcctgacctcgtgatccgcccgcctcggcctcccaaagtgctgggattacaggcgtgagccactgcgcccggccatacctcatattttaaatgataacaaataacttcttccgtgtggcaaatttagatagaaagcattgaaagaacctgcttcccatctgctgatcaaactggagcctgaatcaaataaacttctccaaataaatgctacaatcctgatttctgcaagcttttggacttttaaaacttggtgttcctatctcaggcaacatatacctctttggaaactgggtataaatctactgggtttggatgtggaatgggttggttatttcatttgtgtgctctctttaaggtcatgagaatttgccatggttcatgatcatagtttaaacaatattagctggctaagtgctggtgcttagtgaaatacactcttttatctttagacacccctttgctttcttctttgatatgaagccatttctctcgagtgacacttcagcatttttttaattgaaattgtaagtacaatacatagtttgatcattctggtctcagagatttaattcttaagtagtgctaagacctcgcccaccttttaaaacctcacctggatgtcattcatccattgtatcgagggactgatataacatgtgtacttaatttaagatccttaagggtgggtattttccattaccattagttaaaatttgcaagtaagagcaacatgttccctgactctgcataaagttaaacatgcgaactgaaaatagaatgagagaaaatcgagcatggttatttactttctgcagtgctctaattgggcactatagcatatggccaaaacctttactattaattaatcacaaaaaatccatatggatgatttgtgaacattctaaagtcagagtgggaatttgcttcttttctatgtgaggactaatctctgattttttttttatcttgcccaaattcctatctaaggggtctggggaatcataccctacaaaccataaattctcatcagatgggttttatttaaccctatatattgtgacttattttccaacctgactctggcataacattacaagacaattaagaaaataaaattattttatccccaaaacatgtttatttgccgtatcttgaaatggccctgcaaagctgtcctttgtgggggaaaatttgcatctgtaaagaatctctgttaacatacctagatctgtttcttccaggcctttccaatcctaaagaggttacctaagagtctagcaccttttaaagatctgaacaggaaacatttgtcatctactgtctctaagggcattcactataggacttcaaaggaaccttggcctccacaatcttttatcttaacctggacattttctttctgtcaactccaggtctttagacaaactcaaccaatgacaaactcaaccaactgtcaaccagaaaatgtttaaatttacctatagcctggagatgcctccccccactggccccgccctggctttgagttgtcctgcctttctggaccaaaccaatgtatttcttaaatgtatttgattgatgtctcatgcctccctaaaaggtttaaaaccaagctgcaccctgaccaccttgggcacatgttcgcaggatctcctgagggctgtgtcatggtccatggtcactcatatttggctcagaaaaatattttacagagtttgactcttttttattgatgatgttttctttctaaacacattttttcactttgggaggccaaggcaggcagatcacaaggtcaggagatcgagaccatcctggctaacacagtgaaaccccatctctactaaaaatacaaaaaattagccaggtggtggtgggcgcctgtagtcccagctactcgggaggctgaggcaggagaatggtgtgaacccaggaggcggagcttgcagtgagctgagatcacaccactgcactccagcctggacaacagagtgagactgtgcctcaaaaaacaaacaaacaaaacaaaaaacacacacacaattttcttaaagggtgcctggatctctattaatacttagaatttggtaatgtttaaaagctttgacatttcttaatgtcagaaatttccatattgagatttgacatatatttggactcacattaaatgagacgtactagtcatcatcattgttaaaaaatatttttaaatttttaagtatggaagataaaataaaaacccgttctcattcatttacttattcaactccccaccaccacacatacatatacatactcatacatgcacgcaatacaaaccttcctccccaccacccttggctaactccccattcatcagtcaaaactcagctcaaatagttgctccttgtatcacggcaggctggtttctgtggttggttctgtcaacttcaactgtaatagaaatgttgtttttctattcttccttctttggcctcccattaagctgtcacttctttacctagggaatgcatcttttgtttctgagttcacaacactaccagaatgcctggcatggcagaaagtgcttgttaaatgcctgctgaatgaatgaataacttcagccaccagcctagcragcagatgagttcagaggttatataaacaacattcataagctcagccagaatcttgtttgagccagagcagcagaagcccagaaagtcagggacaatgccaccctggggcttataagtccttcaggggctacacaaggccagaccaactcaggaaaccacctgcgaaggtgccctccctccccagttccatgccacctggcagttttgtgctgtctatgggcctagaccaactcaaagtgaagaagttctctgaaaaccttttacttattaaagaactccaataagcaaaataggtagacatattttccctggtggagccctaagcaaaattcaattatgtgaatcgtacttaatatttaaaaacattgtgggtttttttggccaggcaccgtggctcacgcctgtaatcccagcactttgggaggctgaggcgggtgaatcacgaggtcaggagttcgagacaagcctggccatcatggtgaaaccccgtctctactaaaaatacaaaaaattagctgggcgtagtggcaggctcctgtaatcccagctactcaggaggctgaggcaggagaattgcttgaactgaggacacggaggttgcagtgagctgagatcacgccagtgcactccagcctggccaacagagtaagattctgtctcaaaaaaaaaaaaaaattgttattttttttttttttcaaatcagtggttracttcattacatttgcctggaaaatagactggtaacaagtgaaaaactacctgaagaagccagttcaacttagagtgaatccaaaagggcagtggggccatgagaagcttcatttcttagcagtcaaccagagggagtttccaggggtcctgggaggagggtttagataagtgaaagttgtgccccttgcagtgctcttatttttcagtttaaaagatgcctcctgccatccacatgttatgcagttggggatttcaacccacttacagcatagtcttccctatttaatcatagaatctcctcatttttaactgacctggccagcttctttatcaattttgttcacatactgcgggcctcaagtgttcatttaaacgtttgggactgtaactgctaaagctgttttcacatgtggaaaatatgagcctttaagtttcgtttagcagatgctcaagccagcagccagcaatatgccccacttctagggtggtgcccagagtactggactgagcagctgaaatgcagcttaagttctggttttattgcaaatcagccaccaatgttgaattggtttcttagtccctgagtctgttgccttatttgatgaattaaaataagtaatataattcaggacccttgggagaagtgttttatatcactttgctaacactgaagactctccagttctctctctgatgcactggaaacattgcgttctaaataccctaagagccctttcagcagtaaattggtctcagggtgctggagaggatgtatctggtggtgtttcgaaagtgatcaactcctcccactcactttaccccttgggcttgtaactttcttgtttctggcctccaaggaaatcacatcttccagctcagccatgaattaaaaaaacaattaaaaatattttatacctcatttgtatgctgtaccagaaagatttatttgaatatctcatttgtatattgctctgtgtatgtttttttgagacggagtcttgctctgtcacccagggtagagtgcagtggtgcgattttggttcactgcaacctctgcctcctgggttcaagcaattctcctgcctcagcctcccgagtagctgggattacaggcatgtaccaacacgcccagctaatttttgtatttttagtagagatggggtttcaccatgttggccagactggtcttgaactcctgacctcaaatgatccacccaccttggcctcctaaagtgctggggttacagacgtgagccactgcacctggcctgccctgtatttatttatttatttatttatttatttatttattwattttttagtgggagcaaatgcaagttgagcattgaaaattcaaaatctgaagtgttccaaaattcaaaattttctgaggaccagctgggtgcaactctaatcccaagcactttgggaggctgaggcaggcagatcacttgagcccaggagttcaaggtcagtctgggcaacatggtaagatgttgctgagagattttgtcaccaccaggcctgccctacaagagctcctgaaggaagcactacacatggaaaggaacaaccagtaccagccactgcaaaaacatgccaaaatgtaaagaccatcgatgctaagaagaaactgcatcaactaacgagcaaaataaccagctaacatcacaatgacaggatcaacttcacgcataacaatattaaccttaaatgtaaatgagctaaatgctccaattaaaagacacagactgccaaattggataaagagtcaagacccatcagtgtgctatattcagcagacccatctcacgtgcagagacacacataggctcaaaataaagggatggaggaagatctaccaagcaaatggaaaacaaaaaaaggcaggagttgcaatcctagtctctgataaaacagattttaaaccaacaaagatcaaaagagacaaagaaggccattacataatggtaaagggatcaattcaacaagaagagctaaatatcctaaatatatatgcactcaatacaggagcacccagattcataaagcaagtccttagagacctacaaagagacttagattcccacacaataataatgggagactttaaccccccactgtcaacattagacagatcaacgagacacaaagttaacaaggatatccaggaattgaactcagctctgcaccaatggacctgatagacatctacagagcgctccaccccaaatcaacagaatatacattcttctcagcaccacatcgcacttattccaaaattgaccacatagttggaagtaaagcactcctcagcaaatgtaaaagaacagaaattataacaaactgtctctcagaccacagtgcaatcaaactacaactcaggattaagaaacttaatcaaaaccgttcaactacatggaaactgaacaacctgctcctgaatgactactgggtgtataacgaaatgaaggcagaaataaagatgttctttgaaaccaatgagaacaaagacacaacataccagaatctcttggacacatttaaagcagtgtgtagagggaaatttatagcactaaatgcccacaagggaaagcagaaaagatctaacattgacaccctaacattacaattaaaggtactagagaagcaagagcaaacacattcaaaagctagcagaaggcaagaaataactaagatcagagtagaactgaaggagatagatagagacacaaaaaacccttcaaaaaatcaatgagggccaggcgtggtggctcatgcctgtaatcccagcactttgcgaggctgaggtgggtggatcacgaggtcaggagatcgagaccgtcctggctaacacagtgaaaccgtttctctattaaaaatacaaaaaattagccaggcgtggtggcaggtgcctgtagtcccagctactcgggaggctgaggcaggagaatgctatgaacccaggaggcggaggttgcagtgagccgagatcatgccactgcactccagcctgggtgacagagcgagactctgtctcaaaaaaaaaaaaaaaaaaaaaaaatcaatgaatacaggagctggttttttgaaaagatcaacaaaattgatagaccgctagcaagactaataaagaagaaaagagagaagaagcaaatagacacaataaaaaatgataaaggggatatcaccaccgatcccacagaaatacaaactaccatcagagaatactataaacacctctatgcaaataaactagaaaatctagaaaaaattgataaattcttggacacatacaccatcccgagactaaaccaggaagaagttgaatccctgaatagaccaataacaggctctgaaattgaggcaataattaatagcctaccaaccaaaaaaagtccaggaccagacggattcacagccgaattctaccagaggtacaaggaggagctggtaccattccttctgaaactattccaatcaatagaaaaagaaggaatcctccctaactcattttatgaggccagcatcatcctgataccaaagccgggcagagacacaaccaaaaaagagaattttagaccaatatccttgatgaacatcaatgcaaaaatcctcagtaaaatactggcaaaccgaatccagcagcacatcaaaaagtttatccaccatgatcaagtgatcttcatccctgggatgmaaggctggttcaacatacgcaaatcaataaacgtaatccagcatataaacagaaccaaaaacaaaaaccacatgattatctcaatggatgcagaaaaggcctttgacaaaattcaacagcccttcatgctaaaaactctcaataaattcggtattgatgggacgtatctcaaaataataagagctacttatgacaaacccacagccaatatcatactgaatgggcaaaatctggaggcattccctttgaaaactggcacaagacagggacaccctctgtcaccacgcctattcaacatagtgttggaagttctggccagggcaatcaggcaggagaaagaaataaagggtattcagctaagaaaagaggaagtcaaattgtccctgtttgcaggtgacatgattgcatatttagaaaaccccgtcatctcagcccaaaatctccttaagctcataggcaacttcagcaaagtctcagtatacaaaatcaatgtgcaaaaatcacaagcattcttatacaccaataacagacaaacagccaaatcatgagwgaactcccattcacaattgcttcaaagagaataaaatacctaggaatccaacttacaagggatgtgaaggacctcttcaaggagaactacaaaccactgctcaacaaaataaaagaggttacaaacaaatggaagaacattccatgctcatgggtaggaagaatcaatattgtgaaaattgccatactgcccaaggtaatttatagattcaatgccatccccatcaagctaccaatgactttcttcacagaattggaaaaaactactttaaagttcatatgtaaccaaaaaagagcccacattgccaagacaatcctaagccaaaagaacaaagctggaggcatcatgctacctgacttcaaactatactacaaggctatagtaaccaaaacagcctggtattgataccaaaacagagatacagaccaatgtaacagaacagagccctcagaaataataccacacatctacaaccatctgatttttgacaaacctgactaaaacaagaaatggggaaaggattccctatttaatgaatggtgttgggaaaactggctagccatatgtagaaagctgaaactggatccctcccttacaccttatacaaaaattaattcaagatggattaaagacttaaatgttagacctaaaaccataaaaaccctagaagaaaacctaggcaataccattcaggacataggcatgggcaaggacttcatgactaaaacaccaaatgcaatggcaacaaaagccaaaattgacaaatgggatctaattaaactaaagagcttctgcacagcaaaagaaactaccatcagagtgaacaggcaacctacagaatgggagaaaatttttgcaatctacttatctgacaaagggctaatatccagaatctacaaagaactcaaacaaatttacaagaaaaaaccccatcacaaagtgggtgaaagatatgaacagacacttctcaaaagaagacatttatgcagtcaacagacacatgataaaaggctcatcatcactggccatcagagaaatgcaaatcaaaaccacaatgcgataccatctcataccagttagaatggcaatcattaaaaagtcaggaaacaacaggtgctggagagaatgtggagaaataggaatacttttacactgttggtgggactgtaaactagtacaaccattgtggaagacagtgtggcgattcctcaaggatctagaactagaaataccatttgacccagccatctcattactgggtatatacccaaaggattatatatcatgctgctgtaaagacacatgcacacgtatgtttattgcggcattattcacaatagcaaagacttggaaccaacccaaatgtccatcaatgatagactgtrttaagcaaatgtggcatatatacaccatggaatactatgctgccataaaaaaggatgagttcatgtcctttgtagggacatggatgaagctggaaaccatcattctcagcaaactatcacaaggacaaaaaaccaaacactgcatgttctcacttataagtgggaattgaacaatgagaacacttggacacaggaaggggaacatcacacactggggcctgtcgtggggtggggggaggggggagggatagcattatgagatatacctaatgtaaatgacgagttaatgggtgcagcgcaccaacatggcacatatatacatatgtaacacacctgcaggttgtgaacatgtaccctagaacttaaagtattaaaaaaaaaaaaaaccacggtgagacatcatctctccaaaacatacaaaaattagatggacgtggtagcacatacctctaatcccagctacctgggaagctggggtgggaggatcacttgaggtgaggagatcgaggctgcaatgagccaggattgtgccactgcgctctagcctgggcagcaaagtgagatcctgtctcaaaaaaaaaaccaaaccaaaacaaaacaaaacaaaaaaaccctaaaacaaaaacaagaaactttctgagtaccaacatgatgctyaaaggaaatgctcattcgagcattttggattttggatttttggatttgggatgcccaacctgcataaactttaaagaatccttaaataaagttatatgctgctaaaactaactgcctccttgccacaytcctaataaggttctacatcttgcagaaatttttaaaagcctgatttagggtgtcagacctgggttcaaaatcttcgtcttctactcaaaagcaatctgatattggtgagcttcttattccatatctgtagaatgggataggggatggtaataataatcccatgtaccttgcaggatttttgtgaaactggataaggtcaggtatgtgtgaacagcaaatggagtgtctggcccattgtagctgtttagttaataacatttcctgttgtgacttgatatctggtttgagattctggcatcctgtaactcctcctcctcaccagccctgccctccatcagcctggtcccctgtacagtgtgacacctactcagtaattgcccatagcagaaacagactcaccagctgttctagagctggctctccctggtcaaagcttcccatgcagcaagtgtttcataatcagcctgttcctgctgccgtctgccacttttcccccgaccttcctggccatcccttgtcccttcctgggcaaaagcatctaaccatgtggtatggtggtgtcacctgagtgtggtgtcagcaaacccagagctttccaagcctcccatgatgagtctatgacctggcgttccctgttccttctgatactgttttttctttctctggaactacattggccaaaacagaaaacagggagtcagtaaggtttatcaatatttcacttgcatagccgcagtcttaagttactgaaatgacaggttgatccagtgaggaaaatcaaacaactatcaaaaagaccagtcaagtcattgtagaccatgacaaaagaccctcagtaggaaaggaaaaaatgcctaacaccaagaaacrtgaaagtaaaaagctctgaatttggtaaaagtgaagtaatttctataaatgagtcatattgtatctaggaaattaggaaaatttcagaaaagtttttttaaaaattcaaatcaactttaaaagctgatatccttttttcttctaatatctttggcatatatttgtatacacatttcaagtatttaaatgaatgaaattggaatttttatatatagttcttttcaagtaaaaatgctaatgtaatatttatttttaaattttataagaagtgttttattttttacttaaaatatgagactttctcatgacaatatatattcttcagaaacactataattaatgtccttgtaatgctttcttgtttggatagttaataatgcattttgtcatactatagctactcattttggctgtcttcattgttttgctactttaagtaattctatgaggtcaatccttgtacataaagctcagttcaaatctctgattatttccttaggataaaatccaagaattggcattattaggtcaaagagcataaacaagtatttttttctattctttgttttgaaagtgaattacaaagaaatcctctcttaaaagttgctcctttcatttggttttattctacagattgcttctttacctccttctttgtgtcaagaaccwtattaaactatgtgaattcctctctgttgcatctttaagagagagttgaggtctcacttcctcccagctatcctctccaccacccgccatctcytcagactgagacaagttcccttctctgctatcacccacacccatacatcygggctctcatagtactgtcatagcatttatcatgctgaattctaagtgtctgtttggttttattttggcattagacagtaagtgccttgcgggtaaggactatattttattcatctttatttctccagaaaacaccgartactttgtacatagtaggcactgaatgagggaacaaggaacacagaaccatttagtcactacacacacacacacacacacacacacacacaaccatcctgtcctatattattaaatacaggagatagaagtgtgagggagaaagagggtcatcttcattcagtaatatgcttgtattttctcagatatagatgtatggatgagatatcactttttgatatgtgtccagataggccagatataactaatatcaggattttatcaggtcattgggaccacagccttcctggaaacatagctttagagtcagttttatagtctgctgagcccaaaacaagctagataattaataatattattggatcaaaatggcccaaaatctgattaggggttatttatcctacatgtacatgatagcatagtctttattttgtccctccaagtgagtttataagtgactgtgttctgtttggatggaaaatatcatctggaaataatttatgagtaactgcagaacytgccaatggcatgctttacaagggcttatttcattcacttccacgtatatcccataatttcctgattttctcaggttcttttgtgtaaataccaaattgaccttatgtttttgtccgccttttccccaggggcgatctaagtgtcaggatggtgttattgacctggcatctgcgggggcgacccagagtttccatgacctgtggttggaaggcccactcattggggcactgaagctcctgagagttactgttctcactcaatgggaggccagcggttctcagcagttttctctgcttcacaccagactgtccagttagcttcttattcagccattgcctttccatactggagcaaaggtttatgatttattaggctattcccaggaaagcaagttctatgtcttctgtgctttgagctccacataattcttggagatcctcacatcaaagactccctcttggttttcctctttgtctcccttgcatcttcctctactcacacccctgctgtctggccagccttacttatcagggagagcaggaagagaggattcatgggcaggaaaactcactgtttgctccatcttcgtagtcctggggtgtggcccaaaaccttggttgatagatttgtaaaaagacctttatcttgagaatattgttgctttgtgaatttccacagtctccttgaaattcaaaagctgagcrtaactatttctttttctttgcatttcagccatagcaatcctaatagcccctaggacaatgagtgtctcaggctgaatggaagagggtcatatacatgcaaggggatgggaatttaatatctctaaatatcatcctaccaacacatgtatatgtaaatagatttataactatatggtcatttatataaggataacctaataatatcaaaggacaggttcattttaaattaaaactatagggaagagtgttgattctacaccaataacaaaaaggttaaagaaagtgtaattctcttttaagtaccagatgcttcagactgtgcctctcattttcagccttcttctccccttttcctgtctctgcctttctcctctctgccttttattgaaaggcaaatgccccttgtaataaggttcaatttcagaagttcctgttataccccactcccatagcattcataaaaaaagcagagaccgtagttataatttgctgggaaccctaaaagagaagtgagacaactcactgaagaatcctcaaataacacgaagacgtgaaaaaatatagctggtgcttctctggcttatgtaggaagaatcaaagcaaccatgaaattaattttatttaccattaaaagatactggacttagaattcaggttgtgattatgtaattataaattaatttcagtagcattgtataatctgaaatgccagcaatagttatgagaagtatgttaatgaggatcagaaaagcttgtctgcttgaatgtacctcaaaatagtcatgcccagagagtatatatgaagcctcctgcagcaagtggacccactgtggtttcctaagactctccaatgcatgtgatcagtttactaggaagcagctctctttaatatgttcatacttaacagaaaaggaaggaccagaaggttgcccataggctgcacccaagtgtgaaataaacattattattacagcagttgaaatgtgaagttgaagaacattttaatttcaaaatagtattcatgagaatcagatgacacatctatactttaactctggtgaagtgtgaaaattaaatgaacactccrtcagattctgaaagttgaattatgacccccacctccctcactaaagagatattttttcatatttagggtggcatacctcatttgtggaaaaggtctttctggcactcatcccctgtttctcaatttattgtagccatcttattaatcactgtgtttgctggggaagagccaaagtatacctaaatctagaattaaactatatagcactagggtttaaaataatagaatttgtcatcaagttgactgcctcatattcakccagtgtcaaactcaatagttgatatgtttgcttatgcaaaaatatcagagaggaaaagaaaattttaatttgtaatggatctatttctcataaaatgtcattcctgccgctctgctctttagcacatgatgaggggaagctgaggcagcttctattgtaaaggaagacccaaggaggtgccattttaggggaccttcagtctccacccagttcaggggattcacatgagcctccctgcatatatgggcgtgtcccatcactgcttcttctgcttggaagcccacaaagatggtttgctatcctagtacctcaggtcttgatggaagaaggccttggtgtgttcttaattatatcctttgcctcagatgttttgttgtcagtgtttcactcttcccagtcaggttttagggctgctaccagtctctccatgaaatagaaaccccctaatgtgctgttctgctgaacttcctcattgactgaccttgtactatgatgtctttcttcctggggtcagtgggtacgggataaagcctctaagcagggttgcccatatggttgtgtatgtttggattaccccacagctctggacggcaccattcacactgtggtcattgtcgatttaaatatgtattatggccattttatggagatggtagtaaagggtcttgatgaagacatacctttttctggtttgcacacaaaaaattaaacacaaggtagcaatggcctgccctgatgttgaaagcaagactctggcaacaggctaggtgggttctaccccttactagctgtgtgaccttgggctagtcacataatctcagttttatcatctgtaagatgggaataataatagtacatcataggctattaggattaaagaaattatgtatgccaaggactaagtacagagcctgacgcatggtgaatgctcagtatatggcagctgtcacaatgtggcccatttgtgtccttccatatagatagatcattttccaatttccaattactttctacacatcctctcttaacataaaatgactttcaagcccattactacaagacttattacaggggacctatggacttgtgatttgaatcgtaattagtattaatttaatagtctcttcacagagttagactaatatgtcaggtgacacagtgtcttagcccagccacacacattratatgactctgatgatggcctgcctctcagtgaagtcagagcagggggtacaaggactcaggcaatagacaagagagaaaagaaagattaaagcttactgtttatagtgttttccacacaaggtatcatccctgacaagtctttctatgccatggcattgattattagaagaaagactcgtaaaaacctctaggcaggtcagattttggcagacttaaagattatgcagacaagagtaggggtcrgggagtcttatctgagagctgccgggtactttatstgtgtttcaggacagggctgaccacagtgttggctgtggaaggtgggggctggaaacctctgctgacagtgatcttatctttcccatgtgatagtttcattaatgactgccttcacctgctctttttccagtatgttgcactccaatgtaatttctgtccgttatcaggccttgatgtcatctatgccctgaaattgtgttattgaactaacactcattgtcaaacctttacgagataaacctattttatttctcctcatcctaaaaatgtgttgattctcctgtgctgtgtataatgaatggccctttggctgttgtaacaccttcactgaaatccttgaagtgtgtgtgtgcctatctctctatgtctcgccccctttcgcctcctccccttcctcaccccttgccaccccttccttaccctccccaatctctctctctctttcctaaagaacaaaaatggcagtttcccttattctcatagaaaagactttatgtcacagaagggagctgctattagcataagcagtctggcattgtgtgggtgagtgtccatgtgcattatcargcaaggcttataaaccatgttaattccacacaactttctctactccatccagcttccaatccgtaccccacaacataaaaagtgacatcactcacttaagaaaatgttgcagtaaggtggattttcataaaataaggattctcaggactccaatttttaaatcatacctgtgtgcctacagaaaggttggaggggggcaagggagtgaggatcttaattggcacccaaggcagaatgtttgctctgaggagaaggattgagtggcactacttaagagatgcagcaaggcagtgcagggagagcctaaaagcagctgaggctctcaatgtcacccagacactgatggacagtcattgatatttgaatctgaatctgaatgtgtactatcaaaaaggctgctgtcatcattgtcaccactattcctctgagtccttttccatctctaccatcttactctctgtaacgggattgtaagttctatattttgttttatatcttgtatactttgcttgatgcagtaaatatgctactgaaacactgtgaataagtaaaacttcacctgactgcaacatttaaataacattaaattcatctgaatacagaaaaatataaagaagaaaacaaaaaggtctaaaatcctatcaccaagatagccctgttaatatttgttaaaaatataagtatgtgtgtggacatgattagagtgtctatatttgcatagtataaggggtaaattatactagtacaattaataggtataaattgaaaagcacctacatttctttcgctcctaccccaatccttagcccctccctcagcattatgtctgtgcagtgtacaaagcactcttataagaatacagcaatgggccggcacgttggctcacccctgtaatcctagtactttgggaggccgaggtgggtagatcacctgtggtcaggagttcaagaccaacctggacaatatggtgaaaccccgtctctactaaaaatacaaaaattagcctgggcatggtggcgcacgcctgtaatcccagctacttgggaggctgaggcaggagaatcacttgaacctaggaggcggaggttgcagtgagccgagatcgcgccactgcactccagcccgggcaacaagagtgaactccatctcaaaaaaataaaaaagaatacagcaatgactaaggcatctccctggccctaaaagggagtttcagcctaatgggtcaaagaatcataaataaggcatataaatagcatgatatgtgatgtacagtaagttggcagctggcagccatgagatgtgatgccaacattaccctcagctgctacaggtctctgttgtcatcccttccctcctccgcctcacctaactagccacatgaccttaaagaaatacctgaactgtctttacccattttatgcatttataaggtagatgtgataattcctccctgcctgatctgatgagctttgagaatcgagtgccagaatgggtaagaaaacacttcacgactcataaaacagaccagaagtgtaaggtttcattgtcawctttattgttatacaaaggggtactatgaagaatcatagtaatcttgggcgttaatttaatagaaagcccgggagcacagggtcaccaacagcccagatttgaccaacagctgcctttcgcttggcttgtactgctttttaaaagaaaagttgctaacgtttaaaaatcaggagagttcatacaaaaaagacttcccttgaaaaatcggaggaaacattcacagtggacctgcattcctacgcggcagccattttcgttgctgaggaactgctttcccctgagcacgtgttctcccatttgtcacaagcccccccgactcccttttgtagccccaacactgaaacctgatgtcagtttcacttgtcatcatgcttgcccttccttagagccagaaaatgttttagaacccaggttcccatcaaaagtagcagggtaaatagctactccaagaaggccaagatttttcttataccttacctgaaagcattggagtttgcaatttcaatttaagatctgcagaatattcaagctgaaaggggcctggaggttaattaatccaaacgtcttgtttttgagttccagagaggttaagtatataataaaatgtttagcattataataaaatactttagtagggtccatcattttctttccttttttttttttttttttttttttgacgcagagtctcactctgtcagccaggctggagtgcagtggcacgatcttggctcactgcaacctctgtctcgcgggctcaagcaattctcctgcctcagcctccggagtaactgggattacaggcatgtgccactacacctggctaatttttgtatttttagtagagatggggtttcaccatgttggccaggctggtctcgaactcctaacctcaggtaatctgcctgcctcagcctccgaaagtgctgggattacaggcatgagccaccacacccagcccatcattttcattattactaaagtaacaattttggattcccaggttttttagtcatttagtcattcagtacatatgcattgagcaatgtaatcagggataagacacttggggtttcatggaaaagaaactttttatcatagtgctttgtatactatacaaactcataatgctgggggaggggctgaggattggggtgggcgtgaaggataagatatttgaggtttctgagtcccgttttcctcatctgcttagagggagaatacctgccctccccactctgaatgtttgaaaatcaattgcaagtatgtttgtgagccacttagtagagtttatagtactgaacaaatcgttattacaactttgttatgaatttaactgagaaagttttaaaagtatttataactaggaatctaaaagatgtctgagataccccaagttacataaccctcattaggatttacagttttctcaagctctacttgtcaaatgaattaattgtctaatattatctaagcaaaatacttagttaagcttagaataacttttttgtatactgttactttgtctgcattccagaaattaaatcagaggggagaatgttggtttacaggaatagactgatacataatttgcatttgtgtgtcttccctaaggaaaacaataattattagtccaacacaaaaacatgcccattttgctgaagtacatattgagttcagaagtggacacagattgtcctcataatgaccaytgtaatgtacctttattgcttcacaaggtgccatggctttggatggtgtggtgaggatggaagccctacccatatgttatttgcactggaccagaatcttggatggaggaaagaactttggacatatctgggccagaagttctctccacctaccaggagtgagcatgggagcatgagctatacatgtacaggagggtcatcgtgttttcatcagggtgtaaagtgtattttgctacatctgatagctctttttatggcaatagctggacaatggtgttgtccattgtgtactgaactgggctgacctgtcagagcaagactttagaagcttagcattatgtcaggtcaggacattatgtgtgaacgcttattcattcatctattaatttgcttatttagcctatgttgggtgcttttaatattctagacatcagcattgtagtgggaaaatccaaaacttctgatacggtttggatctgtgtcccttcccaaatctcatgtcaaattgtaatccccattgttggaggtggggcctggtgggaggcaactggatcctgggggcggtttctcatgaatgatttgtcactgtccttcttggtgctgttcttgtgatagtgagttcttgtgagatctggttgtttaaaagtgtattgcacctccccccacccacttccttctgctccagctatgtgaagtgcctcatgcctcctttgcctcctgccatgattggaagcttcttgaggcctccccagaagcagaagccactatgcttccagtacagcctccagaatcatgagccaattaaacctcttttctgtataaattacccagtctcaggtatttctttatagcagtgtaagaatggactaatatatcttgtgaagtttatattctaaagggaaagactgacactaaataaataaatagtctaaataaataagcaagatatctacataattgtgtgttgtaagggcaataaacaaagaggaaatacaatccctgtcagaaaaggcctctctgaagatgtcacatttgagctacaacatcttcatatgggtcagtcaaccaatgtcaaggacaggagaacaagccaggcagagagaacagcgagtacaaaagcccaaagatgacaaaaaggttggcatgtatgggcaacaggagggaggccttgagcaaggaagggagtggtgtgacatgatattagacaaattagctaggggccaggtcatgcagsacttgccaccattgtttctcacctggactactgaaatagcccgggggctaaaatgacagtggttgggactggagtcaatgctgtgagaacaaactggaagggtttaagagatattttagaggtaagagtaacagaacttaatgatggactgaatgtcaggaaagaggaaaagagaaaaattaaggatgattcttaggttctggcttgagcaatggagtggattatggtgccattttctgaggcttaaaagtcaaataacttgccaaacctcacttagctaggacattgaagtctggtccatgtgaattcgctttttttttttttttaagctttttgggtttttttttaaacccatgagataaggttattaggttaaatttccaagatctctttcagatttgcaattaagttctcatctagattaaattgttaatatggaaatatcctgaggttcagaattaagtaacattgtctggccctggtatttttgataaatatagtgctatgatggaataaatattttatctcagaactaatagccagaattttgcaagtgttttgtctcaagcataaaaagaaaatgattttttcattttctcttgggcataatgtcttttctggagtttcccagcaacaagcagtttgttctgtcaagtaagatgagattgtaaactatctgttataatcctgagctaaaactgcaaagcccaaacagtaagttttttttggtgtcctggtttgtttcagatcattcttaagcctcccaccccagtgctcagcattgctttgcacgtattatttctccagaaccacacaaacctcacccaggataggggcaggtttcctctgtagagacaggaatggagacatttcagtaattcagaataccacctataactcataaccctgccatctggggctcacccattttggccaggtctaagattctgttgctaacataggcaggatagtcctgaaaacttcaccatgaggtagatcttaatttacccatagaaacagtgggatttgtttgtgacaaaggcgggtcatcgatcttaagtatgttcaatagcatgtgagtacagttggctcttcatgtccataggttgtacatttgtggattcaaccaaccacagatcaaaaatatttttaaagcaataaaaaacaatataacatcatacaaattaaaaaacaatataacaactatttacgtagcatttacattatagattataagtaatctagagatgacttaaagtatacaagaggatgtacataggttatatgcaaatactaagccattttatataagggacttggccatccgtggattttgctatctatagggggtctagaaccaatcaccagcagatcccaagggacaactgtgtagctwaacagccacactctaaatctctcatcaaattcagatattacagggaacaacaacaacaaaaaattcaactcaaaaagtctcaaacaagaaaggcatttattgtctcattgaacaaggacagggcagctctaggctggctcagcagttccctgatattctccaggactcaggctctactgtttacctctgtgctctaccatcctgcacttgttgccatgaccctaagggatatcccttcatagctgcaagatggctgccacacttctgggaaacacataggctagcactgggccaaataaacagtcattgtctgttctgtgtctcttttagtggggggggaaaaaaaaaagcctttctcagaagcccccagcagacttttttgagtcctcgtccatggaatgcccagtttctcccatctagatatacgggtattatcctaaacttctcccctcatcctttattctcctcagtttctatgagtgatccattctggtttttaaaaacctgtcacaggagctgggcacagtggctcacacctgtaatcccagcactttaaaaggccagcaggcggatcacttgaggccaggagttcaaaaccagtctaggcaatatagtgagaacccatctctacaaaataaaaaataagaacctatcacctaccctctatccctatatttrttacattaattcagatcctcattaattccacctgttctcactgctcccaatttgtctatcttctgcattgcccctggaatcatcttttaaaatatgaatctcattgtgtcactatcctgcttaaaacccttcagtgattcttaatcaaatatgggactaaattttattttatttttctagctgcaagaatgcctccttctcccttttttaaaaagaaatcttgcgtggcagctgacttgttagctgttaacacgtggaagcagagctgtcctagttgaaatgcggctggggaaggggcctttaactcagccagctggattcctccccttccctctcatggaggccctaaagcctttccttggatcccctggagtacaggcaaatggaaacgcctactaggcagttggtgtagacctcaggagtgtcaaccagcctaactgcatagacttagaaagtgtggaagccaaggtcggcgacatgctcacctagaaagtgcagagtgagaagagaagagagtcctatagagagaggactccaagagtgatgctgaagtaatgcctacaagccatgtaatatcccatgaagcaatctttctattttacctttcaaactctaagactgtgccttataggagaatttatgctatgattgtgtaggataatttaattcaatcagatgtttggggacaaagtgaggatatgttgaataccaaaatttcagtttccaatataaaaaaaaaatcaaaaactggtaacaacaatttctaattgtgtggattgtgcttttgcttaattttcattcttatagctttttaaaaattgttttgataatccatgaaattagtcttttttttcccccaaggccttttgtattagaaatcctgtgttaaccaacatttcatgtgtttccatatctgatcaaggcatttttagttaaataagcttaagaatggaatttcaagcagaactataataactgattatattatgatagttattttaattctctctgctcttgatatcaacctgtgtttattctttatgtctatttaagaattcagtgttgttgtttttttttctgttggtgggagtctaaattagttcaaccattgtggaagacagtgtggcaattcctcaaggatctagaaccagaaataccatttgactcagcaatcccattactgggtatatacccaaaggattataaaccattctactataaagacacatacatacatatgtttattgcagcactattcacaatagcaaagacttggaacccatccaaatgtccatcaatgatagactggataaagaaaatgtggcacatatacaccacggaatactatgcagccataaaaaaggatgaattcatgtcctttgcagggacgtggatgaagctggaagccatcattctcagcaaagttacactggaacagaaaaccaaacaccacatgttctcactcgtaagtgggagttgaacaatgagaacatatgggcacagggaggggaacatcacacaccagggtctgtcagggggtgtggggcaaggggagggagagcattaggacaaatacctaatgcatgtagggcttaaaacttagatgacaggttgatgggtacagcaaaccaccatggcacatgtatacctatgtaacaagcctgcacattctgcacgtgtcccagaacttaaagtaaaattaaaaaaaaaaaaaaagaattcagtgttttttttcaagccagcaccatggcatgcacctgtagtcccagctactccagaggctgaggtgggggaattgcttgagccgaggaatttgaggtttcagtgagttatgatcacaacactgctccctagcctagatgacagagcaagaccctatctcttaaaaaaagaaaaaaaaaatcggtcttttttgttgttccatgaaaactaaagagccatttagatacagttgacattcttgttatagaatatgaccttaatgaggaaggaaacgttaatgaagactaattagtgcataattttaacgagggagatatgtttgagtcaagagctgaatgggttgtgcatttcagcaggtatttgcatattgagtgacactgtcaaaaaggaagaggtgaacagaaaggagctggacagggcaggctccaactagaccagaccgttcaactctgtttgcttttatccattcccatgtcaaaaaggatttgagcagagcttgtcctttgtgtcttgtgtgggcttcaggcaagcacgtcttcaatcttgctttcttctgactcgaaccaccctctccctaggcctcagttctgtcaacaccagagctttctctgcttctgtctttatggtctgcctccatcacaccctggagtggacctgtttctggccaccagtctttgctgtcagactttgtataggcaagctcaacctgtcctgacatcagcagcttcctcatgctccacatgattcagctgttggcatttctaggccctcctagaaatgaggagcccaccgcacacccccatccttcccacttccaactgggacttcacagaaactcagcaccaagcagaagccwaaagtgtgtatcagttgactgaaacttcaaacgattttgtttctctcctaatccttttaaatgtgatatgtgtttaagagtagcagagacaaagtgatttaggaaaattataatgttatcctagcctattttagtgacactctaacatggttaagaaaattgactktcagatttgatcattgttgtcgaagtgaayagccatcattctcagagtggctgragtcaaattctcacccagcagaagcaattttaatgactgaagaatccagttaccacaagaagcaatggaacctgaatgcactgctgacctcccgcgttctctctctcttctatttttcaggcacaacgtgtttgattgctctgctatcagataaagacctcactgtggccaacgtgggtgactcgcgcggggtcctgtgtgacaaagatgggaacgctattcctttgtctcatgatcacaagccttaccagttgaaggaaagaaagaggataaagagagcaggtgagcttgtgaacacctccaagaaatgtctgctgtcttgctggtgaacaaggcggcttgcttggagagctcctggataaaatgtccagttatgcagtattagagaggctgctactgaggtaactgagattgactttgtaacattacctatcaaataaatggccactaaatctgtcttccttcatagccaaagattccaaaagaactaaaaagcccatttccagtttaaaggctaataagatctttgggccccgggttctcacttttctctagcctgttgctatatgctgcttccctcggagccacaactaactactaatcattcctaaaaagaccttgtttctgatacctctgtgcctttgcaagtgctgttctgggycacaattacttgtcccataaaactcagtttaaggtgttcttttggaagctttccatgtcacactgtggcaagggccttcccattctggggtggatgcccctctgcctttccccagcatcctatgtggacgtcttgggtcaccttttacaatacatggacatacctggctctcctatttgccttgccttccygtcacctctttgaagacaggaacttggttttgttcatctctatgccttgagcatttggcttagtgcctggtataagtaaatatttcagagcaaggttgggggtagaggggtcccttattcattcattcattggtttattcaatattttaggagctggggataaaacaaaaccccattctcaagctttcatgaaacttacattctgaaattggcatgggggtgaggaatggagtaaatagacattaacaaaaaaaaatagtaaaagtaagtcattcatatagtatattagaagttgataactgctatggaaagacatgaagcaggtaaggggagtgtcagggagttgcagttttaagtagtgtggcctgtgtgggccttgctagagtgatgtttggacaaagactcggaggataattatcagttgattattacattttcataattcgatttcagagaatacctttatacctatgtaagggaagaattctgtaacttttcagactgagagctgcaggatgtatgctcttcatgatgtgccaggcagcaggccagctgtcagaggggagcaagcggggtgctcatgtaccctagtatctgaccaggatgggcccttgctgtctgggttaatctgcacattgactctcgatctctacaggtcagcttctgcccagtgaatgaactgaatgaacctaatcaacattttagttttcacagtagggaaccatactgttaagtcaaaatgtgttgaattttattacaatctcctgcttcagtgactgcttgagttgcaaaatagtttttaatgaaagcattggtcaggttttctgttgatgggatgaaacgaatgatattttaggagcatctatcaagctttgatgacctccaggcagtaggagcaaagttctctggcttcctacttgtaaaacaccatctgcctgtaggagtctgctgtgaaattaagacacagttagctcagtcttgcatcagcatcaggcaaggatgtgtacacaatacacctgcaaatgtcatcttaccattcagtgctctcttttgaaatatcatggccattttatgcttcctcttcttccctgtcatacccactacccacgcctgcaccctatgttgattctttgtagaagcaaatttgcacaccgtctccaaggaggttaatctaacctctctgttcttttacataatttgatcaattgcatattttacacaaggcttaagaaacagtgattggttttaccatcttcatgtgtgttttctctggcctcagcctcttttcaggacatctttccccctcctgcttagcatgacagtaaggtccagccagtctgggccaaatacatgtctttctgtcgccactccttatactgtttccaacaacaacattagctgtcatttattgtgtgcttatcctgtgctggcagcaaagcctagcactttacacatacactttctctttgcctgtcttaagaggttgataatattattctcattttgtagccaacaaactggaacttcacagaggcttatgtgcccaagcacacacagctagtgaatggtgagaccacagctgaaacccaggactgggttttatgctcttgcctactagaccatgcttcctggaatgtcctcctacatatcctgcccatagatgtttcacccatcgctcaaagcccacctttaatgttcattctaccctcatgatcagaactggaaatcatccctcccttctccatctgcctacagcatttagcagacactggtctcgccctgaagaataccactttgtgcttattgtatttaatactttttgtggcttaattctcctgccaggctgtctacttttttaaagaaaggtctggatcttgtataacttcatatcctgcacattgccttccatggagtaggtatttagtaaatatctgacaaatatgtggatgaagaaaaaaataatagatacaattgttaagtgcatattatgttcagggactgtgccaaatgacttatgtggaataagaccttcatttctcaacaacccaataaaatagatactgtctctattttgtagccagggagactgaggatcagagaaagagtttctcatccaaagtgagacatggttagaagagacagagccaggaatcacattcaagtagtctgacctgagcctttaatgactatactagtgtgtgctttttcttaatcttgatcctatttggggggacagagctgttttgagacctatataggcacacttacgagtggcctcaggccaaatgatatatacggtgcctgttcacctgcctttcagcattcctttgccactctcctcaaatccctaccctcatgctctctactgtcaatcactgagccaccacggtgttaagttaaaaaccaatgccctcccccatatgtatccgccaccttcagtactcttattgatatattattgaaatccttcaagatgccaggatgagggtatgaggatcaactggtagagtataaaaccccaggccatgcagtgggtcccaggagtgatggggttaaggggagtgcccacagcccagttcacatgaagtaggtcaccctgttgcgcacgtacctagactatcccaggtaagtgagatatcagctggtcaaactaatgggctcatcctgtctttctaggtggtttcatcagtttcaatggctcctggagggtccagggaatcctggccatgtctcggtccctgggggattatccgctgaaaaatctcaacgtggtcatcccagacccagacatcctgacctttgacctggacaagcttcagcctgagttcatgatcttggcatcagatggtctctgggatgctttcagcaatgaagaagcagttcgattcatcaaggagcgcttggatgaacctcactttggggccaagagcatagttttacagtcattttacagaggctgccctgacaatataacagtcatggtggtgaagttcagaaatagcagcaaaacagaagagcagtgaacccttcaggggtctcagctgccttagactaaaggactttcaacacactggtctcttttaatttagtgaaaagtgtgggagttgtaattaggatcatccaccccagacatggaatcccccctccctggtggtcttaggtctataatcagtgacgaacagagggtgcccttggccaatgtagttaagaaactggaaaatggtttcttcatgttttcccaactctttcatccagtgtccaaaatatataagtaaatagctgtagagtcacatatatgaagtgaatagcatatgtgtcatttagtctccctgaagattcttttcaagatcctgttcasggtcctccaggcatcagctgttgtgtcctctctttgtaacagtggacaggacagaccacccagtgctgcaggagacaggccactgcgtcacctgtgagtggtcaggggctgatgtggcaacaccctctgccaagagacagagctgtcctgagaatgctttgtccttctgagcccatgttttctgctcagtagcagcttggaagcagatttggaatggtttaytattttggctgctcttggggactgcgagaagcagagagaatgagagaccagtggcaactgcctgcacagcagagataaccctcttcccttgcttcctttaatagttaaatagactttgtataccacctgaccagcctttgtgcatttatcctaatcatgcatgaccgttaaccttttgcttagtccttaccatatgtaataggcagctgttaaattcaccaacagataccctgatttttcatcttacgtgaccaagaaaccacgttaggggaaatgaaaaaagcaagccacaataccatgattccttccattttcaacagtagatgaaggaaatgatactgaatgagtcacagtgttccctggcaagtaagctgtttgcattgagaaaggagtgagctggtgaggttaccaccctgaattgagctccagctgccagtttttgtgtttttccttgcccctttccaagtggttttcaagtgtcaggcagtgttctgagaagcagcagcctataactgtatgtgtgttccttgaagccaggtgcagagttcccagctactgcagcttgggatttggtgggaaactactgggataagcttctccttgacaatggaaaggcagcagtcttcaacatttggttgcaaatctccatccacatcagggagctttccccaggcaaatacaaaccgccccgtggcctgcaggcctgcaggggaggcagcaaagggacctggcagttgcaacacagtaagtcaggaattcaagcgtgaacccatattgataagtgggccagaattatttaggggcctggcttgctgctctccatttcctgtatcgctaatttatcatttttccaaccttggtattttatattatttagagaaaatgctgggtcactctctttgcctaaggtgactcaaacagccaaacgaaacttccgttgcctcccagccctctgtatccacctggttttgttctttccctgtgagcatttgtggttatagcttcccatatgccacattcaccggccacctcctcrccgtggaaccctgccctctcccctcctgctgctgtagagttttcccaaagcagtgtccaggagagaatttgagagagtgaagaaattgccttgtagatgtggagggctgcaatctgtyttgatttctccaagcacttaactttctttgactgcactgakaattgctaatgatytcccatgagatttgcttacttttgtatactgtattttccagcattacagaaccttggttattgttttttagccatagaatcttctagtaaaaaatatctgccaccattttagatttaagcatttgcctatggggagacactgaatatgtggatgtgtgtattaatatttggggtggggacagggaagggaatgtggaaaacaaatgctggctgtgagcagtgctgagatggccaggccaggcggctgagtttgcttggaaattcaggacattctgactcctaagagttgcccccacccaccatcaaactgaaatcagcaccaatggtgtcagcactttacagcccatagccaactttctttatttttaacgtagcacaaaaatgtataatagcaaggaaaagacatttttaaattccggttatttttattgtctaaaatgaaagcaacagtgttttgataaagatgaaaaagaaaagctactaaattagtaaatcagtggttacgtgccctgcagaatttcttaacagatggtgctgagtgcacgagttacataactttctctctaattgaggttcacaaggcgtcttctaaattttgctttgtacaattaattcatttctgatgttaaccaaatagagtgtatatatcctactcccattactgcctctttcccccctactatggcttgtagattttcaaaagatagaagttctaggcaaaactgtagcagtttcattaatagttgttaggatagttatatctaaaatcagagtattttgttcccttccttctggagctctctctccctagcccttttccagctgttggggatgtgcagacatcactcctgggggtgccctatggtacactggctgctccccagggacctgggaatgctgaatctagccattagggaaattgatttgagatgtttgcatgtgaagcttccctaagcagcactgccaaagctttggaattgtcacccaaggcttcctagactccctagctagctcgagttcgaattgccaatagtccccatggtgccaaattttgggatggttttacagtcttttagaaatgaagacaggaatggccatgtgcttctgagaccccagcacgatgccaggcccaggtctccattaatgcagtgctctgctgctgctccactggcaatttgtactcttaacataggttgggggagggacagctagggaaattttttttaattaattgtatctaaaattctttcatcataggaataaacaacacatatagaaagctccaaagctgttcccaagacctgtattatttattttatatgaccaacttgccccaaggcaattaactctgaattgctgttctaatgtgacatatctgtgtacatatgtacatagtactggtaaccagtggctgcattttattccttgctgtggactgaggtattggcttcttgaatcttgtatatgtcataagaatattatacagagagtgttatagtgaaggatgtaagctggataatttaaaacagaccttatttcatacaagtgtaattattacatcattttgggtaaatggcaaacaggattgcatgagagtgatggcatcatcatttcaattgaatctgaagtgattctaggaaattgattccactgttggattctaggaaattgagtccactgttttcctttgcgtttaatttcctttgtgtttaatttgaccacagaaacttttttgagtagcacctagtaacattgcaaggaacttgtgtatcaaggtgtatcttgattatcctgattttttttgttctctaagttgttgccagatctctcttgcaactgtgtcaatgaaaggtctgtgtttagaaaaggcagcatatcattgtatatttgaaactataggaatatatactttgtataaaacttttccaatgatttcagaaattcttttttcctccttttgacccacaactagactgttcataccctaatagttccccaaaattgccttagcatgtcacaccagcatttgtcatccagctctggagaaatgacatgactgttagatactatgcctgtttaattgcctctggattaagtcattgatagctagacttttgagctagttagctgtagaaataatagaatccagtgtttcccaaagtgtgttccaaagaacacaagttccaaagatgctcttctaaatataggattctaggatgaaataagtttggaaaacacataccatcttagaaagttagtgaacatgagcacatcaaaggctctaatttaaatgtcctgtgaggagagaaaaacacaacaaatatctactgtcagttagcccagtgttttccagattaatttgaccacagaaacttttttgagtggcacctagtaacactgcaaggaacttgtgttctaaagaacaccctttgggaaattctggtatattgaaatattgctgtgttttcattcacgatgactcttagtagcagtacaatttgcaacttagaagcatgagcctttcatatatgaagctgacttgttaataaaagcagtgttaagaagtagtatgacttaatatgaccaacagcagcctcatattgatagcagaacaatcctacttaaagctctaaacatcatccccccctttttttttttaacggaatctcgctctgtcacccaggctggaatgccgtggcgcaatgtcaggtcactgcaagctccgcctcccaggttcacaccattctcctgcctcagcctcctgagcagctgggactacaggcggcctccaccacacctggctaattttttgtatttttagtagagacggggtttcaccatgttagccaggatggtcttgatatcctgaccttgtaatccaccagccttggcctcccaaagtgctgggattacaggtgtgagccactgcacccggccatccctttcttttatatgaataatgagcaagagccctgccatagctaaatatgtctcaaattcattccaagatctttccattgcttttttgcagttacctttgctttttgggttgaatcaaaatgaatatttttatatttcattactatatgatatttaaaaatatacagaaaatcacagaaaaggaaaaacagaaatttgattttaattcacttttgaaattttaacgatttttaaaactaatgatctgttatataataactgaaatgtaaactattaacagttatttactttctttcctttattgtcctctctggattcagtgaaataatttgaaatcaattagagctcataccttctaaaactcctgtcccatatcatcccacctttcatgttttatgtacatagttaagtttggcatgttatctcttgcctaaaatgtgaggccttcctgtagttccacagtagttactcttggctgcagaaataggtttgggaagctatgagagattaccccaaagtcatggatgaaacaaatctagtcgaaaacatggtacagagtgaattaaggcaaaagtcattaacttaaaattacatccaatatttaggaatagctcatcctctgcacattatccaaaatattttaaaaaactaaaagtaagatctcttaggctaggtggcggattgcaaagggcagggggcagttgataccatgaagcttccaatagatgcatttctaaacattttttctaatatgtaaatttgctgatccttagtaatgttaatgctttgtctatttgttatttttaccactgttgaacagcaaactgttgaggctagggttgattattgataatttttatgtgtttagtaataaccacagcatcatacgtacaactgctttaataaatccaagttaaggactttgaggagagcatgtagcaagtattcattttaacaaatcatcacagacagtttccctgttcaaagctccaccaaaaagcaagcatgcagcaaaggcatagactgtatttagagatgtggtttcatttattcttgaagtcctataaccttgcattatttaaacacaaaatcccacctaacatttgccaaatccaagttaatctcaaaaacctccgaggacattgagcacaagcagattactgtaagggcactggtggcagattgtggtggagagagggctgagtgacccagagcaaagcctgcccgggttactcgctgccacttcaggagagggattgtatcagctctcattaccttttgtcatgaggcagttcataaattaaatatgatatcatgcattatctcaaaatatttctatattaattagataattcacgatgtaaaacgtgttcatgcagaagcaaaggcggatgtaatagtcaagtatcagggaaaaacccctttaggatacccagacattaaaaatgtaaaaagtagcttataagaaatgtggattatcagatttttactatatataggttgtgtttaatagtaatttctgacacctgcacatagatgaagaaaaggcagttgttaccacttttcaccattcaaaaaatgggcttgtctcttagagtattggttaatgctttgcttatttgttaatgaagacagcattttaattttaaagcttccttttgtaggactgatggcacgggcagaatcacatttaagaaaaatggtttggaacactttttaataaaaaattgtaaaatcagtttccagtgtggtcaaaattagaatgtaaaggaaagcatttttaagaaaatacagaagcccaaatcaagggagagtaatataaaaggaaatattttaaattaagaaaaggaggtgttatagtttattacatcatgaattatgctttctgtacttacgctcttagtgaaggagataacattgaagtgagaaaatgaacattctcagttatttgcgaagttagtaaaattgcagtccctattccatttttttctgatgaaaatggatacatgagatctcatttattgctctcctcaacacctttactgtcccagattccattcacgttccaaatcgtggacagtaaaactgaagtcagataaacacagtcacaggtacaactgggagcgagttttaacatagtggtaattttgcaaatgccaacatgaatactagtgagtactcaatttacgacagacaatttcacaaaaaccaaccacagagtgatttgatattcttgcttcttagagagttttctaatccatataatgcaatgggtcaggttgctcatatgattaaaaaaattaatcctgtagaaatgatgtattagacatctctaacccaagaaaaagatgtcttttgtataacttttaaattcccatttgtctatcttaggacaaatgatgacttcttcgtgtagtaatgaaaacgtctaaatcctgctctgtggagaaaagctagaaccatgggacattaagcaagaatactcctctgatttaggctcccagactacaactaacagtctttatgtatttatcatcttggttattgttttatctcaagcatatacagtgtgcagaaagtagaataatgaataaaatatgaccatggagaaaacccataacttttgcttctattatagaaagcagtgtttgttctttttaatttattacatgttcacattgaaacattaacatctacaatattgtctttcagtttactcttcaattactaaagcaaatgattttgatttatagcacttacacaactgcagttcaggtcacagaattgaaatctatttgataatgtctcagcattctcatgggcagccaggaaaaaaaaaaagagagagaaagacaaatagaaattttagtgggttcagataaatgattattctgacaaacctggaaaatagtaattaaacagttcattccaaaagaccccaatgtaaactctgctcacatacataatttgtataaggaaaatgtatgagtttttttcttaaaaataaatagaagcatcattgcatttataacagattgatcaatcttatgaacagattacattgggaaagtcactattattgctgtgtgtttgtatattttattctttccttttttgtgtgagcatctactatgtgccaggcagtgactgtgtctgagtgaatgtatccatggtgagcactcaggcgccatcactgccttcttggggcttacaccctattggggtgtcagagatattata

SEQ ID NO: 93626 - DNA, 80683 bp, Homo sapiens
ttagtgctataaatttccctctacacactgctttaaatgtgtcccagagattctggtatgttgtgtctttgttctcattggtttcaaagaacatctttatttctgccttcatttcgttatttacccaatagtcattcaggagcaggttgttcagtttccatgtagttgtgcagtcttgaatgagtttgttaatcctgagttctagtttgattgcactgtgctctgagagacagtttgtgatttctgttcttttacatttgctgaggagtgctttacttcgaattatgtggtcaattttagaataagtgtgatgtcgtgctgagaagaatgtatattctgttgatttggggtggagagttctgtagatgtctattaggtccacttggtccagagctgagttcaattcctggatatccttgttagccttctgtcatgttgatctgtctattattgacagtggggtgtttaagtctcccattattattgtgtgggagtctaagtctctttgtatgtctctaaggacttgctttatgagtctgcgtgctcctgtgttgagtgcatatatatttaggatagttagctcttcttgttgcattgattcctttaccattatgtaatgtccttccttgtctgttttgatcttccttcgtctaacgtctgttttatcagagacctggattgcaacccctgcttttttttttttttttttggcttttcgtttgcttggtagatcttcctctatccctttattttgagcctatgtgtgtttctgcaggtgagatgggtctcctgaatacagcacactgatgggtcttgactctttatccagtttaccagtctgtcttttaattggggcatttagcccatttacatttaaggttaatattgttatgtgtgaatttgatcctgtcattatgttagctggttatcttgcccgttaattgatgcagtttcttcatagcattgatggtcttcacaatttggcatgtttttgccatggctggtacctttccatgtttagtgcttccttcaggaggagctcttgtaaggcaggcctggtggtgacaaaatctctcggcatttgcatgtctgtaaaggattttatttctccttcacttgtgaagcttagtttggctggatatgaaattctgagttgaaaattattttctttaagaatgtcaaatattagcccccactctcttctggcttgtagagtttctgccgagagatccgctgttagtctgatgggcttccctttgtgggtaactgacctttctctctgactgcccttaatattttttccttcatttcaaccttgataaatctgacagttatgtgtcttggggttgctcttcttgaggagcatctttgtggcgttctctgtatttcctgaatttgaatgttggcttgccttgctaggttggggaagtcctcctggataatatcctaaagagtgttttccaacttggttccattctccctgacactttcaggtacaccaatcaaacatagattggtcttttcacatagtcccatatttcttggaggctttgttcatttctttttgctctttttttctctaatcttgtcttttcactttatgtcattaatttgatcttcaatcactgatatcctttcttccacttgatcgaatcggctattgaagcttgtgcatgcattatgaagttctctagccatggttttcagctccatcaggtcatttaagatcttctctacactatttattccagttagccattcgtctaaccttttttcaaggtttttagcttccttgtgatgggttagaacatcctcctttagctcggagaagttgttattaccagccttctgaagcctacttctgtgaactcgtcaaagtcattctccatccaactttgttccattgctggcaaggagctgtgagcagttggaggagaagaggtgctctggtttttagaattttcggcttttctgctctggtttctctccatctttgtggttttgtctacctttggtctttgatgttggttacctacagattaagttttgttgtggatgtcctttttgttgatgttgatgctactcctttcttagttttccttctaacagtcaggtccctcagctgcaggtctgttggagtttcctggaggtccattccagaccctgtttgcctgggtatcaccagcagaggctgcagaacagcaaatattgctgcctgttccttcctctggaagcttcatcccagaggggcacccgcctatatgaggtgtctgttgcccctactaggaggtgtctcctagttaggctacacaggggtcagggacccacttgaggaggcagtctgtccgttctcagagctcaaaggctgtggtgggagaaccactgctctcttctgagctgtcagacagtgacatttcagtctgcagaagttatctgctgcctttttttcagctatgccctgcccacagaagtggagtctatggaggcagtaggccttgctgagctgcagtgggctccgcctagtttgagcttccctgtcgctttgtttacctactcaagccccagtaatggcagatgcccctacccccgccaggctgcatgcagcctggcaggactatctcagactgctgcgctagcagtgaggaaggctctgtgggcatgggacccgctgagccaggcacgggatggaatctcctggtgtgtcgtttactaagaccttgggaaaagcgccgtattttggcaggagtgtcccgtttttccaggtagtctgtcacggcttcccttggctaggaaagggaaatcccctgaccccttgagcttcccaagtgaggtgctcaccctccgtgggctgcacctactgtccaaccagtcccaatgagatcgaccaggtacctcatttggaaatgcagaaatcacccgtcttctgtgtcagtcatgctaggagctgcagaccggagctgttcatattcggccatcttggaatgggagtcttgagactaaattgtttacttttaaaggttataaaacataaagggcaatctctgtttatcttgctagagcagcatgatattgttgaaggattttggagtcagactgatgcagattcaaattctggtctgccatgtaactgttcatctcgagcaactccattatactcttgagccatggttttctcatctgaaaaattgggtgaatactgttaaaataaaaatcttagaaaaaataaatttaaagtttatttaaatgaaaaacaattcatgaatcaggcagcactcagaatcagaagcgggtgagagagctcttcccagcaatttgtaagtaatgagcttttgtaggctgaatatggaagcaaagtagagaaatcacccaactgactacccttatgtgtgtgtttgcctaatttggtcatggtgtgaagaattggctgtctgattcattgaaactgctctttgttgcaaaatatatactcccaagttaggttgaagtttgttacagaggaactcaaaagtatagtgacagtctcaggctaatggcctcctgtttgcttaatttaacaatgcttataacagtgtcaccgttaagtcagactttgcacagaggattgagcataatgcttgttacctagtatatcctaaataaattgtgtttcaggtctcttgttattttctagagtgcagcgttgtctttaatacttatttgtcaaatgaatggtgtctgaaattaaagcctataatacaattcattgaatgtattgagtacatgctataagacaactgccatgcttggtgctatggaacaagcctactgtcaggaagtttacaatttaattggaaaaaattggacacatggatattaaagaactgtaaaagagatatcattaaaattgaactcagcagttttataagatggattcctcagaaccttggctactagcaaaagtatcactatatccctaaataaattaagctcaagttagttgcttttcacttggcctctatttttaggcgtgttaaagaatggaacagtgtaaatgaaacattaaccactgttagctattgtttataacatcttgaccaacactttgagcttaatgacaagtgatgcttgatgaggacttcttgcttgatgccggtaaagctgattattgttgctttcaaagggattgctaatttattttttgatttttctagaataaattagatattattcttaagttagggcttattggtattaaggaagataatcagtataataataaagtatcaagagagtgatagacctataataacgttgcagagttttctggcactagattcgtagtaggatactattaagttttttttaaaaaaactttaattccaattggttttaaattattcttcatacagtgccgttttgtgaaagagaatgaatagtgttttgttttttaagtttctgagaaatctgtgtagtgtttttctttgtgaaatgacatgcctctttaggtaatgttattgtggaaagagtataggtctagaagcccaggtacctgagttctagtttcacctgtgcttagattacttgcttttctcatctacagagttctttttggattcatgctcttccaaactgtacaacttatttgggcatttcttttcttctcttttctttctttctttcttttttttttttttcgagacggggttttgctcttgttacccaggctggagtgcagtggggcattcttggctcactgcaacttctgcctcccgggttcaagtgattctcctgccttagcctcccaagtagctgggattacaggcaccggctaccatgcccagctaattttgtatttttaatagagacagggtttcaccatgttggccaggctggtctggaactcctgacctcaggtgatccacctaccccggcctctcaaagtgctgggattacaggtgtgagccaccatgcctggccctgggcatttcttaagaatcagctgttaacattaatttccctggagtgatagttacacaattctacttctacaagaaggagggcaatcagggaatgaggcatatggataggagagttcattctagggcagattgaatacctatctgcagaagccaaactgagtgggttgataaaatgaagatcgaaagctagatagtatttttggctaataaccccacttcatgttccctttttccccagattctcttacattggttttacttttctccttccttccttttaattttttttttttttacaaagtattacaagtgtgccataaaatgtacttttgttctgactcttgaggttcttttggattaagaagcctagagacttggatgtgtgtggtaggaagaaggtcaggctaaagttgcaaatggtcaagttaaggtggagagagggattaggaagtgaatgtaagaaaaaaaaaaaaagcagaagcctgactagtagttacttatccccaaaatattatgacttattttaggaaatgtgacacaaattcagttctaaaatttaataggtcacattctggtctacgtagtgaaagcatggcttaacattgagaaagtttttgtgattatgaagatgtatttcatattctcttgtcttaatttttaaaagtgatactcttccattgactcatattaactatccataattcatagagaaagactttaaaaagattgtatttttaacttgtttctatttccacacagtcatggtcagagagatacagcacagatcctactattacgaggagccaaatatctgccagataaaaatggagtaactcctctggatttatgtgtacaggtgtgtttttcatttatattctgagccccttatctttataatagaaactggaatggtaaaaattattattttttcaatgaaagggtaggtgcaaagatttttattgtgtgaagaatatgaactttaaaagggactgtttttaaacctggataattttagatcttgtttttagggtggatatggagagacttgtgaagtattaattcaatatcacccgaggctttttcagactattattcaaatgacacagaatgaagacctccgagaaaacatggtattgtatttgtgatagtagcttgtaaatgaagaagctttattcctgctcagcatatatgacattttacaaatgtgcttagcttagtaattttgcttattgtcacaaatatcttaataattagcttatctgcattataggataagtgtgaattagataataattaatatagtttttgctaatatttggccatataaatcttctgccctctgggtctttggtctctccttaagataactagaataggctgggcgtggtatctcacgcctgtaattccagcactttgggaggctgaggtgggtggattgcttgagcccaggagtttgagactagcttgggcaacaaagacccagtctcttaaaaacaaattacaaaaattagctaagtgtagtggcatgcatctgtagtctgagctacttgggaggctgagctgggaggagggattgagcccaggaggttgagcctgcagtgagccgagatcatgtcactgcccactacactctagcctgggcgatacagtgatgctctatctttaaaaaaataaaaataaaaataaaataataatattcccatggcaagaggaaaagactctgtggaggaatatcattatgattggtaatcactagtttactcagctatgtgtttgtgatagttttagtcttagaaaaattgcggaatttaaatttctctttcgttttagaggtttagaattaaatttccaaaactatacttggtgatttttaaattctatctatatttactattgttttgtaactgggtgattttcaacaaagattttattatgtatcatcatatctctatattagcttttaaacttatgcaagacaaaataactaaaggacttgatttagactaattggctttaagatacttaataggtacttaattgtttgataagatttaatggattactatgtaatcacatttttttatttgtaaaaaatttagttacggcaagttctggagcatttgtctcagcaaagtgaaagccagtacctaaagattctaacaagccttgctgaagttgctacaacaaatggtcataaactgcttaggtaagtgtttcgcaataagaggaaatcaataggtagcagtgtctgttggcttcacctcctgagtagtttattctgtgggataccttttgtcagtgataacgatgttataaaaatttgctgacttctggtttgttttgtttgaaaggaccagggtaatcaactattgctaaagagattttagtctctctaaagagactaaaaatagagcatacttcagtgaatttgggcatatgtgtctagaattttgtgaaatgattacttacctagacatataagtaaatgtacatgaagaagaattgagaaagttcaggaatcttgaccactaattaataaaataaaattaggtacaagctactgtttaacctttcattgtactttcatgactccttataaagtttttttctctgacctgtccccctcagttaagttctttattatttctaaaagatcctgtggttttatcatcactaagttcgtggagttaatgccttatattacttgaatttatatatgaagtgttttcctgtagctacacttctttctatgtggctggctaccccaattaggaataagcagccactgagaaatgattattgtcttattatttcttagcctgcaagaaattgtatatatgtatacacacacacacacacatatatacaattatttttttttttttgagacagagtctcgctctcactctgttacccaggcagcacaatcttggctcactgcaacctccacctcccaggttcaagcaattctcctgcctcagcctcccaagtagctgggattacaggcacacaccaccacgcccggctaattttttgtattttcagtagagatggggttttgccatgttgcccaggctggtcttgaactcctgagctctggcaatccgctcatctyggcctcccaaagtgctgggattacaggcgtgcgccaatgcgcctggccaaatacatatttttgagggcgtaccatccattaggccatctgtgaggtgatcatgaataaaacagacaagatctctatgttgaaattacagtctaatcaggattttattggattttattccattttgttggaaactggcaatatctttatgagttgtgagagtgaaataagataattctgtaaaatgcaaaacagtgggtccagtatatagtagaggtgatgatggttataattttaagtaccctataataccatttaacctgttttcctacattagaaaacttattttttcttcttaaatatttgtcatattatatatacttccacagtaattakaaagcatttatgttttgatgtatctatgtttttaagtttaccttcatcacttattaagcaggtaccaagctaaggagcattcgaatatattatttcatttataccttacagtaactttataatttagatgttatctccattttacatgtaaaaaaattgaagttaaatgatttgccaagctaataaataaacctggatttatatcctcattagtaaatagcggattctaggttctaatctagcttctaaaaatgacaggggtggttggtgggacaggagaaacagggtaggaaaaaggaacccatgaccaaaacaatagtagtttttaaaaaattactctgctaaactgtgctctctcaccacttatggtgctaccttccaagtgctttatagaatcttatttttatggccatttttggcctgtaaatatctcattgttggggttggtagtgagtattggttattagttagaatttattgtactgtaaaaaggtaattcttaagatgatttcaaatacaaattgtttccccctgctgatttatgtttaatggtatttttgtagagtatctcatttgtgtttatttgtgaatcattttatgtttcttaacccattatgtgaagtaatgttgacccttgttttaatagaaattttcattaagaaaataactgattcaaatatatgttaattagtgacaactaaggtgttatccagcacacttttggaaaaatttgtagcctattatctaactgatttcaggaatatttgctaaagataataaacatttactgaggcgtttgcacataatgctatgtttatattgaaatgaaattttatcgtcctttctatatatttatgattgaaagtaaaggtagttaacaatgtggaaatgaacagagaaatcatagctatatgctaagtaagacactgaataagaatatacccatataaaccaaaggcgaggattttacaatgataggggtttgagttaggaaattaatttttttttttttttttttttgagatgtagtctcgctctatcgcccaggctggagtgcagtggcgcgatctcggcttactgcgagctccacctcccgggttcatgccatcctcctgcctcagcctcccaagtagctgggactacatgggcctgccaccacgcccggctaattttttgtatttttagtagagacggggtttcactgtgtagccaggatggtctcgatctcctgacctcgtgatctgcctgcctcggcctcccaaagtgctgggattacaggcgtgagccaccacgcccggcaaaagcaactattttaaaggaaggggccggggaagaagagagctccgtgcttctaatgagcaaaggcagcaacaaccttgagcttctgcagcccttggtatttattgggtagaaagagcagggaggaggagcaaatgattggtcagctgcttgattgatcacagcttcatattattgctaacaggcttcagatgtacctaatcacaagaaatacttatgcctgggtcgtgactgccctcagcattccttctgggtggcagatgcagttttkcagtttgccagcatcctgcatttatgagaacagttggctgtttactcatatagcctccagtggtatactgagttgatcatgaccttcacccttttggcctccaacatacaaagttaatcctgctgttctgcgcagaagttcatgcaactctttgctttgctccgacatttgtgatacaagataactgatgttagagatttcaaaataaaaccaccatcaaccaacaaaaatactgtgtttaaagatatattattagattcaatacaaatttagcctaactcgtacagtttttctgtggaaaggtaattattggtattcatgatgttgaccaataccaaggtaactgtgggattctgaagggctttctgatcagtaaaagtgagtttatgttaatttaatatgatttagtgttaattgaattttagtcttttcttttttcatggtaggcaaatatttcctatatttgtgtatagtcataaggcagcccgttacgtagagaacaaacctaatgcagatagcaacttttaaatttttcaatttgtgaatgttctatatgtgaataatttgttactattctgtggtgggaaggggatatgggattatggatatagtggcagagtttagtttagcttcttcgttaaaacagttgtgggttggcctaagaatatgatgatttataccattgcttctctgtgaaatacagacttctaaagtataaatttaatttacaaatatacttctgaaagtaaaaatttaggagttgccttgaagttgttgccacaagaaaccaactattctaaaggagtgattttcttcatgttttatgctttgatcattggttatattctgggtgcttaagaaatagtaatttatttatatgcaagttaaataatgtaacttcctgttaaactgttctatctcctatcatgataggaaaggaattgtactccagttacattataatatgaaacagatggtcagtgggatgaaaatgttttaaaataagtattttaatatgtaatttgttttactctaatctcatattttaatttttattttcagcctctctagcaattatgatgctcaaatgaagagccttttaaggattgtgagaatgttttgtcacgtctttcgaattggtccatcctcccccagtaatggaattgatatgggctacaatgggaataaaactccaagaagccaggtgttcaaggtgagaaaagtatatggcattgttaggaagayagacgtaaaagagatgaatttgacaaagcatgcattcattaatcagaaagctcatgaacaggttgtaagtttggtttatacccatatcactttcaaaattaggcacacctttctcctctcaactctgtctaatcaacagcaagttggtgagctttctgtatttttcttacaaataaaattttttattccattggtgttttattctaagggtagagatatttagtgtttaaaattaattttattaaattataggtttttaatgtaatatgcagccaccatgcttttgaaagaaatgtatttcttattagtaaggaaataaaatgcacagtttttatttagattttaatatgatatgtgtgttagatgtgtgtctgtatgtgttttcaaagtaaggtactttcatttactgggtttgctgacagttaattcctgagataactgcaaggaagagttgttgagatattttcttaaaatattttgtattgcttcagctgcctttctaagcacatatggatgaagtccttggaagattcatgtaaaaaccaagggagttttgctactcatgttaaattataattttatgaagtaaacaaaatgaataggactataattgctcttgttaatgtttttttgggtgacattttaaagtaacagattttagaaaaatgtgtaatttaataactttgtgttttttatttcttcatgtatttattttttgaaacggagcctcactctgttgcctaggctggaatgcagtggcacaatcatggttgactgcagcctctacctccctgggctcaggtgatgctcccacctcaacctccccagtagctgggactagaggtgcatgccaccatacctggctaatttttgtattttttgttagagatggggytttgccatgttgcccaggctagtctcgaactcctgggctcaagcagtctgtctgcctctgcctcccaaagtgctgggattgcaggcgtgagccactgcacccagccaacttacatttctttaaacaatggtttgagtataaaatataggttatttatcaaaaaagtgatataaatgtttttatgtgccacttccttgaaaactagttaggattgaaagctttgctgtctctaaaattcaaagctaaactagtgttctatactaaatgattctttccttacatggaaaatttttgcaaaaaggtaaaaataaagtttgcaagaactttgacactagtagattaatacttagaatagatatggtagtcttttagaaaggttatgtatgaatgtctgtccatctgttttactctctttaaaaaaatcagtctaggaaggacagtttttagccatatatgtatgtgtgtgtgtgcacgttgagtgtgtatttttgttttcttttttttttttcttattgtgccacctcctggaagaatgaagttatgcattcttgtaattcatgtggcttttcacgtaccacttccttgagctctagttaggagtgacgacttactgtctttgtaaaattttgatctacattattgacctactctttttgtcagggctgttttaagcaagctttactgcttcaaacattcatatcacacaaagttgtttttaatgtgttctggcgtggctcactttgttagtgacggaatctacccatgatttgactttgactcatactttctactcatcagtaatgatgaatataaaatcaaatcaggtatagatgtggtcaatattattcaaattgggttagattatatttaattttgtctgatttctttggttaaaatttcgatctgctacctgttagctaatatcagaaaatatgtgttaagtagcctctctataggtgatttaaatgatttaaatattgatttaaatgttagttttctacctacacagtcaatacagacataatagagtagaaaaggatatctgtttttcctttttagcttatgtttaaaaaatagaacccagactttatgttttgtcatgtgtctatgatatatataatatataaatactttcttatttcaagaattttgttggtatctttgtttcattttttaaggtactgctttctacagcattgacaactactatttcttctcatcacttattttctcttaaattttgaacttccattttgtaaaacactaattgtaaaactcagctagtttttaaacacattaataagtattaactgttaaagaatttattagtctcttttcattcagttttatgaatgaaacatgraatctttggggattggcaaaatgatctgcccttccatttacaaggataaaaatagaaactgtacattgtcatccatgggaatcagatctcctgttcattgtgggggtgatttcaagtaaaaatctttgctagttactgagttgctgtgatgttagactggaaataccattttaattcttaccacattttgtctgaggtagcaattgatccctaatttccatttcattaacaaggtactctaatgctactttattgttcaaattaactaatgggttttccattaagaatgagtgggtttataggccatgtgtttttagtaggtgaaattgtttaacatcctgttattagttttctgatttattttagaagttcttcaagttagtcttaacacatagccattctttcagcattaagagatgtttatctagtgccttgggaaatttggagcatttgaaggagaagatcatttttatttttgaagcacagtgaacatggggaagacaatttaggcttcctgagtcttgctgtgttctttttttgtgaatagtaagctgtgactattaatggtttcatagacttacaatttggaaattttggtaaccaagaaagattgtgaaacttttaacttcaagatcttatcttgtgggttgtggcatttgacattaggttaagaatagtcagactaacaggatatcaatgtactatgaatgaacattaagttaataatacttttctgccaaattcattcctcatttcagcacttcttgaaattttaaaaaatcgttcmgtaagctcgagattgtatattttgaaatatgacttaaaatgcttataaatcatgtatgattggcatatcattgttactatatgtagaatataattcttcagtaaggatcactcaataataatgaatgaagcagtattttcacagtaccaagaaacctgctaatattttcagtagtaattaactcattgttcggtaacaaatggtatgtatggtgtttcttatttaatgtattttattatttatgaatatagaaagtatcagatatagtatgcaatggtttatttttaattttaaaatttatttgaatcctttttgttggtggctgcyaccatagttagaaattaaagttattttcatagtattcttttttgtgattgaagaatgaattttctgaatagatcttcaaagagaaaacttcctaggtaaactcacctcaaggttgggatttagttttaatgtatgtatgattgaagaaataaaaggtaagaaaagagagaaaagtaaagaaaggtccaatgtggtttattacttatcttatttttttyctcattcttctaattatttgctgtgttcctttattaaaaactctggcttttcgacatctttgttgtcacttttacacatatccatttttttctttggtgttatttctgcaccactgaaaatttgtctttcattttttacacattgtcaatatttgaaaataggatcactgttggtttagactcagtgctcatctgcatgatcagcctgtgtcatttcttgcgttaggccttacctcctttcagtgtgttgattttctaggttttatcttttctcatttagaggccaattattcttttttctttttgtttcaagcagttttatatcaccacctgttctttccatttcagaagttcattttctgatataaagctaaatagttttgctgacataagttcttttcatcttctacagcaggttcagtgttttgctcataaagagaaactatagtttcaacttggatcatgattagaattttcagtgaaggtatctgtcagtatttatggcagctgggtgcttcttgcccttctttaagcagttcagggactccaaatctgtcaaccgttgtgagtatggaagagccctcattacgggtgagagggatgcttactttaacttcgaaggagggtataatttctcttaaaaaaggaaacattgtacttaacccgactacytagtgcatagtactggttgagtgagtgaactaggtttttgttgattgtagtagtggtggttttgttggttttgttgtgtttttctgctttttggttgaacgtgtaaatgaaggcctgaggtgatttaattatttgcaaattcagtaagtaaaatattttcaaaaagagaatattacagaaatctgaagaaaggctgaaagtggcagtgaaggtatttgttagataataattgggaagaatttcctggcagaatagttcaaacattttctaaggttccaaatatggttgtataatctccttccatggcggtctttaaaagaaagattatttctttccttgaaatattttaaaggtgagtctttctgtagcacatggtgtagtttgtagcattctgtaatcatgtcagattcaaaaagtgagataaacttttatatttatttgcagaaggatagctaatcattctcaataagaatatttaaaatagtgtaggatgaagggattgtttaaccactgtaccacttataaactattaatctttatttgggattaaaaatatcctagcaggtttttttktttgtttgtttgtttgttttttttttttttttggagacagtatctcactctttcacccaggctggagtatagtgacatgatcacagctcactgtagccttgacttccgagactcaagcaatcctcccccttcaacctcctcagtaactgggactacaagtgcatgcctstgtacccagctagaataataataggaaatagtttattctctcctcatctttttttttttttaatagaaaggtgttaatctttacttggaattaagaatttgctactcagtatttttttttttttttttgagatggagtctcgccctgtcacccaggctggagtgcagtggtgtgatcttagctcactgcaacctctgcctcctgggttcaagtgatcgtcctgcctcagcctcccgagtagctggaattataggtgtgtgccaccatgtctggctaattttttgtatttttagtagagatgggatttcaattcaccatgttggccaggctgatctcgaattcctgacctcaagtgatctacccacctcggcctcccaaagtgctgggattacaggcgtgagccaccatctccggcctgctagtcagtattttaatagaagtttggtaattgtatctcttgttttaaaaaaacactaattattagaaatggattgtgtctgtaagtatatgtatatacataaatatgccacattttgtaatttcttgtcaaaaattatccaaattctaggaattatatgtaatgaaaggagcacagtaaaaaagctgttcattaggttctttagggattctcattttttaattgaaaaaagacatttgtttaattgaaagttgttgacattgatcatattaatacagaaaatgttgagtgattatacttaggggttctcattttttaactgaaaaaatcttatttgtttaattgaaagtggttgacattgatcatattaatacagtaaatgttaagggtgattatatatagtagtaatgtgtgcttttaaaactaaacatttgaaaattaaaagaagaaagattgtgaattttttgttagatttagtttttcctttttattacaaggaatacatacatacaaattaaattattgccataaatgaagaaattgtcatttatgtagcatttgtataattttattacttacctttaggcattactatcacgttaacttgggaagatagaaatgactagagtaaattttctcttctataatatttgtctagttgtgttttgtttttttttttttaatcctgtagtttaagaatgatgtttaaaaaacacttttgtttctctcagcctctggaattgctttggcactcgttagatgaatggctagttttaatagccacagaattgatgaaaaacaaaagagactcaacagagatcacttctattttactgaaacaaaaaggccaagrtcaagatgctgcttccattcctccatttgaacctccaggacctgggagctatgaaaatctgtccactggcacaagggaatctaaaccagatgctcttgcagggagacaggaagccagtgcagattgtcaggatgttatttctatgacagctaaccggctaagtgctgtcattcaagctttttacatgtgctgttcttgtcagatgcctccggggtaagaaagttttggcttattattttttttttctctgatagatgatgaaaagcagtgatacttttgtaatttcaaaaacaacaaataataatttgttgatttaaagttttctccttgttttaagatactcatactaatctagatctagtagggaatatttaaatattaagcagtatatattattactttgtagaatggtgaatgtcaccttgtataggatctcttaattatgtatttgaaatgtgtagagcagaaatgcaccaaatttcaagatttttaaaaagtcacttgttgatatcgtctgctgatgagaagttagaatcattttacaaattggctaggcatacttcagtttcctaaacttacaaagaagattcaaaaccaaattcttttttttttggtttagaagccagtccagttcartatatatttatcaagttcgctatattatatcacaaacttttgcctgtgtattctgattgatgtttyccccccacagaatgacttcacctcgtttcattgaatttgtctgcaaacatgatgaagttttaaaatgctttgttaataggtaagctttctgggtttgtggagtaccctgctagcctttcctctctttacttacagttkcatctaaacagaaaaaatactatttctcrtactattcaaaatatgctcaataacaaatgaaactttaatagatatggattattatgtgtttttcttctgtttcagtgtcagtgtatctgaatttgcatttcacttaatgctactcattcttcctgtccatttaaacaaaatatttttcttttagaaatcccaaaattatatttgaccactttcactttctccttgaatgtcctgagttgatgtcaagattcatgcatatcataaaagcacaggtagaaatttttcttcatctttttattctakctaatgaaattaatttctaaaattctaatactgtttagtggaataattattacacttcagacattctgttgtaagaggaatgattgcatgttactttaatatgaggagtaagttttcttcaagaaatatgtactgagtgcctactatgtacagaggtctgtacaaaaacaacagaacacattgccacatttcctgaaaggagcttaatgaaactctttagttctataaggctgattgtccttttgaaaaggattttagcccccaaatacatttgggaaattacataacatatgccctttggaaatttataaatcacattggcagcatgttaaaaggctttgagaagcccttcagtaaaaatagtgatttagctttgttaatcctcctaacttatttgacctgaccacctttcccctaccagatgtgtacctgttcattccatacatctcatgttacatgaagctagctggaggaaagcttgttttgctccttaccagctatgtgaactttgggcacgtttcctaatatccttgagcccttggtttcttcatctacaaaatggagataatgacagcagcctcatagaactattgtccagaataaattgtcaggaatgactgtgatatatgctcaataaatggtagttgttttggagatagaaaacttacttccyttctctaagaggattctaattcagtctggctggggagataataaacatatgtataaaatagtaactacaacataacctggatctttaggagtttaagggaggaagagctggctctggcatctgtagtcaggggaaatttcagaggaggcagattttaagttaccttgagaaagcttgaaaaaatatgcaacattttgatgggagtaaacaaagagggagaactttctagccaccatgtgggctggagcatgtagaccgaaaagtatgtaaaactgcagtattgcagcagaaattttgtgttgataggagcaagatagagttatggaaaggtagattgaggtcatccaatgatgagccttgatttccagattgaagaattttctttgtttgctaggctgttaggagccactgatacccttgctttaggagaatggcataattctggcaaagttttagaaaataatttgccagatatgtaggacagactgtaggcaatggtttggttagtagttgtaagataataaatakgataagtggtttttaatgtctttagggacacttgtcctttcagaagttaagctatgaactaatttttataaaattatacataactatatagagggatcttttgacatctgtttaataatgataatgtgaaagagaaggcagtaataatgacttacatttactgattttaggtcaggtactatgtatttgcttccatgaatgattttattttcttaaccattgtataagatggctactcttttttttgtaagctgaagtggttaagtaacttgtttaagtcattctgctactaaatgggagaaccagaatttaaaagtctgtctggttctcaagttcaatttctttctttattttatttatttattttttttracacagggttttacctgtcactcaggctggagtatagttgatctgagctcactgcaacgtctgcctcctgggctgaagcgatcctcccagctcagtctttcaagtagctgggactacaggtgcataccaccacacctggctaatttttgtgttttttgtagagacgggattttgccatgctgcgcagactggccttgaactcctgagctcaagtgatccacctgccttagcctcccaaagtgttgggattatgggcatgagccaccacacccggacaagttcaatttcttaacctacactgtatgatactgttctggggcaaatgagataataggtgaaagaagattttagtttttgagagatagtctgctgtttttaatataggttggtgcaaaagtaattgcggtttttggcagttacttttaattgccaaattaaaattgtcaaattaaaatagcaaaaaccgcaattacttttgcaccaacctaatactgtctctgctttttactttctattcctttttcccttcctggacaatttagtcaaaaarcatctgtattaggtatccactttgttgacccagagagggaggtgtttgttgcctgactagggtgaggagggtgtctacatgtgtagtggtggcctagtgtggggttttggagtttggatgtgattaagaagtgtgtctgtgtagaagagggtcccagtgtgagtcatgtgggttagagtggcataaggaggatgtccatgttggcggtggttgcagctgatcagtgctgtctgatggagcctcagtgggatgcaggggccatgtcagtgattggagattggttacataccaagggagtggggttgcaggttgatcaaataagcaagtatgagagtctaacttctcgttgttggagaaaggagttacaaaatggaggaaattagaaggaaccttgtgttgaattggagttaccagtttgaatttagttttaaatttacatagatacatgtagcaaacctggcacccagctcttggtctctcagtgccattctcaatgaaccagggctccttggagaaatggctaattccagggctagatcagggaaagtataaaataagcctgcaacatcttattgtgtaagaaagtaaggaagtgttcaaagactgatggggttatgttaacatgactcggaagacagcttgaatggactcccactaccaaatttggaagaatttgagcatcaaaataaataatgatggcaacataaacaggaatctatgagtctgtactgaaaaaagttaatgaataaatggaaagtctgatgaagggtaggatgattacacagtctcagattatctcccagcagaataattgcaaagagaaaaagggtgccttacagtagagaagcttagcagtgatcaaagcagacatagcagtgtgccagctgataggatgctctgaggacatcatggcatcacttctgtggtattcttgccaaggatacacaccttaaatctaatcaggaggaatcatcagactaaatacagttgagggacattctacaaaattaactgacctgcagtcagttttaaagacctgcagtctttaaaactatcaaggttatgaaaattaagaaaacattgaagaaatgtaccagagtgaaggagacaggacaggacaattaaaggcagttcatgaatcattttgcaataagargacattattagaaaattggcaagacttgaaatgggatctgatgtagtagtgttatcagagttaatttctgattttgatggttgttatctagttatagaggaaaattcccttgtttgtaggaaataaatgcctaagtgtttataggggactggacattatattggcaasttgctctcacattagaggaaaaaaaaatactttgtactctactgtacttagaagttttctgtaacttggagattgtcctcctctagaaagttaaaaagaacaactacctctgctaagggattgacttcttcttctgttggtggttttcaggtggccagtagttaaagggagaaacattttgtattgctgtacaaatgctattaagaggagcctctataatcagtcctgttttgtgaattatttatggaaatgcaggtactctagaaagtttacatacaaaaatgtaccatttggctgtgtaggtgtttgtatgtgtgtgtgtgtgtttgatctgagcttttgaaggtagcagtttgtaccttttaatgttccacttgaattacttgaaaaggttccatttgtttttatttcttggttcacatttcatagataaatgatatagtttaatatcttataatgggcagtaagttttcttttaaatagttattgacaataattttaacattgctgtgaatgataataagaacagtatctatttattgagcattctaggtattgagtattagagcattagtataaatgcttttaatgtatttttctctttggtaaaatggggacaaaagttcctttttctcatagtgttgtgaggattgtatgtggtaatgcattgtaaagtgcttcaaaaagtacctggcttataggtgcttaataaatgattgctaatttattattatgattattataattatcataattatgttctttatttgaattatttaatcctaacagctcttgaagtaggtatattcttttctctgttttacagatgagaaaactaaagttctgtgaggattaataatttccttaagataagtctagtaagtcacagagtgaggatttcaaaccatgtttatctgacttcaaagcccatacttaaataattgcttctgtgtaatgttttttctctcctcttaaaccaaagttttagaaatagtcagcattagaatttcaagtactttatattccagcttgttaactgaaaatgagatatttaatttatatgcacagtaatgcatataacaccagtgctttataaaaaatgtggaagactgttacaagtatggacaaaattacacatttaactttaaaaaggtagcatttattcttttcttactgaaagcaaatattaaaaggcagaagttcatctctcatcgatcatattgtttttattaagaattaataacaagtgatatttgaatcttttaaaacaaacctatttaatttagctcagatgaagaaatttattggtgtcctaaaagccacctggaagataacctttttgtggtgttggatggtattcatcatatttatctcttgaaactcttagcttttgtgatggtattgcaccaccttgcttctcctttgacttttcttgccgtctgtatcatttgctaagcaaattctcagtcatgacttgtgatcataaacttctttgttcttggtatttattctctgtatctttcatctcttgaaccttatcctgtctccaactttacctttgttcatgtttttattttcagtgtctcagctgcatcactgtccagtatctcctcctaaatccctaatagttacaccccactatatctttaaactcacgatacataaaatcttactcatatttccaccagtaccttctaggagtgtgggggtaggttatggggaaagggcttttccactttaagttatttctattcataagttctatcttgcagagatcttaccttacttttttttttgtagagataaggtctcagtttgtcactcaggctggagtgacaaagtgagcacactacaattatagctcattgcagccttgaactcctgggttaaagttttctcccacctcagccttctgagcagccaggactgtaggcgcataccactacgcttggctaattaaaacatttttttttttttggtagagacagggtctcactgttgcccaggctggtctcaaactcctgggctcaagcgatcctcctgccttggcctcccaaagtgctgggattacaggcatgagccaccatacccagcctcttctcttacttttaatgcttattcaaagaagtagtatctctcggattggcttcattgttcctctttgctaccatgaccaggacttctatagctcatgcttcattgttgagaaattgatattatatatatatatattgtgttactctgtgttagtcacatctctttaactctattaaacagtttttagcaagttcttggagtttttactgctcttacattacatgcagtgttggtacatagtaagtactcagtactttctgattaatcaaaaattgtagataactcacagtttgcttacctggcagatgaacaaaagggagagactctctttgctattcaagagatcttattcttcaatttttagggtggagaatgggaagggataacaaattacgttccaatttctgcatgtattctaaaggatagaagtaagaataaagttaggagtaagaggccgggcgcagtggctcatgcctgtaatcccagcactttgggaggctgagatgggtggatcacctgaggtcaggagttcgaaaccagcctggctaacatggtgaaacctctctctactaaaaatacaaaaattagccaggcgtggtggtgcgtgcctgcaatcccagctacttgagaggctgaggcaggagaatcacttgaattcaggaggcagaggttgcagtgagcagagatcgtgccactgcactccagcctggacaacagagtgagactttgtctcaaaatgacaacaacaactacaacaataaaccaaaataaataaataagattaggtgtaagagattattttcatgaaaaattaaatggaacacgcaacgtaatttttctgggtgtgaaaattcattgtaataaggcttggatttaaaagaattgagaataaatatattcaattacatgtctgatattaagttctgagacataaccaaatttatcaagtcttttgtgttgaaaatgtaggaatttaaaaaaatacrtttctctaggtagtcaaactatttcagctaagttctgtctttttgtaaatagttattgaaatgttcaaacattatccagtaactccttattgtaaataaagatctaagaatgattattygtagaaaaggcatttagcaagctagtaaatctgataattagatgactgatacactgctaacatattttrctcttattttttgagctagccttttaaagatcgctgtgaatggttctatgaacatttgcattcaggacagccagattcagatatggtgcacaggccagtgaatgaaaatgatatcctgctggttcacagaggtatgcttaacaaagaaactgatatatgtgtgaagcacaaagtgctttttattataaattttaatatgtaaaattaaccaatgctacatatttagattctatttttaggagtagctgtgaagttgtgtcaaaagcaaattgtgcaaagctaaagcaagggattgctgtacggttccatggagaagaaggcatggtgggtataaaagaagatgatgtagaaatcactgtatgtaaagaaagattgaaatgccttttgaataaagtttaatatttagttgataaaggaagaaactttatatttaaattttgttatttagaaaaaaatttcccaatataacatatttctgttgatgcttaattttatttcttgaattcagggtcaaggtgttgtgcgtgagtggtttgatattctgtccaatgagatagtcaatcctgattatgcattgtttacccagtcagctgatggtaagttgtacagtctagatgactttttctgcaacttgtcacatttttcacactatttcagtacattttatttttgatttccacagcagacctgtgagctaggtgggatattcttattttatagatgagaaaactgaaattcagagtttttatctgcattcacacagttaataagtagtagaatcataagtggaacctgactcagtctaacatttgttcctctaaacarttggttcccaaatgcttgtctcaaggactagtgtkggcccaaagaggtttcttatcagtcctttgtaaaataaaactaaattggttcaatttaaggattatccttgagtctacattttttgaattaaatgttttatttcataaattaatggtgcttgtagatggccttaaacaaataaaagtccctatttggaaaaataaaaatttgctaactctatttgagtttccaagttttaaaatatattggttaggaaaacccaagtctagaaatcatgatataaaatttcaactcttaatctatttatgtatactaactttattttcagtcattttgagagatcaagacctggctactataaagctcttattgaaccatataaaacagataattaactctccttgttgaaatggtgcttgtgccctatagagtcgtaatttgctgttgtagactaaatggaattagttatcacctcatttgtgtgaggcatatttgagagctctctaacttaataaagacatattcyaagtgaaggtgggatttcagttttcaaatgctttgcacagtcgcttgtttttcctaaaaatcttttctctccccaaatgtttacattcttttatcaggagagaatgcttcattaattgtagcttctgattgcttccaaccaaactagcagcaaatccctatttgatcagaaggatgattttaggggaggcaagtgggagtrggctgcagtagagctaggcagctgcaggcattcatccctgtgatgggtttcgtggatacactttgagtatttgaaattatgtaggaacatggaactgcctgctttaactctgtaacctttaattctttgctctgaggtgaatttggtgtctttgtgaatgacgagttcagtgaagtcatgagtttaattatttaggcctaatctttgaagctagatctagcattatattttagacttatttcttctctttatatcctttattctaagtctacttagcttaatatctgaaaaacagatttggtgtggaatcattagttgaggtacttccttaatgttacagatttatagcagagcaaatgttgaagtacatagacccataaagttttttgtttttttttttctttgagacagagtctcgctctgtcacccaggctagagggcagtggcgcaatcttggatcactgcagccttgacctcccgggctcaagggaccctccacctcagcctcccgagtagctggtatggctgaggtgggaggatcacttgagctgggagaccagccatggcgcctggctagtttttgtattttgtaatttctctattctttttgtggagatgaggtttcgccatgctgccgaggctggcctcaaactcttgagctcaggttatctacccgcctcggcctcccaaagttctgggattacaggtgtaagctactacgtctggccaaacattttgatttatcttttttgtaagccatatcagtctcctctttggtgtcatagtattaataaattaaaatcaagctgaaatattttcacgttctcaggtttagttgacaaagagaattacatataggaatcaagaatttctaaatgtggggaatgtttgggtagacccgatatctataataattttttaaagaacttgttttctaatgaaattaagatgcttactgtagtgaaatagtatatttgttatgaatttgtcctttgggtttatacatggtgagaatcttgactgctattcttttgatacaatcttggggccagtaaacttaactattctgcgcctttgtgtcctcatttaaaaatgatgatacctgcttgggcgcggtggctcatgcctgtaatcccagcactttgggaggccgaggcgggcagatcacgaggtcaaaagatcaagaccatcctggtcaacatggtaaaaccccatctctaactgaaaatacaaaaattaactgggcatggtggcatgtgcttgtagtcccagctacttggtaggctgagggaggagaatctcttgaacccaggaggtggaggttgtagtgagctgaggttgtgccactgcactccagcctggtgacagggcgagactccgtctcaaaaaaaaaagagaggccgggcgcggtggctcacgcctgtaatcccagcactttgggaggccgaggcgggcggatcacgaggtcaggagatcgagaccatcccggctaaaacggtgaaaccccgtctctactaaaaatacaaaaaaattagccgggcgtagtggcgggcgcctgtagtcccagctatttgggaggctgaggcaggagaatggcgtgaacccgggaggcggagcttgcagtgagccgagatcccgccactgcactccagcctgggcgacagagcgagactctgtctcaaaaaaaaaaaaaaaaaaaaaaaaaaagagaaaagatgataacctattttttgtaatgtggtaagaactcagttagctgatatgtgaaaatgcttagttggtgcctggcatatagaaagtataaatattatatgctattattattacatgaaaatgatattattgtatactaggatttttctgagagcatgaaaatagttgggggaatcacagctatatatattttttgaacttaaaatttatcataaacttttaattctatttaaaattttcaagttaaaaactgttactccttttctgaagattttctccctatatgtttccttttttttttttwaaaaagtctccttatctattctttttaagcatctagatttctcagaaagtaattagagaaggaattaaacacagagctaggggaggaaagtagaatcatcagaaatctttgttggtccatagctgtaatcattcattattttaacaggtaaaaaatatttgtgattattctcagaatattatatttttgggattatgattatatttgtctttgaagtctgcctttatctcacaaagctttgctttggcttttaataccaggtcttgcttcatgacagtgaattattctccaaaggtccttaacagtgaatgatgagactcacatgacttatttaggttattcccataggcttgcaaatttataccttatatctaaataaactagtcagcaggttaacctggtgtcagcaccgagaaatcaaagaccagtgaaacacagagtgaattattgtcaaaatgactaaagatttcactttccaatacatttctaccttttgkttttctttgatgctatttcattaggtttatccgttgtttcttttagcccaggcatttacaatagtagtatatagcatgagctcattatgtgtttgttgaatggatgagtaaatttgtaatatgaattagtgaccatcacagaaaaataggaaaaataggaaaagaaagttatttaaagttgaggttttggcattaggttttaacttttaactagtagtattttttttttgagactttttttttacggtggtgaaatacacatataaatttaccatttatattattgaaagtgtacaattcagtggcatttaagtacattcacagtgttgtgcaaccatcggccactatctattttcagagctttttcatcaccccaagcagaaattctgtacccgttaagcaatatctcccatatcccctttcctcagccttaggtaactactaatctactttacctatctataaatttgcctattctagatattttataaaagtggattcatattccattgcactggattttcatagtaattggtaacttattgcccttgccatttttactttcacctcagaggtaattgtttaaacttaattgtttgccattagaaagacttggttaccttgtggactgaggtgattttctaatcattgttaacaggcatcaagttcattgactaggcctgtcacttaagagcagttgtacatttacagtttttagttattctcatagtgttctactcctgaagcagcaaaaactagcaaatacttactgcactggcacatacagatgaatgggataatgtctgtcctagcgaacagcctattgccatactgcctaggaaactgtgtatatgtgcgtgtgtgtgtgtgtatgtgtatgtgtatatgatcctctgctgtattatttccagagtgtctctgatgatcttccaactaatttcagtcaaaagtactctaaaattttctctctgccatagattactgtgacaaatatgtatgaataaatgattatcatctatacttccaattctacttaccacttgttatattttccacaaagaacatttctctggaagtttatacataatgtaaccttagctttgctgaagttgtatgtgaattagtttatctgcatcgaagtaatctttcttctgcatatagattcttaataatatattattttgtatttatttcaataggaacaacttttcagcctaatagcaactcttatgtaaatcctgatcacttgaactattttcggtttgctgggcagatcttgggattagcgttgaaccacaggcagctggtcaatatttacttcacacgatccttctacaagcacattcttggtatggctctattattatttctgcagrcatttatttatattgtttttttttcagtttgaggaaaactagataagcagtagtattttggatgagataatttttattttgattggagcccatctgtatatgtaagccattcggggtttgaaggagaaaaaaatgacctaccttttttttttccaaacacctctagttaagttagcctttttttttttttttcawttttwgkgtgtgtatttttatgctaaraatacatttcagtrtgagtatacttaagataattggcatttttgaagtttataataacttcctgaatagttatytcaaagaaagattacattgtaacaatgtgaaagaaacacagaattaatttaacagactttcaaattcaggaatccatttaaaatatgctgtgtgtaggattgtattatattttgcagtttttcagaatatctgtagagggcagtattttaccattaaatagataagggaaggcaaaaccagactataactgctgtatgtttgcattttttaggtattcctgtaaattaccaagatgtggcatccattgatccagaatatgcgaaaaatttgcaatggattttagataatgatataagtgatctgggtctagaactractttttctgttgagactgatgtgtttggagcaatggaagaggtgcctttgaaacctgggggtgggagtattcttgtgacacaaaataataaagtgagtatttcagtttttaccttaaccattgtttgtaacttggccctgatagtttgctagttactctaaattcttctggcacttgyagaaaaacttttactattacagtatcatagcagataaaacgtttaagttaataaaacaatcaaatgttaaattttgaattagaaaggattattttgataattgtgctagctgtgctgagttggttcctaaaaaatcgagagcacttcagctgatagtataaattgggcatatgcattttgagaaatttgattagaaatataagcttaaatgaagatatttgcaaaaattgctctttcatgtttttaaagtrtaatattaaagaattctaatagagaaaagaaatgccagtgtttaagctttccacatacttttgggatccagtaagtttgttcgaccttttgatatttttttgactgtataacttgattatttatttatttatttattgagacgaagtctcactctgtcacccaggctggagcgcagtggtatgatctcrgctcactgcaacctctgcctcctgggttcgagcaattctcctgccttggcctcctcagtagctgggattacaggggtgcgccaccatgcccagataatttttgtatttttagtagagacggggtttcaccatgttggccaggatggtctcaaactcctgacctcaggtgatctgtctgcctcggcctcccaaagtgctgggattacaggtatgagccaccactctcggccttatttttatttattattacctctcctctatatgtattatttaaaaatctttgcatatgttttaaatttcactgttcaaagtcataatatgactttaagatttaatatggcttggtgttttaatatgttatatgaggtatttggagttagaaaatatcatatgaattctagttctgttgcttacaagtagcagcttctggttgaacaatactaaactgcccccctccctttttgtttagctgaattataattccaagacatcttcagaatcaatttaactataagaaacaatgttcactgagccattttttaaactatagatttagtaaaatgtggattattttaaaaagggttatgtttaacaattcttcgaactcagttttctgtagaattrgaataataatacctcccatacagaattgttattagcattttgtaaaatgaaaagcacagcacaaaagttagttgtattgggtagttttctataaaaataggttcttagtttcagatatataaagggaattggaaacttattagcaagcgacataattttaccttttgaaacttaagatactatagtgtacaaaaaaaagagattgaattcttggaaataaagtcaggagttgagttcttacatattcatacttagaaattttaaattctaccctctyattttacatgaaatgacactaatcctaaagagttaatggcaaaactggggccaaaacccaagcctcctaatttcaagtctaatgttcttcatactatatgcaaaattaattgtgtcgaggaagaacttacttgatttttaatgtaagtcatgttaagctctagaagattataatagttaaacacttaatttttaaacctatatgatttgccagtgagtgaaaatatttttagaatctttttttagattgttcaccttgtagcatgtttattattttattttacactggaggcctaccctcaattaagggtaatgaagtcatagaatctttattaagcaatgattgcctttgataagagaaccataaacatgattcttatctgtgaatactatatctggtgaggtttgtcactcctttcagatatatatgacaaagtggaaagatctagtaacaattgtattccagtgctttgggagactaaggcagggggattgcttgaggccaggagttcgagacaagcctgggcaacatagtgagacctcatctctataaaaaataaaaaaattagccaggcctagttttgtgtggctacagtcctagctattctggaggctgaggtgggaggatcacttgagctctggaggttgaggctacagtgagccaagatgacaytactgccctctagcctgagtgacagagcaagatcctatcacttaaaaaagaaaaaaaaatgtgtatgaggtatatctatatttatgcttgcatctcctagcagcacccccccttactatgacatgatttttgtttagatttttaaaatattattaatttttttgtatttgtgtattttaatgaaatctagaaagatggaaaatattgaataaataagaataagtaagaatatgctcacattgaggatatacccttcattgtgcatctcaccagaggtgggaatactattttaatattaaagagcttgaaacttttgtttctcagtttaatactatatatatttacattttgtttaattgcttggttgattagaggctaacttttttaagtaattaggagtgttaatagcagggtcttgattattaatgttatacattctcagctttcattttttttatataaacatttctcacaataaattgagccttttttttctaatgttaccagtatagtaattgtgtatcaaattgttgaggtttcaacatataatgcttatttaataaataacctgattcatataaaactcttaaaaatctttagaaacacatcacattttaccttgcttaaaattgttaagatattcagtttacaaaatgttactttaaaattttcaaaccctgtttcttggaaatactattgatttttggtttgttctttttttttgcttatacattctgttatgaacttttctgttactttagagtcagctttttactttataggtagaaagtttttttgtcatgtttagagttcgactttataattttgaactattgaaacttaaatgacttgctaaacttgttagagggcctttgtaaactgatctccacatgggggagtcccttattcccaagttttattaaaaggctttggtgattataaagtgaaaccaaatagatgaaaatacctttaatttaaaaagcaatatgttaaataaatacaagcaatataggcagatgtatatatattagttccacatttgaaatataatactcttaaattagttagatatggcctcttttgctcatattttcagttctagcatttagaattgaagctgtaggggtttaaatgttagcatcacttttataatattagtcataaagttcatccaggcttggagaaaaaaaagaagataagagtaagatggggcaggtatcagggaatggatgaagtggtatggaagttgaattatagaggtgaagcattaagtggtcgagtaggagtaaggatgggaagaaggaaatgttctgggcttacaggaaggcacagaggtgacagagcatgctttgggaaaccacaagtagatcagagttgtggagcttagcttagatggaaaagtaagcaagtagaaaaagatgatgtggggaagggagaaagtggccaaattctgaaagactttgcatccacaaatagtactttgaaaattattctgaagtctgtggagatgattgcagatgttaaagagggaaatgacatgatcaaatttcagttaagaaaacaaaaagaaacaaccaaactcagcttggagtgtgaaaaatgggttgaaatggggcggtactagagtcaggacaactgagaggaggctgtggcattttggtttggggaagcatgcatgargaattatgtaaggcaagtggcagtgaagatggagaaaatggaatagcttttaagcttttgaggataatagaatttatagaacttggtaattgggaagatgagaaagaggaaggactcaaggataactgccactgttgtggattgggccacctaatgtctgatagtgttgccatcatactcttcatcaacctcattatcattaattctgttttttagtgataataattactacttattgagtgctttgtgtttcatgtatctgaacyatgttctttatgtttctcatttcctgtaacagcctcttgagatagctatttctctttatttagtgtggaaacagccttaatattaaaacatttgacatttattaggtttttataatgtgctaggcactgtttgatgtgccttatgggtattatacttaactctgtgaggtggagatacccctttctacaggtgaggaaacagaagcatataggagctaagtagctttctccatgcagtctgtaaatttcaagcctgcttgtgcaggggccatccagtcttctctgtatggttccaatattagtatacgtgctgctgagacaagcacttgagcctgcttgtaactacaacactgcatttctttagacgttaaataactgcccgagggcacaaaacttgtaactgatgttttcttattttaaatggatgtctataagacagtgtaactgctaggcttctcatttactaaggcagtgaatgtgaacaaagtagcaaatacaaatttagtatgttttaacgatttcattttaatatggttttattgctagtcttatatgattaaatttttagtgctagctttgcatgatttatttaacatacacatttaatgcacatacaagcacaaaatacagacttttatccatagattattgacttaaagtggattctttatatgcatctttagaaaagtatacaggttgagcatccataattcagagtaccccagagtctgaaacttttcgagtactgacatgaagccataagtggtaaatcccatacctgatctcatatgaccagggggcactcagaacacaagcatacaacatacagttgtttcagcatccccaaaggaaaaaagaccctcccagcccccttctgctgcatatatattttttcttcaacacaccaagattccatcatgcaagcatgcccacaagggtaataaatgacatgtgcaggacgcatatgccaagagcaggttccccactgtgccccacgtggggccaaggccgatgtgcatttgtgcattactcatgtcttttcttttcttttgcttattttctgctctgtggtgcagaggtattgttgggaatgtcaaaaaggcctgcagatacccctgtgggtaacagtgacagggaaaagagggagcatttgtctttatccgtagcacagaaagtcaagctgttggagaaactggacagcaatataaatgtgaaatgtcctacagaagagtatggtgttggaatgaccacactatataacttgaagaaacaaaagaataaactgttgacgttctgtgccaaaactgatgaaaagaagttaatgaaaaatagaataacactgcataaagctaaaactgaagatctcaattgtgtatttaaagagtggatttgtcagcctaacagtgaacacktgccacttaatggtatgccgatcataaacaagcaaagatctatcataatgaagtgaaaattgaagggaactctgacttttcaacaggctggttgcagaaatttaagaagagacatgatattcattttttaaagatttgtggcaatagagcatctgctgatcacaaaacagtggtgaaattcagtgaggaatttgccaaggtcattgctgatgaaaatctgatgctagaacaagtctatattgctgttaaaatatcactattttgttgttgttgcctcagaaagacactgactacagctgatgagacagcccctgtggtaggctaccaaggacagaataaatgtgcagggatgtcctagtgcaacaggcaagtgtaagtgtaaatttgccatgataggcaaaagcctgtgttctcaatctcttcaaggagtgaatttcttaccagtccattattatgctagcaaaaaggcatggatcaccagggaaaatattttataccagtggcttgtgtttactgcatggtgactgcaagactttgttattccctaacaactgctctgctcatcatccagctgaaattctcatcaaaaataatgtgtttgccatgtattttccctcaaatgtgacttcattaattcagccatgtgactgaattaatcagtcacattagatcagtgaagaataaatataacactttgttgcatagactgctagcatcagtgaacagaattgtaattgtggaaggttttcaaagggagtttaatatgaaggatgttgtgtatgctgttgccagtgcttggaacacagtgagtaaagacacaattgtgcatgcctggcacaacctctggcctgcaactatgttcagtgatggtgacgagcaaatgtgtgactttgaaggattctgtatgtcaagtgaaagaaatgatgtttgactgccttacatatgcaaaaaaatataccttcagagtttgttagtgaactgaaagaagtggatattgaaaaggtctgtaacactggttataaggctccaattgctcattcattgatgatgaagtagccaaaatggttctgagtgtaggtgatggtgataatagtgatgatgaagataacattaaaactgaagaagaagtgcctatagatgacatggtgaaaatatggcattcacaacagaacaagaaatcatgttagtttataaaatcaaagagagatttctaaggcaaacaccattgttaatgaggcagataaccctggaggaaacatttaaaaatccatccagcagaatgactcctcattcctagaagacccacttgctgtcctctcaactgcttcttctcaccttaaaacataaaataatgtacaggccgggcatagtggctcacacctgtaatcccagcactttgggaggccgaggtgagtggatcacctgaggtcaggagtttcagaccagtctggccaatatggtgaaaccccgtctctactaaaaatataaaaattagctgggcatggtagtgcgtgcctgtaatcccagctacttgggaggctgaggcaggagaattgcttgaacctgggaagtggaggttgcagtgaaccaagatcacagtgccactgcactccagcctgagcaacagagtgagactctgtctcacaaaaaataaaaagtgtgcagtactttttttttgtttgtttgtttgagataaaatcttgctctgtcacccaggctggagtgcagtggtgggatctcggcccactacaacctttgcctctcaggttcaagcagttctgccttagcctctcaagtagttaggattacaggcgcctaccaccacacctggctaatttttgtatttttagtaggaatgaggtttcaccatgttggccaggctggtctcgatatcctgaccccaagtgatctgcccacctcggcctcccaaagtgctgggattataggcgtgagccactgagcctggcctacagtaccttttaatcaaaacaaagcattccagatggaaacagaaagcctgctgtttgttgcttctgtttaacagctggcacagatattctggtgatgcctctgtgctgctgtagctaccctgaacatgtgatttttttcactgtattaatggtatgccccttttttttttttaaccattaagtagttaggtgtaagtgtaagaaaatggttgcttattggtaacatgtaaatttggtcaggaataatggtgatgtcaaacaaccacagattgtgtctacaygggtggctgagatagtgatccctttactttctgatggttcaatgaaacaaattcatgttgagacttgggtgtcattgccaagataactcattttgtatatacagatattccaaaatctaaaacactttgaaatttgaaacgcttctggtcccaagcattttggataagggatactcaatctgtactatgagatttgtttttttactactctgaaaacttttaaaacaggtagtgtaagtctacagttttttcatgttgagtatacgtgtgtgttattaggtgggtttgaatgatctttttggtatcttcctgtcaacaatgaaaacatgaaaacacacttctccttgcattttagatagtatattctagaaattaactttaaaaattaccaaacctataaaatggtaacctgaatgaccagtattttctttttatttgctgggaaatttgtttatttcttatttgactgattcttttttttttttttttttttttgagatggagtcttactctgttgcccaggctcgagttcagtggcgcgatctcagctcactgcaagctccacctcccaggttcacaccattttcctgcctcagcctcccgagtagctgggactacaggtgtccaccatcatgccaggctaattttttgtacttttagtagagacggggtttcactgtgttagccaggatggtctcgatctcctgacctcgtgatctgcctgcctcggcctcccaaagtgctaggattacaggtgtgagctaccgcgcccggcctttttttaaaattatactttaagttctgggttacatgtgcagaatgtgtgggtttgttacataggtatacacgtgccatggtggtttgtggcacccatgaaaccgtcagctacattaggtatttctcctaatgttatccctcctctagccccccaccctcagcaggccctggtgcgtgatgttcccctccttgtgtccatgtgtttctcattgttcaactctcacttgtgagtgagaacatgcagtgtttggttttctgtccttgtgatagtttgctgagaatgatggtttcccacttcatccatgtccctgcaaaggacrtgaactcaccattttttatggctgcatagtatttcatggtgtatatgtgccacatttccttaatccagtctatcattgatggacatttgggttggttccaagtctttgctattgtgaacagtgctgcagtaaacatacgtgtgcgtgtgtctttatagtagcgtgatttataatcctttgggtatatacccagtaatgggatcactgggtcaaatggtatttctagttctagatccttgaggaatcgccacactgtcttccacaatggttgaactaatttacactcccaccaacagtgtaaaagtgttcctctttctccacaacctctccagcatctgttgtttcctgactttttaatgatcgccattctaaatggtgtgagacrgtatcttattgtggttttgatttgcatttctctaatgaccagtgatgatgagcattttttcatgtgtctgttgggtgcataaatgtcttcttttgagaagtgtctgttcatatcctttgcccattttttgatggggttgtttgtttttttcttgtaaatttgtttaagttctttgtagattctggatattaaccctttgtcagatggatagattgcagaaattttctcccattctgtaggctgcctgttcactctgatgatagtttcttttgctgtacagaagctctttagtttaattagatcccatttgtcaattttgtcttttgttgccattgcttttggtgttttagacatgaagtctttgcccatgcctatgtcctgaatggtattgcccaggttttcttgcaggatttttatggtcctaggtcttacgtttaagtctttcatccgtcttgagttgatttttgtataaagtataaggaaggggtccagtttcagttttctgcatatggctagccagttttcccaaaaccatttatttaaaaaggaatcttttccctattgcttatgtgtgtcggatttgtcaaagagcagatggtggtagatgtgtggtgttacttctgagggctctgttctgttccattgttctatatatcgttttggtaccagtaccattctgttttggttactgtagccttgtagtatagtttgaagtctggtagcatgatgcctccagctttgttcttcttgcccaggattgtcatggctatgcgggctcttttttggttccatatgaagattaaattagttttttccatttctgtgaaaaaagtgaatggtagcttgatggagatagcattgaatctataaatgactttgggcagtaaggccatttttatgatattgcttcttcctatccataagcatggaatgtttttccatttgttcgtgtcctgtcttatttccttaaagcagcggtttgtagttctccttgaaggggttcttcacatcccttgtaagttgtattcctaggtattttattctcttaatagtaattgtgaatttaagttcactcatgatttgtctctctgtttgtctcttattggtgtataggaatgcttgtgatttttgcacattgattttgtatcctgagactttgctgaagttgcttatcagcttaaggagattttgcgctgagacaatggggtgttctaaatacacaatcatgccatctgcaaacagggacaatttgacttcctctcttcctatttgaatacactttattgctttctcttgcctgattgccctggccagaatttccaatactatgttgaataggagtggtgagagaggacatccttatcttgtgccagttttcaaagagaatgcttcccgtttttttccctattcagtatgatattggctgtgggtttgtcataaatagctcttattactttgagatgcattccatcaattcctagtttactgagagtttttagcatgaaaggctgttgaattttgtcaaaggccttttttgcatctattgagataattgtggtttttgctgttggttctgtttatttgatggattacatttattgattgtgtatgttgaaccagccttgcatcccagggatgaagccgacttgatcgtggtggataagctttttatgtgctgctggatttggtttgccggtattttattgagtatttttgcattgattttcatcagggatattggtctaaaattctctttttttgttgtgtctctgccaggctttggtatcaggatgatgttggcctcataaaataagttagagaggattccctctttttctattgattggaatagtttcagaaggaatggtaccagctcctctttgtacctctggtagaatttgrctgtgaatccactggtcctggactttttttagttggtaggctattaattattgcctcaatttcagaacctcttattgatatattcagagattcaactgcttcctggtttagtcttgggatggtgtatgtgtctaggaatttatccatttcttctggattttctagtttatttgcatagagatgtttatagtattctctgatggtagtttgtatttctgtaggattagtggtgatatcccctttataattttattgcatgtattttattcttctctcttttcatctttattagtcttgctagctgtgtatctattttgttgatcttttcaaaaaactagttcctggatttattgatttgtttgaagggtttttcatgttcctgtctccttcaattctgctctgatcttagttatttcttgtattctgctagcttttgaatttgtttgctcttgcttctctagttctttyaattgtgatgttagggtgttgattttagatctctcctgctttctcttgtgggcgtttagtgctaaaaatttccttctacacattgctttaaatgtgtcccagagattctggtacgttgtgtctttgttctcattggtttcagataacatttttatttctgacttactttcgttatttaccctgtagtcattcaggagcgcgttgttcagtttccatttagttgagcagttttgagtgagtttcttaatcctgagttctaatttgattgcactgtgctctgagagacagtttgttgtgatttcttttcttttacatttcctgaggagtgttttacttccaattatatggtcagttttagaataagtgcgatgtggtgctgagaagaatctatattctgttgatttggggtggagagttctgtagatgtctattaggtctgctttgtccagagctgagttcaagtcctggataaccttgttaaccttctgtctcactgatctgtctaatattgacagttaggtgttaaagtctcccattattgtgtgggagtctaagtctctttgtagatctctaaggacttgctttatgattctgggttctcctgtattgggtgcatacatatttaggtcatttagctcttcttgttgcattgatccttttaccattatgtaatgtccttccttgtctgttttgatcttctttggtctaacgtctgttttatcagagaccaggattgcaacccctgcttttttttttttgctttccatttgcttggtagatcttcctctatccctttatgttgagcctatgtgtgtctttgcacgtgagatgggtctcctgaatacagcacactgatgggtcttgactctatccaatttgccagtctgtgtcttttaattgggtcatttagcccatttacatttaaggtttgtattgttatgtgtgaatttgatgctgtcattatgatgctagctggttattttgcccatttattgatgcagtttcttcatagcgtcgatggtctttacagtttggcttgtttttgcagtggctggtaccggttgttactttccatgtttagtgcttccttcaggagctcttgcaagtcaggcctggtggtgacaaagtctctcagcatttgcttgtctggaaaggattttatttctctttcacttatgaagcttagtttggctggatatgaaattctgggttgaaaattcttttctttaagaatactgaatattggcccccattctcttctggtttgtagggtttctgcagagagatctgctgatagtctgatgggcttccctttgtgrgtaacccgacctttctctctggctgcccttaacattttttccttcatttcaaccttggtgaatctgacattttatatgtcttggggttgctcttctcgaggagtatctttgtggtgttctctgtatttcctgaatttgaatgttggcctcccttgctaggttggggaagttctcctggataatatcctgaagagtgttttctaacttggttccattctccccgtcactctcaggcacaccaatcaaatgtatatttggtcttttyacatagtcccatatttcttggaggctttgttagtttcttttcattctttttttctctaatcttgtcttttcactttatttcattgatttgatcttcartcattgacatcctttcttccacttgatcgaatcggctattggagcttatgtatgcttcatgaagttttcatactgtggttttcagctccatcaggtcatttaagctcttctctacactggttattctagttagccattcgtttaaccttttttcaaggtttttagcttcctggtgatgggttagaacatgctcctttaatttggagaagtttgttattaccaaccttctgaagcctacttctgtcagttcatcaaactcattctccatccagttttgttccattgctggccaggagttgtgttcctttggaggtgaagaggtgttctggtttttggtattttcagcctttctgctctggtttctccccatctttgtggttttatctacctttggctttgatgtttgtgacctatagatggggttttggtgtggatgtcctttttgttgatgttgatgctcttcctttctgtgtgttagttttccttctaacaaacaggccccttagctgcaggtctgttggagtttgctggaggtccactccagaccccatttgcctgggtatcaccagcggaggctgcagaacagcaaatattgctgcctgtaccttcttctggaagcttcgtcccagaggggcaccygcctgtatgaggtgtccagtcaggctacacgggagtcagggacccacttgaggaggtagtctgtctgttctcatagctcaaacactgtgctgggagaaccactgctctcttcagagctgtcaggcagggatgtttaagtctggagaagctgtctgctgccttttgttcaggtacgtcctgcccctagaggtggaatctagagaggcagtaggccttgctgagctccagtggccaccgcccagttcaagcttccctgcctctttgtttatactgtgagcagagaacctcctactcaagcctcagcaatggtggacgcccctctccccgccaaggtccagcgacccaggtcaatctcagactcctgtgctggcagcaagcaaggctccatgggcatgcgaccctctgagccaggcacagaagggaatctcctggtctgccagttgcgaagactgtgggaaaagtgcattatttgggcaggagtgtaccattcctccagggacagtcagtcacggcttcccttggctaggaaggggaaaacccctgaccccttgcgcttcccgggtgaracgacaccctgccctgctttggctcgccctccgtgggctgcacccactgtccaaccagtcccaatgagttgaaccagtcacctcagttggaaatgcagacatcacccatcttctgtgtcagtctcgctgggagctgtagaccagagctgttcctattcggccatcttggaaacgactcttcgatcactattttcaatgactgaatttgtctcaaggaagctgaagtaataggatttttatcagactatcaattcttataactagtttgtgactttaataataagtgtgtgtgtgtgtgtrtatatatatatatatatwttttttttttttttttgagatggaatctggctctgtcactcaggctggggtgcagtggtgtgatctcagctcactgcaacctctgcctactgggttcaagaaattctcctgcctcagcctcctgagtagctgagactacaggcatgcaccaccatgcctggctaattttttgtgtttttagtaaagatgacgtttcaccatgctggcccagctggtctagaactcctgaccttgtgatccacccacctcagcctctcaaagtgctgggattacaggcatgagccaccgtgcctggcaggttgtttatatttctttggggtcagtggtgatatctaccttatcatttctgattgtgtttacttcattcttctcacttttcttcattagtctagctagaggtctatctattttattaatattttcaaaaaatcagctcctggattcattgaattttttgaagggttgttttgtgtctctgtcttcttcaattcacctctgatcttggttatttcttgtcttctgccagcattggagtttgttcgctcttggctctctagttattttagttgagatgtcagattgttaacttgagatctttctagctttttgatgtgggcatttagtgctataaatttccctcttaacactgctttagctgcatcccagagattctggtacattgtctctttgttctcattagtttcagataaattcttgatttctcccataattttgttgtttacccaagagtcattcaggagcaggttgttcaatttctatgtagttgtgtggttttgagtgaatttcttaatcttgagttctaatttgattgtgctgtggtctgagagactgtttgttatgatttcatttcttttgcatttgccaaggaaagttttacttctgattatgtgatcaatttcagaataagtgtcatgtggtgatgagaagaatgtatattctgttgaatttcggtgggaagttctgtagatatctatcaggtccacttgatacagagctgagttcaggtccagaatatctttgttaaatttctgtcttgatgatctgtctaatattgttagtgggctgttaaagcctctcactattattgtgtgggagtctcagtctctttgcagttctstaagcacttgttttttgaatttggtgctcctrtgttggttgtatatatatttatgatagcacttcttgttgaattgaaccttttaccattatgtaatgcccttgtctttttttaatctttgttggtttaaagtctcttttgtcagaatctagggttgcaactcctgcttttttctgttttccatttgcttggtaaaatttcctccatccctttatttagagcmtgtgtgtgtctttgcatgtgagatgggtctcttgaggacagcatactgatgggtcttggctcttcatccagcytgccattcttggtcttttaattggggcatttaacccatttacatttaatgttagtattgttatgtatgaatttgatcctgtcatgacgatgctagctggttattttgcaggcttggtttatgtggttgcttcatagtgtcactggtcagtgtacttcagtgtatttttgtagtggctggtaacaattttttctttccatatttagttctttcttcaggagctctggtaaggcaggactggtagtaacaaattccctcagcatttgcttttctgaaaaggatcttatttctcctttgcttataaagcttagtttgtccagatatgaaattctcagttggaaattcttttctttaagaatgttgaatattggccaccagtctcttctggcttgcagggtttttactgagaggtttgctattagtctgaagggtttccctttgtaggtgacctggcctttatctctggctgcccttaacagcttttctttcatttggaccttggggaatctgatggctttggggaatctgatgtgaagacacatctgattatatgtcttggggttgatctttttgtggagtgtattactggggttctctgcattwcctgaatttgaatgttggcctgtcctgataatctgggggagttctcctatatgatatcctgaagtatgttttccaacttggttccattctcctcgtctctttcaggtacctcagtcagtcataggtttggtctctttacataaccccatatctcttggaggttttattcattcctttttgttcctttttctctattattgtctgcctgtcttattttggacdgtcttcaagctctgaggttctttcctctgcttggtctattctgctattgatacttgtgattgcattgtgaagttctcatgttgtgtttttcagctccattagatctgttatgttcctctctaaactgactgttgtggctgtcagctcctgtattgttttattgtgattcttagcttctttgcattgggttaaaacatgctcctttatctcagtgaagtttattattacccaccttctgaagactatttctgtcaattcagccatctcagcctcagaccagttctgtgcttttgctggagaggtgttgcggtcatttggaggagaagaggcactctggctttttgagttttcagcatttttgtgttgattctttctcatctttttggccttaatctacctttgttctttgaggttgctgacctttgactgaggtttttgtggggtctttttgttgatattgttgttgttttctgttsatttgtttttcttttagtaatctggccactttactgtatatagggctgctgtggtttgccaggggtcctctccagaccccagttgccttggtttctcccatacctggaggtatcagcagagaaggccatgaagcagcaaagatggcaggcaggtccttcctctggaagctctgtcccagggggtaggtacttacctgttgttggcctgcatgcacctataagaggtggctggagacccctgctgggagatcttaacaagtcacaaggaatgggatcaggracttgcctaaagaagcagtctggctgctttttggtagagcayatgtgctgtgttgaaggggaccctaccttttctggaccgcctgtattctccaaagccagcaggtgggagcagctgagttgactgaaccccagacatggcagtcaccccttgtcccyggagctcggtcccagtgagataccaaagcrctgtccttagaacccttagccagtgtatttctacacaacatgaacacttgaaatgttactgggcaacagtagtgggtgttcatagtaaaatttgtattgtcaagataatattaatttgttttattatgtttgaaggtgtactgtttagcgaggcagggaaacattttagaagcagttcgacttagatttttccattaaacacagctctttcaagtatttgaaaaactcttatattactgaaaaattaagtgtttatgatagctaggatttcattattttattgaaaaataatttagttcaactgccatccacatttgaattacttaattggcatgaagactgggatgtgaaggagctgattttcaaaaattggtatcaataactatgaactgggttactgaaatacatgtggaaaataataaatattaaaataaatggaaggaaaagtgtgataaagagtattatatttgtaaaaattaattaaaaaataaaatgtaggaggaaataataggaattaattggtaaaaaatagagtatatactattctgatagatatggaatgcaattaaaataggtaacgttcacatgagcaagtcataaatcttttattttcatgcttcatgacttgttaaggtcttccacagagattattgagtcacactttaagatggtaaagccaaaacctcttgggaaaaagtctctttagggaagaatagggtctttcctggcatcttaaaaaatataatatataattaattaattatatgaatggggcagaaaacttttagtacatccagtgaacaattttagtgagagtagacataaactgaaatatagtcatgtgctaatgcaggtatcactgctgtaatcactatgaaatattttatatatgttatttcccgggttggactccagaaatttagtgtatgtttctgtttgactgttgggtacacatttctgtctccctctctataataagtacctgtatgtgacttgtagctgattaattcctatatagtagagaaaaacttgcacctttggttggtgggaagtggaatttggggtgagactagattgaatagcagagatggtagctttccttgtgttaaattataaaaggagccacacagggtttcgggagagctgtatggaatctactgtgacacttctgtagctctgagagctgtgaagaattcatagctagcagtcatatagaacttgctggctcagtgcctttttttggtctttttttcccctgttttttttttttgtttggttttttttgtttgtttgtttttgaacagagcatsagattagtgccaaaaaaaaaaaaataaaggaagagggctaaaacagagtttcttccctgttagagtattaattcctagtaggtaggagctatatacctgctatagcatattgtttttaactcacaaagtttcacttataactaattaaaaaatatataaatgataacctaatagtttatatgtgtatacaggcacatactctttctctctctgtatataattcattttgttctaagccaaaatacatttttaaattaccagttattattattatttttttctttaagagacaggatcttgccctgttgcccgggttggagtgtggtggcacggtcatagttcactgcagactcgaactcctgggctcaagcaatgcttccacctcagcctcccctagtaactaggagtacaggcatgtgccaccatgccctctgcttattaccagttaaattttaagtaacaatattttctatgattatcacgtattttaaaataaaatgggtgaatatgtagattaccttaactcagaattgaattgactatgctacaaagaatgattttaccaagttctaagtatgtgttaagtgaatttgatgatggtatgcattcattcttcacatattttttgaatactttcaaagtggcagccactttttagaagttggtatatatcctggtaaaacaaagttcctgtctgcagagagattacattctaatgagacatttcagtgagaatgatctagaagtataaacacattggggcccggacaagcttgtgttttgggaatagccagaaagccagtgaaactagaattgagtgaatgaatgaactagggggakaatggaaagaagtgagatcagagagcaaggcagaggccagatcatttagggccttagagaccaggaaaggaatttggatgttactccagatgtcatgagaagtcattatagggttttgagcaagagagctgcyggatctgagttatttacatgtacatacacacacatgtatatctatgtgtatatacacatatatatatttttaaatcactctggctaagatgtggagaagcatcagtacaggggcaaaaatggaaacagggacaccagatgttgcagtaatccagatgagaagtgatgatagcttggactggggtgctgaaatggaggtagtgagacaagrtaagattgagaatatttttttaaaggtagatctgatagtatcagctgaaatagggtgtgagagaagtcatggatgattgagtccctggaattttttcctcaacagcttagtgaatagtggcttgctgatttgctgagatgtatgagtgttggtgtcaattttattttaaacctttacctcttaaataagaaataattatattaacattaagtatgtaaraggtttttgaaaagtcatcatgaaaacttctttttcaacaggcggagtacgtccagcttgttacwgaacttcgaatgacaagagccattcagcctcagatcaatgcttttttacagggcttycatatgttcattccaccctccctcatacagctttttgatgaatatgaattggtaaggaaaaacatcagttcttatgttgtaacacaacaacaaaaaactctagttgatgtaattcagaaataattgtggagtattatgatgamtgaaataatgtataaatgagacaaaatggtttaatgtccatttttagagatttratataaaatttatggatgagcatctcttaagcttaataaccagataagcagctccttaatgtgaagtgaggtgaggtggtgacaaactaaaatggaatatattcctgtttsttctatatgggagatgttgaaggccagtcttcctatatacacagtattctacattatttctgaattttttatttgaccacatgaygtaaagggcgctgatactaacttcttaaacttctaaaaagaattaagaaggtttttcttattgtatagtattgtcttctccagtttcttatattgccatatatataattttataattctttatttcaaacctatggagtccatcgtctttgccatcctctagtccctaatgaatgtttggttttgctactttaatttgcctttattgtactgtgatccaacaggatttctaattttatatgatttatgtctgcatttttctctattttctttttctctttagttttggtaatttggagaattatttttaaactctttgagttgtctaaatcttaataaagcacagtattttaaatagcatatagctgctttcttacctaaaagtatataatttggaatagtaagttccagatcagtggaaatgttttatttagtttttattctgtctcagaaaattagttttaccccatgcctttcattttagtatatggatacagatacggatatatacctttaattttacatatgtatcagtatttttaatttatcattcatagtatatcttagtataatagtgaataaaatttgctaattaattttgaagtccattgtgatttagtttcattaaatgtaagttttgaggtttttttgattgtttttaagctgtacagttaatggcttcagttagcatagatttgtctagtttttatgtaacaatagaagtgattttcagcatttaaaaatggaggactatttgagctattatattattagacctgactgmaatatggcttttcctgtactgtgcttggattaaattagccttttgaaattcaaaacagagcattagttatttgctggacctatatgtatgtaaaaaacaaatagcaacaacaaaaataattgatgaaaactttgccttgtaatttactgatatcaataagtttataaaactttgggttatgatatacatgcagaaaaggacacacatcataaatgtatagcttgataagttttaacaaactgaacatacccatgaaactaacacccagatgaagaaacagaaattctagcaccccatatgtcactctgtcatctccctccagtcattctcccaccttaagggtaaccattctcctgacttctaaaatcatagacgagattcgcctattttagaattatgtaaatagaatgtatctggctttcttagctcaagtttttgtttgtgggaatcatacatattgttgcatgcagttggtaatttgttcattttaattgctgtatagcatttcagtttcctttagtcttttctactcttgatgaacatttagtgggtacttttcagtttcaggctctttcaagtactgctgctataaacatgcctttaggaaaacataagtttgcattctgtaggttatatgccttggagtggaattgctgggacataggctgtgcatgtaccccatttcagtagataggagcagatagtttctcaagtgatgcatcagtttacactcccattaggaggtgtgagagttctgggtgttctgcattctcactagcatttgataattttccatctttttcatttccattctggtaattcagtagtggtctttccttgagattttaatttgtatttacctgatagctaatgaagttacacaccttttatgattatagccatttgtgtactgttttcaaagtgtctatttaagtaatttgcccacttttctattgtgtttttttttctttttactgatttgtaggactctttatgaattcttttataagagtcttttatcagatatatgtattatgaatattttctactcaggtcttttcagtgaataaaaattttggggtttaacatagttcagtttatcagttttttttgttttgttttgttttttttgatggaagaagctttttgtgtcctgttttagaaactgtttcttactccaaggctgtgaagatatttttctgtgttttcttttaaaagctttattcctttatctttcacatttaggtctgttactggtaagtttttaattgtggctcttacattaaaatttagatcaggttcctagtttgtcttggactctgactttactaagttgagctgattcacatttgggaagagcaacattgtaggcatggtcttgatttatacagtgataataataattattaagcatttagtatttgccaggtattttatatgtattaactttaaaaacgctcacaaaaaatctcttgaggtgagtactattgtccccattttacagatgagaaaactaggccaaagaagatatggaacttgttcatggtcatagagcatgtgttagtgataggctatgaactcatgttccctgaccccagataccatcactgttgccagtctgctgcttggtggcatgagtaatcagagggacttggctttagaactttttgtgtgactttgtgtctttyataggggagggctatgctgcactgagaaaggaaacttttaaaaaatttggtacaaacgtctaaactagatgtgcatctgagttaaaggattcaggttaaattctagagttttagtgaggagaaggtatcgagtagctccagtgtactgaactggaggtgtagtcatccattgtagacagaaggcatcaagagatgactgtggactgttcttccatactgtgctgcttgtgaatttatccatgatagaaccagaatataaaaacactgaatcgtgtgatgctaggtaagctgatgcctatgaatactttcatgattcagtttctaactattagtatgagttatataccttacacatagttccaacagatgaattcaattattttgttgtattaaaaaarttgattggggcttaaaatatttttcttaatatgtacattttattctggaattctcatttcatctgtttgtttttggtcagtttagtaaccagatgggataataaagatcctttctttttcttcttcttgaaaaaaaatcgtaacaattaatgtgatattcatgaagtgcttcaaatttcttgagagaatataatgttagtcatttttattcataattatgaatamtgaaagcatacttaatattattgaaagcttatcttcagcctagaagggaaaaggattaaactcatgaattgtaagacatgcgtaaagcctgtcccactcccttttagcaaacctatatcagagtcctgycagggaacagaatttctccagatggttcaaatatcgaaactttaacaaagggactatgacagaggtatgggcagtgttaagaataaacaatgtctagtgagacatccacagactggcaacagggaaagcctttatcatccctaggactgaagagacaggtagaggaattactgtgaagagccccgtgggagcctgaaccaccaaggaggggccacctgatggtagccatacttgaggagccatagctactgcaaagagatgctgaagcagtgggggagcagagagtaccctcacctccagactaactgcctatgtttcccaggctccaaacccaaaccaaagccagctggcaagacagccagcaggcaaagcagccagtctgcagtgcaaaggaagctagagaatgtatttgggggtggtcaatgtagactagactgtcttcatctaggaaaaggattctataacactgtgamtaggactaaaacacaccctatactagcagttctaaaactttttggtcttaggaccccttaaaacaaaagagtttttgtttatgtgggttatgtcaatggatatttacttgaaattaaaacagaaatgtaaaatattttattcacataaaataatccattattatattaacatagagaacatttgaaaaactaaaattgcattttccagaacaaaacagaaacagtgggaagactggtactgtttaacagttttgcaaatttctttaatgtctagcttagtagaagacaaatgggcccttacaactgcttttgtgtataatctgttttggtatgttgtttggttgaaatatatgaagaaaactcaacctcatacagataagttggaaaagggagaacctcatggacccactgagtagatctcggaaaccctcaagagttctcagatgttgccttatatcaatcttatttaaggtacaaggtcaggtatatgttatgagtagtttactataggagacatgattttgaatcacagggcatctacatccctgtaataagaaatcctggccgggcacggtggttcacgcctgtaatcccagcacttttggaggctgaggtgggtggatcacaaggtcaggagattgagaccatcctggctaacacggtgaaacctcatctctactaaaactacaaaaaaattagccgggcatggtggcaggcgcctgtagtcctagctacttgggaggctgaggtgggagaatggcgtgaacccgggaggtggagcttgcagtgagccgcgccactgcactccagcctgggtgacagagccagactcggtctcaaaaaaaaaggaaatcctgatattctgaatcatcagtgtaaagtgtaggccaatcattgcctcccctgactatgtaagcatctctaactgtgatatatggactgattcagagaagtggacaagctcttttcatgtcctcttttcccttggaaaacaaaaaggtaaatactttgccattcttaatttcatttttacttatacgattgagattttgtgtctttgatgatcttcctggataaaataaacctatcaagtcattaggaaaattgcattttttttgactttggagaaaattgactttacaggatccaaattattccagaattgaattcctaaaaggcctaaatcttttttaaaaatygtaactatttttatattacctcctttttcctcatgataatgatttcttgatgactttccccttgtttagtcaagtatttattcgggtctttgttgtcactttcatgttgagaatactgtctccttacagaagttaacaaaattgcaaagaattgtaaaaatataaagtaaaccaaagataatgttcataaaacttttgcacatataaactgttgttgcatatgttcacacataaacatataaactataatctcttatgttttaatgaaattgtatcaatgtggaaacatctccacatcttataatatttgagattatcagcgtcaaggattctctctcatgtaatgcttgttgttgatgacatgcaggaactgtcacaaaaatatatcagttttacatgggattagtttctaattatggcaaatttaccacttaaatataataacttttttccctaaagaaaattattgaaatatttttcttcttcccccaaggagctactgctttctggcatgccagaaattgatgtgagtgattggataaaaaatacagaatacacaagtggctatgaaagagaagatccagttattcaggtaaaatttctctagagcttagartgaagttaagttttgccgtttaattttgtaagcttttcagcactattggatgaaaacttacattaattaacaaagtaaagtgtttacccaaattattcttgtgggaatagtgcatatgaaagctttgcatgaaatcatttttggtaaacgagttttgtagaataaaatgtgctttatgaatattgcatatttctctggtattgagaagtctacaattgctctgaaatatgagctaagttttttgttcttgttgttagtggttctgggaagttgtagaagacattactcaagaggagagagttcttctcttacagtttgttacgggcaggtaagcagtatttttatgawaatatggaaataatttaatgtattctgcttttaatggcttagagataactaaaataaggaattattactctgaattgtcagtaacttaccaccctttccactgttttaggtattaaagaaagatttattttggtattaaagataagacatttatagtagtgagcaatcatgtttacttaatatattaaaaagcatctccarttaggattatcagtatattgtactttataatttggaaatctttttgctctgcaggtaggtcaatgatagtagccaaatttttaatatttgtatattattttaatattttaatatttgtatattgctggtttggtttaatagtaaggcaattcagtttatcctggttaactctgtattacccatacacaacagtttttctgtaattcaaagtaaactttaaagtgtcaagattcatggcctaaaaaataatttgtggtactacacttctctgaaaagttcacttttgraaccagttaaatataatagatattagaaaactagatgatttaaccatcttttagcttgtatttctgaaagatgtaaaaaaagtctgattttcattttggataacagaattttatcttctatttatgaaaatgtagtttggtttttttcattataaatgtacatatttctcctaggaaagttagaaaatagaaaattagaataagaaaaaccatagcccatcagccataaccactataaacaatttaatatattttcttctatgttttttctgcatatttaaaaagcataatagtgaatatatatctacataaaatacatatatataatttttttttattattatactttaagttttagggtacatgtgcacattgtgcaggttagttacatatgtatacatgtgccatgctggtgcgctgcacccactaactcgtcatctagcattaggtatatctcccaatgctatccctcccccctccccccaccccacaacagtccccagagtgtgatattccccttcctgtgtccatgtgatctcattgttcaattcccacctatgaatgagaatacgcggtgtttggttttttgttcttgcgatagtttactgagaacgatgatttccaatttcatccatgtccctacgaagaacatgaactcatcattttttatggctgcatagtattccatggtgtttatgtgccacattttcttaatccagtctatcattgttggacatttgggttggttccaagtctttgctattgtgaataatgccgcartaaacatatgtgtgcatgtgtctttatagcagcataatttatagtcctttgggtatatacccagtaatgggatggctgggtcaaatggtatttccagttctagatccctgaggaatcgccacactgacttccacaatggttgaactagtttacagtcccaccaacagtgtaaaagtgttcctgtttctccacatcctctccagcacctgttgtttcctgactttttaatgatcgccattctaactggtgtgagatggtatctcattgtggttttgatttgcatttctctgatggccagtgatgatgagcattgtttcatgtgttttttggctgcataaatgtcttcttttgagaagtgtctgttcctgtcctttgcccactttttgatggggttgtttgtttttttcttgtcaatttgtttgagttcattctagattctggatattagccctttgtcagatgagtaggttgtgaaaattttctcccattttgtaggttgcctgttcactctgatggtagtttcttttgctgtgcagaagctctttagtttaattagatcccatttgtcaattttgtcttttgttgccattgcttttggtgttttagacatgaagtccttgcccatgcctatgtcctgaatggtaatgcctaggttttcttctagkgtttttatggttttaggtctaacgtttaagtctttaatccatcttsaattgatttttgtataaggtgtaaggaagagatccagtttcagctttctacatatggctagccagttttcccagcaccatttattaaatagggaatcctttccccattgcttgtttttctcaggtttgtcaaagatcagatagttgtagatacgtggcgttatttctgagggctctgttctgttccattgatctatatttctgttttggtcccagtaccatgctgttttggttactgtagccttgtcgtatagtttgaagtcaggtagtgtgatgcctccagctttgttcttttggcttaggattgacttggtgatgtgggctcttttttggttccatatgaactttaaagtagttttttccagttctgtgaagaaagtcattggtagcttgatggggatggcattgaatctgtaaattaccttgggcagtatggccattttcacgataatgattcttcctacccatgagcatggaatgttcttccatttgtttgtatcctcttttatttccttgagcagtggtttgtagttctccttgaagaggtccttcacatcccttgtaagttggattcctaggtattttattctctttgaagcaattgtgaatgggagttcactcatgatttggctctctgtttgtctgttgttggtgtataagaatgcttgtgatttttgyacattgattttgtatcctgagactttgctgaagttgcttatcagcttaaggagatttggggctgatacaatggggttttctaaatatacaatcatgtcatctgcaaacagggacaatttgacttcctcttttcctaattgaataccctttatatccttctcctgcctaattgccctggccagaacttccaacactatgttgaataggagtggtgagagagggcrtccctgtcttgtgccagttttcaaagggaatgcttccagtttttgcccattcagtatgatattggctgtgggtttgtcatagataactcttattattttgagatacatcccatcaatacctaatttattgrgagtttttagcatgaagggttgttgaattttgtcaaaggccttttctgcatctattgagataatcatgtggtttttgtctttggttctgtttatgtgctggattacatttattgatttgcgtatattgaaccagccttgcatcccagggatgaagcccacttgatcatggtggataagctttttgatgtgctgctggattcgttttgccagtattttattgaggatttttgcatcaatgttcatcaaggatattggtctaaaattctctttttttgttgtgtctctgcctggctttggtatcagaatgatgctggcctcataaaatgagttagggaggattccctctttttctattgattggaatagtttcagaaggaatggtaccagttcctccttgtacctctggtagaatttggctgtgaatccatctggtcctggactctttttggttggtaagctattgattattgccacaatttcagatcctgttattggtctattcagagattcaacttcttcctagtttagtcttgggagagtgtatgtgtcgaggaatttatccatttcttctagattttctagtttatttgcatagaggtgtttgtagtattctctgatggtagtttgtatttctgtagcattaatggtgatatcccctttatcattttttagtgcatctatttgattcttctctcttttttagtcttgctagyggtctatcaattttgttgatcctttcaaaaaaccasctcctggattcattaattttttgaagggttttttgtgtctctatttccttcagttctgctctgattttagttatttcttgccttctgctagcttttgaatgtgtttgctcttgcttttctagttcttttaattgtgatgttagggtgtcaattttggatctttcctgctttctcttgtgggcatttagtgctataaatttccctctacacactgctttgaatgcgtcccagagattctggtatgttgtgtcgttgttctcgttggtttcaaagaacatctttatttctgccttcatttcattatgtacccagtagtcattcaggagcagcttgttcagtttccatgtagttgagtggttttgagtgagtttcttaatcctgagttctagtttgattgcactgtggtctgagagatagtttgttataatttctgttcttttacatttgctgaggagagctttacttccaagtatgtggtcaattttggaataggtgtagtgtggtgctgaaaaaaatgtatattctgttgatttggggtggagagttctgtagatgtctattaggtccgcttggtgcagagctgagttcaattcctgggtatccttgttgactttctgtctcgttgatctgtctaatgttgacagtggggtgttaaagtctcccattattaatgtgtgggagtctaagtctctttgtaggtcactcaggacttgctttatgaatcttggtgttcctgtattgggtgcatatatatttaggatagttagctcttcttgttgaattgatccctttatcattatgtaatggccttctttgtctcttttgatctttgttggtttaaagtctgttttatcagagactaggattgcaacccctgcctttttttgttttccatttgcttggtaratcatcctccatccttttattttgagcctatgtgtgtctctgcacgtgagatgggtttcctgaatacagcacactgatgggtcttgcctctttatccaatttgccagtctgtgtcttttaattggagcatttagtccatttacatttatggttaatattgttatgtgtgaatttgatcctgtcagtatgatgttagctggttattttgttcgttagttgatatagtttcttcctagtcttgatggtctttacattttggcatgattttgcagtggctggtaccagttgttcctttccatgtttagcgcttccttcaggctcttttagggcaggcctggtggtgacaaaatctctcagcatttgcttgtctgtaaagtattttatttctccttcgcttatgaagcttagtttggctggatatgaaattctgggttgaaaattcttttctttaagaatgttgaatattggcccccactctyttctggcttgtagggtttctgccgagagatccgctgttagtctgatgggcttccctttgagggtaacccgacctttctctctggctgcccttaacattttttccttcatttcagctttggtgaatctgacagttatgtgtcttggagttgctcttctcgaggagtatctttgtggcattctctgtatttcctgaatctgaacgttggcctgccttgctagactggggaagttctcctggataatatcctgcagagtgttttccaacttggttccattctccccatcactttcaggtccaccaatcagacatagatttggtcttttcacatagtcccatatttcttggaggctttgctcatttctttttattcttttttctctaaacttcccttctcgcttcatttcattcatttcatcttccatcgctgataccctttcttcctgttgatcacatcagctcctgaggcttctgcattcttcacgtagttctcgagccttggttttcagctccatcagctcctttaagcacttctctgtattggttattctagttatacattcttctaaatttttttcaaagttttcaacttctttgcctttggtttgaatgtcctcccgtagctcagagtaatttgatcgtctgaagccttcttctctcagctcatcaaagtcattctccatccagctttgttccgttgctggtgaggaactgcgttcctttggaggaggagaggcactctgctttttagagtttccggtttttctgttctgttttttccccatctttgtggttttatctacttatggtctttgatgatggtgatgtacagatgggtttttggtgtggatgtcctttctgtttgttagttttccttctaacagacaggaccctcagctgcaggtctgttggaataccctgccgtgtgaggtgtcagtgtgcccctgctggggggtgcctcccagttaggctgctcgggggtcagggacccacttgaggcagtctgcccgttctcagatctccagctgcgtgatgggagaaccactgctctcctcaaagctgtcagacagggacatttaagtctgcagaggttactgctgtctttttgtttgtctgtgccctgcccccagaggtggagcctacagaggcaggcaggcctccttgagctgtggtgggctccacccagttcgggcttccccgctgctttgtttacctaatcaagcctggaaaatggcgggcgcccctcccccagcctcgctgctgccttgcagtttggtctcagactgctgtgctagcaatcagcgagactccgtggggtaggaccctccgagccaggtgcaggatataatctcgtggtgcgccgttttttaagcccatcggaaaagcgcagtattcgggtgggagtgacccgattttctaggtgccgtctgtcacccctttctttgactcagaaagggaactccctgaccccttgcgcttcccaagtgaggcaatgcctcgccctgcttcggctcgcgcacggtgcgcacacccactgacctgcgcccactgtctgccactccctaatgagatgaacccggtacctcagatggaaatgcagaaatcaccatcttttgcgtggctcacgctgggagctgtagaccggagctgttcctatttggccatcttggctcctcccccaaattttctttttttttttttttttttttttttgagagagagtctcactctgtcccccaggctggagtgcagtggctcgatctgcaacctccgccccctgggttcaagtgattytcctgcctcagcctcccaagtagttgggagtacaggtgcctgccaccacgtccagctaatttttgtatttttttttttttagtagagatgaggtttcaccatcgtggccaagctggtcttgaactcctgacctcaggtgatccacccgcctcggcctcccaaagtgctaggattacaggtgtgagccaccgtgcctggcctataatttttaaaaactgtgttttttattttaaaagtagtgtttaatcattgtagaaaatttggaaaatggagaaaatagaagaaaattaaaatccttaatgttaagtgatcccactattcagagatacatacaattaacattttgcttattttttttagtctttttactgtatagttagaaaaatagttggactcacactataaatctaattttaaagaataaataggctgggcamggtacttctcttgcagtttgttactgccaagtaagcagtatttttatgataatatggaaataatttaatatattgtttttgtggcttagagataactaaaacgaggaattattactctgaattgtcaataacttaccacccttcccactgttttaggtattaaagatttgttttggtattaaagataagacatttatagtagtgcctgtaatcctagcactttgagaggctgaggtgggcagatcacttgagctcaggagtttgggaccagcctgggcaacatggcgaaaccgtctctacaaaaatacaaaaattatctgggcatggtggcgcatgcctgtggtcccagctactcagggttctgaggtgggaggatcacttgagcctgggaggtggagattgcagtgagccgagattgcaccactgcactctagctggggtgacagtgtgagaccctgtctcaaaaaataataataataataaaaaataataaataaataagacataactattaacaggttatagactaaaaatataaaagaaaaacttttttttgtttttgttttttgcctctgaatgccaagaaatactcagaggcttgaataacttaataaaaaggatgaaaaaataattatattttttatgtaagaaagttgataatttgacaattcagataggagraaaaaaaccacttccaatctgtattcctaaaaataatcactgataacatttttgttattcttctagaatttttaacacatatacaatttttacttttaaaactattgttattttataactttttgaatttagcaatatgttactaaatttatagatctatgtaatttttaatggctatctagttttatttttagggacttcctttaattgattctttattgctaaattttcctatttatgaataaggaatattttgtgcttctatccttgtgggacagtctgattatagaggataaattcttaggatatttttgtgtatgagaatatataaatttttataatcttgatatatattcatttatcttctagaagggtattgatgtcagtagagaatgagagaatgtactccttttatcagcacagggtatagtcatttttactttttttttttttgagacggagtctcgctctgtcgyccaggctggagtgcactggcgccatctcggctcactgtaagctgcgcctcctgggttcacgccattctcctgcctcagcctcccaagtagctgggactataggcacccgccaccatgcatggctaatttttgtatttttagtagagrcggggtttcaccttgttagccagggtggtctcgatctcctgaccttgtgatctgcccgcctcggcctcccaaaatgctgggattacatgtaggcgtgagccaccgcacccggcccatttttactttcatataatttattttatatagttttttgtgtgtggtatgaattacctatctttattatttggtattccacaatcatttttaaaaattcagttttaagtgttgtttatatattaggggtattaactctgcaaatagttttcttggtgtatcaaagttaaatatagagatttccatgtaatttaaatttataacttgaaagttttaaattacggtattgccaaattgattatcattgctttcctttgtggtttttgtaaatccttccctactcctaagattttatatatatgtttatataaattttttaatgtaagtttttataatttctgtttttacattccaatttttaaaccatccggaccttattttgrtttatgttgtcaagtatatttttctaaatggtttatacttcaacaccatctagtgaattactatattttccccatgatttggtcagtatgagtctttaagatgcagaaatcagttattcaagttttttagtactaagttgtctcttaggtggctgctcctatagagtaaaacactagaattagtaatatgcaagmcttctccactttaaatagtacagtcattcttagcaatgctgaaaaagaggtgtgctatttattatttagttatgaagtgtggcaaatccacacttgaatggaggtgaaagatgtgggtgaagagtagaagccaaggaagctgaggggaaacaacacggagctagcttcacccttggattgaagaattcacctttcaacattgagtgtaattagagctctatattttgagttcaaactgagaaagttttaagctttttaaaatcttaaattttacctcgaactcccagtcattagtataggtatagtacttgtcattcaaaaccaaaagtataaattttttttcttttttaatttttggattctgtattctgtattctgtattagtttatatttagatactgaagtatctttctacaggtctgtagtataatttagcgcaaccttactgaaaaatcaaacgtgttccaattgttgaaccaagaattaatacaaaaagtgatttttaaatatttttatagtattgacattaatattttgttgctctataaggccatcttaaatgttttactgtttcattatcccttaagaatcagacttgatgatttcttttttttttttttttttttgaggaagagtcttgctctgtttctcaggctggatctcactcggctcactgcaacccccgcctcccaggttgaagtgattctcctgcctaagccctcccgagtcgctgggattacaggcgcttaccaccatgcccagctaattttgtatttttagtaaagatggagtttcaccatgttggccaggctggtctcgatctcctgacctcaagtgatccacctgccttggcttcccaaagtgctgggattacaggcgcgaatcactgtgtccggctgatttcttttttttctcttttcttttttttttgagatgaagtcttgctctattgcccaggctggagtgcagtggttgatctcagctcactgcaacttccaccttctgggttcaagcgattctccttccttagcctccaattacaggtgcacacatcacttcgcctggctaatttttgtatttttagtagagacggggtttcaccatgttggccagtctggtccctactgatctcaagtgatccaccagcctcgacctcccaaagtgctgggattacaggcgtgagccaccgcgcctggccaattactttttaaataaaatagaaatatgccatttttgtttactgtaattttatactgtataatctaagtgtcataatattcaaccaaagactgttttatttatttttctcatatatacttatgcctgatgaattatgatcttaacatgatcagatctgattatataagtatggggccagccatatttattcatagtgtaggaaaagaataaggtttcaggaatggtttatcagcttatagaataattttaattaagatgttaaaactagaggatcttctgaatttttaacttaccgttcaaaatttacttgtgtggaggacattagattgatcatattgatattgaaatactgtgctataatttgtataaaaatcaatgtcaacatttattttctcatcttgccttgataaaatagttacatttaatttgaaattcgacatcataggaaattcagaacgacttgatttttatccctttttatgtttggtcacgttattaattttttaggcaaaagttaaatctataaattaactaatgttgaattttatttcaacttacaaggagatatagccaggtcttctgtatatattctcttgctgttaataggaattgtttatgcattagtgtcttataagcaagattcaggcatacttttaatrttgccttggtttattaaagtaagctcaagaatttcatcagtaaaccaaaccagacgacttcccagatagaagagaaaattgctgtttttagggattctttcatattggattgttaaatgtttttttccctgtggatgtatamatatcagtgatttcaaatagacaatcctggtgcatattttcaaccattktgtgtgtgtgtgtaaatgcatatcataaaatgtatcatttaaacaatttttaagtgtacacttttgtggcattaagtgcattcacattaatgtgtgactatcaccaccatccatcttctgaattttttcatctttcccaactgaaactgtactttaaacactaactccccctcctcctttcccacccgcctctaacaaccaccaattttatgtctacgaatttgactactctaagaacttcgtatacatggaatcatacaatatttgtccttttgtgattgctttatttcacttagcataaggtcttctagattcatccattttgtagcacatatcaaaatttgcttcctttttaaggctaaataatactcccttggctaaataataatccagccatctgttgatggacacttgggttgcttctaccatttggctattgtgaataatgctrctgtatgcgcagatacttctttgagtccgtgctttcagttcttttggatatatacccagaagtggaattgcctgatcatatgataattctgtattgtaattctgttaattttgttgaggaacttgcatactgttttccacagaggctgcatcattttacattcccagcagcaatttctccacatccttgccaatacttgtaattttctgtcttttgtttttttgattttttgccgatagtcatcttaatgagtgtgaagtggttttgattggcatttccctagtaaatggtgaygytgagcatcttttcatgtgcttattgggcatttgtttatcttttttttggagaaatgtctttttcaattgtttgcccatttttaatcgggatttttttttttttctatgggaattctttgtatgttctggatatcaatttggtgtcatattcaataaatcgttgccaaatccagtattakgaaacttttcccttatattttcttctaagagttttatagtatyagctcttasatttaggtcttcaatccattttgagttagtttttaagtaacttagtgtaaagtaagggtccaacttcattttcgttgtagtgaatatscggttttcccaacacacttcgttgaaaagactgtcttttcccctttgaatgttgttggcactctagttgaaaatcatttcattatgtatgtgaggggttatttctggcctctattctgttctactggttcatatgtctcttttcttggcagtatcacactgttttgattaccacagctttgtaataagttttcaaatcaggatatgtgagtctgccacctttgttcttttttttctagactgtttaggctatttgaggttcaactttttttttcagtgacctraactatgctttatgttataaatcatatttttaagaaagtattttaaattttattcagatgtttgcaagtatgtatttagtaacctatacattaaacgttcctttgtcatttttctaatttatccaaaaagcactacagcacctcattttaaaagcaatagaattttttttttgtatcagtttaatcatgatatgatacacgggcaaactttagaagaaatattaattttctttttgatgtgtatagaacttgagaagttgtaattacatcctctacagccatgtacccaagattaaattttctactgatgtgttatgcattatatgttagccttcctgtggcctcattatgttagatgatgtttgaaaaatatatttgatattctgaatatcaaatcaaagaggaacataaagaatttttcagtttttccactataaaaaacaaaacaaatctttagggcctagatatttttcacaaacaaggaaatcatttggattacatgtcagagcatttattgcttgaattagtcaatcgaatattaatctwttcaacaaacatttaatgaatgtctactccaggcattttgctagccccagggatatagatgtaaatatgacttgtttgggccctcaaatcagccccacttcaatagagagccacatgaaagcaaataattgtaaatgtagcatactaaatgcaatattgaggtatgtgctgtggccagttgcaagcatagtatagcttatggaaatgtggaggggtgtctccatggaagcttgctaactaatcacaaagcaacttacagtaatgaattggagttttgtagactaaaaagtgtygtgttgtcatkgtcctagagttggatatattcctaccctaacttagaacttgaaatttatctgtcacaaatatctttctttcatgattacaatgtattaagatataaactcttagttccagggtcccacatggtgggtttgctaatatcatgggtggaagtggattgcaaaactttacaatcgctgctgtgccatatactccaaatcttttaccaacttcaagcacatggtatgttgacttggtttatttaaatgctttacaaattgttttgattaattttgaatgatcagagatctaactgttgctgcattgggaggaaaacctcagctgtgatctctctccaggattttggaatcactgatgagtaattatgtagttttttgtgcccctgtttttggtagggaaaatgtttgaggaagccctaactccctacaatttaattgactatagttcaagtatcactaaagttacactaccgtaagtagcactgagttacacaccatcacttcaaactaaattgccctattgcttatttattttaagctgaaaggaacgtattttcttccactgcatttgcatgctgaaagaaactgcaatgcagcagattttttcttctttttaaataccactttagggtttttcaatctgaatgcaaatttgggaggatgattttatgttaattatgagtartgttttcactgctaggcaaaacaatcagaaattttatagatttcctgtttaatggtggtatatttttcttttaaagcatcaacatgctcaagttacctgaatacccaagtaaagaaatactcaaggacagacttcttgtggcactacattgtggcagctatggttacacaatggcataatgaagtctggaaaactcctctgactactgatgcacaattcagaatggcagaagtaatttgggaaaatgtcaacaaaaaagcagcctaaatgcaacccataggcagggctgatgcttccaatttataaaggatcatcaggttttctgtttctctcttttcccttttatgttttctctgtttgtgatacaattagaaaatataaaatcacagtagattttattttttaaaatgctaactgaaagtaatagagactgtcctttttcataattaattttatccaagattgtattaaggcaaaatctgattctacattccacctctgctatgtaactgtcttgttaaaagggtgttttctcctaatttctgatatattatatgaggtcatccagctggtgtgttcttttgcatgtaaactgccatttatattttagaaaactattgtatagaatggatttagattgtctataaagccacaaatacgtattttgccacagtgtattctatattgcaatgatttttttagcattttaatattttaatatatattgtaaaatttagactgatgatactaacagttgatgaaatgacatataatttatatatgaaagcttacgctatattgtatgaattatttgcatctttcagtggccagttttccatatgtatatattatggtctcaatgtttttcttacgcctcattttaatttataatgaaggtaaaattaaaatgtattttaccacgtttcttttcattacttttatctgtgagctctgacacatctgaaaaagtaatctgatgtgcaaattataatttaaatatgttaatttttttgcttcttaaatttgcttttcatcattaaaatgtcaagttcaagtgatatgtgcctaatatcacttggatgttggtgggtttttgaatttttgggtggttaatcagttttattttgaaaagacgtacttgaatagttacagcatatgtttgaacaggaagtaggaacatgcatacacgaagaaatgctaacggaaggatttgttatgtttaggatcttcccttggaaactaaaaatagaatattaatgacattactgtttgtagaatgacatatgcagattttctcataagcagtcattgtgtttgccagtaatgtttgagagacatgtaagttgaaagttttgctaaattataaagctcctttaattcgttggttttgattctcttattctcttgtcttttctaaatgttaacaaaatatatcttaacagattacatgaaatttaggaattatttaaaagttaccattagctctaaaattaagattcggatgctttatttatagtaactgaagctaataatgttttatgttttgattttttgaaatttaattgtagaagtcactgccttctgagttttcaaatagataaccacctttaatattacactgcttataatactaatgtttacagatatgtttctgtttataaccatataatacattggctttgtcatattagttttttttgcaagtagttatgtaaaagagatagataataaaatattaaataactgagtgtggtggcttatgtctgtaatctcagcatttcgagaggctgaggtgggagaattgcttaagaccagaagtcaagaccagcctagacagcataggcagaccccatctctacaaaaaaataaaaataagctgggcatggtggcatgtgcctgtggttggaaggctaggtgcgagatcgcttgagcccaggagatcgaggctgtaatgagacatgatcatgtgactgcactccagcctgtgagactttgtctcaaaaaaaatatatatatgtatatattcatatacatatatatgtgtgtacatattcatatacatatatgtgtgtacatattcatatacatatatatgtgtgtatatattcatatacatatatatgtgtgtatatattcatatacatatatatgtgtgtatgtattcatatacatacgtgtgtatgtattcatatacatacgtgtgtatgtattcatatacatacgtgtgtgtgtattcatatacatacgtgtgtgtgtattcatatacatacgtgtgtgtgtattcatatacatacgtgtgtgtgtattcatatacatacgtgtgtgtgtattcatatacatatgtgtgtgtgtattcatatacatatgtgtgtgtattcatatatgtgtgtattcatatacatgtgtgtgtattcatatacatgtgtgtgtatatatatttgtatacatatacatgtgtatatatattcgtatacatatacatgtgtatatatattcgtatacatacatgtgtatatatattcgtatacatacatgtgtatatatattcgtatacatatatgtgtatatatattcgtatacatacatgtatatatattcgtatacatatatgtgtatatatattcgtatacatgtatgtgtatatattcgtatacatatatatgtgtatatatattcgtatacatgtatgtgtatctatatacccatatatatacccatatacatatatatacacacacccatatgcatatatataaaatagtattttaaccatcaatttgaatattttaaaatatagatctgcttattttaggatttattttttcacatttttaaaataagagtgtagttaatataaagagattttacaaagattaaaaatactatttagaggtagcatctttctaatttactccattcccacaatttcttctgtatgtagatggatatgttgaatgcaaggtagtatagaaaaatggttagattttctcctttgggaaaaagattatattaataggaaaatgactcaattcttaaaacatggtagtttcatataaggaagaaaacagaaataaaacactcgaatataaagcaagggaatgtattataggaaactgattaatgaaactatctgggcagagtagattaagttatccaaatagtttgaggagatagttattaaccacgtagttaataaaatccattttcaagttaaccccaaaacaaaatgtaatagaaggaaatcccagcttggaaataatctgctgaacacagcctctactattcaggcagtcttttgggtatcgggaaacgcaagctttaaaggatagctcacaagttggaggcccaggagatgattcctactcacatgttttgtttgtcatactgtttctaaaattttgaatgagttaccaagattttacaaaacctgaagatttcatgcggaagtcaggagttttgggtccttttgagcagtgagacaatctgacaatattgggtgcatgggtgcatattcctgcaaagcattatggaattgagtaaatgctgctgctttgaataactaaatgccctctccagtttgccatttcctcctctctctctctcccccctccctcccccctcttttttctaccctcttttttttttttttttttttttttaactctgttgcccaggctggagtgcagtggcatgatctcggctcactgcaacctccacctcctgggttcaagtgattctgctcctcagcctcccgagtagctgggattttaggcatgcaccatcacacccgaccaatttttgtatttttaataaagacggggtttcatcttgttggtcaggctggtcttgaacccctagggacctcaagtgatccacccgcctcagcctccccaaagtgctggrattatgtcaccacaccagaccagttcgccattttcttagcccagcatgcttcactactctatgttatcttcctggccattgaaagcactggagtctgctttaaagaatctatgttgatcagaaatgttcccttagattgtaaattggtacagattctttggaaggcaatttggtagcaccaccagattttttcaatgtacgcatagtctttgacacaaaaattctaagaatttatatcttaggcatccacttgttcatgtatataaggatatttgtccaatgatattcactgaagccttgttcgtgatagaggaaaacagaataacttcagtgtctatcagtagggggctgactaataatgtgttacagccctagaatagaatactaattggtatgtataaagaatgaaatgtatcaatacatactgatatgtaaatgtttctaaggtgttagtgaaataaagtgtatagaagaatgactaatgtgaaatagaatatatatgggattacatgcaacaaaaatttctgaggaggtgaataagagactattgctatatctgggaatgagttgtatagtgggatggacttctcccactttgtaacttttttttccctgtttctccaaatcatatgcctatgttattttctgtatgatacatttacatatatatgtgtgtgtgtatgtatatacacatacatatatataaacatccactatctttaatccagaaaagaagtatcattaataggttttttgaatctataaagtgccataaacagtattttatgtagtgataaacagtattttcataatcacaaaacttataattttgtttagtgtgtttaatttaaaacaagtttaattgaactctttgtaaacagttaaaaaaaaaaaaaaggaatgctctcttgcccacaaagttgtttccacgttgcctgataattagcactgtttttagctctctctaattctaccaattagagatttatgaacatttctctcccttaacttttttaaataacaaaaggggtacttaatatgggaacatctgcaaagcatagattagcgtacgaactggtaaaaagcaataaattataattctactacccaacaattgtgttatattttcttctatagcaattcattttttacacagttgagttcataaagaatatagcacgtagtatcttctttatttacttagcattttgttttaaacatttttcatgtcattaaaacttttttaattaaaaaaagtgcgttatctagagatggaggtctctctgtatatgttgcccaggctggactcgaactcctggactcaagcgatccccccacatcagccttcctagtggctgggactgcagctgcatgctattgtgcctggcttgtttgtaaacattttgtggaatggtggcataatgttttgttgtatggattcatcataatttacttgaccatgtctctaaaattaacatttagatttctaatattgttgcttttataaataacaggtagcctcttaaaaactgcttatagtctaggagggataatattgtctgggttatttgttgaaatgtccatcaattgctctgtggtcatagaattactacttgaaggctcaagaaaggggtgttggaaggaggaaccctttggtaggtaggacagcagcacagttagggctaagtgccctaccagagtgtaaaaagttataaagggagccaaagctgtgtgatgaaagtaaattattttaatcattgccaacctccagtctcctacccaagaacaggggaggaaacttatctttatgacacaagccccattcacaggactcagcacttgagcacttgctattataatatattgtatagttcagctatgtcaaggatcatttatgctcttgtgagctgaactaggaacttagccttcatttataacgtttccaaaacttagacttacaagcttttggagtgcaacccttttgtcaattgcagagtgtgtaatagttgtctttatgaataggtgcttagctaataatgaaattttgaggccagatacagtggctcacgcctgtaatcctggcattttgggaaaccaaggcaggaggattgctgaaggccaggagttcaagagcagcctgggcaacatagtgagacccctgtctctgtaaaataaaaaaaatataaaaatttggttatttttaccacaatttaaggtacatcagtgtgtatcagcagtcaagattttttcatgtgaaacatgtttctctgttctcctgcacttccacagttcttagacaacaaaattcacttttaaggttaacaatagcaacagaaattccaatgttattgtttgttttaagctattttaatgtgagcagatttctgttagaatgtccttggtaaaagtcttaggtactgagttattgtaacctgcctactggtctggtgtaaattggcacatacttatttcttcaatttataattagtcccttcactttacaggtgagaaaattggagacccagagaggtggtgacttgtgcaaggtttctgggatacttgttaaccaaatgagaatttaaaacttagactttctgattcttagtccactagggtttctgttattccatgctgtctttttatgacataactgcattataaaaatacttttagagaaacacctgcagcctattaatagtcatgtatgacaagcctgttgagaaactataacttaataagctgatacttaagagtgattaataggactgtatttcttctctctcactgtgccacaacaagctagtgtgggtattttatcatctcaaaattagaaagaacagatgtattgtcagatcatagatcatgggtagtcattaacttttattatctttataaaaatgtttaatttcaagcatacttggtgcttcaaaatatattgtgcatctaatgttgcaaaaccattgaactataaactgagaatctaatgactattactatatgtagtacttgtgtgagtgaatcgagtctgtttgactgaaatggaggaaagtggtcctgagtgggtgctggatatatagttagtgcagaaaacttttcaaatcaacaaattccattgactgcctcccatgtacttaaccgtggtttagggactgtgacccagtatttacccttaaaggaaataaaattcacctgggtaggtgaaaagtatatttgaaacagttttaaaaactgtgcagtatagcatatgtttaggtgtaaaaaaccagctacagaaacattggcgcggcggcttgatgtaaactctgtgtccagtgcagcttcaggtatctggcttaagtgaattgctacattattctctagatttagagacaagtaagttgaccaacctgttgattgagcaaataactgaaaaggataaaaaatgctaaccatcgtaaaataaggctaatgcgtggcagtcattcattaaattgttctcaaatttttcattggtgaattattagcttgctcagttccagcttctgggcattccttgagaatttgatatcctggtggttttcatgatttggagactgttatgtgttcatatagcaatcatatttggagatggctctacatttttctcagaagattggcttcttgaaagaagcttattgtaggagtggggagaattaattaaaatggtatgtgtacagtgttcctttatataatatttctgttttcctagtatctaggaatagagaaaaaataaattggtattcaaattccaagattctatatacagtggcctactttacatcttcacttggatgtttttttaggaatctcaaactttaaatgtgtccagagaggagctcttgtttccctgtggtca

SEQ ID NO: 93627 - DNA, 54131 bp, Homo sapiens
gatttgggcttactgaaatccaatagtaacttatctaattatatctgcaaagatcctatttctaaatataaggtcacattctgaggtttcagatagacctgactttggggggacactaaatgatccagtatattcaccacataagattgttgtgaaaattaaagaagccatgtaaagtacatagtaaataccaaacttaatcttattatttctgtcaatataatttttatggatttatggccacaaagaaagtataattcacaagcaatttttttgttgaatgaaaataggagctgttttaggtcaatttattttgaaaatattaatatataaagagtaacttgaaacatttctgatgagaaaagcaatgtaatatttagattccatcaatttagtaaggatgtatataatacattaaaaattaagaaacatgtgagggttctagttccaaataagatggagtcccccactgaatacaactctaaagcctgccttctacaatgagaacattaacattctatgccatttaaacaggacccaaggagattgaggctgcagtgagctgtgactgcactactgcactccatcctggaaaacagagcaagaccctgtctcaaaagcaaacaaacaataacaacaaacaaacaaacaaaaccaggacccaggatctcataacctaacattcaaaaagttctcaataaccaaaagacagcaaagccaagatgtcatagatgttgtacatacttatatggtgaaaactttaaggcagcgattacaaaagtttcccaggaaacaatcaagaacactcatgaagccagtgcaaaagtagagagtctaaggaaagaaataaagcatacttaaaataactaaatggaaatttcagaaatgaaaaatatatctgacatttaaaactcactggagtggaaagatgactaagcctaagagacctgtaggacaccatcagccatacaaacgtatacataatagcagtacaagaaagagaggagagaaaaaaataaaacactattttttgaagaaataatggccaagaaactttccaaattaggtgcaaatcatgacactacacatccaagaagctcagtgaactccaagaaggacacagccagagatccacagaaagacacattactgtcaaattgtcaaaacctgaagacaaaatctatgtaacaataatatcataaaggagtaggctgatggagtttttaaaggatcaaaatgtttgaatactattaaaactgggttagtattaattcaaacttgattgttacaaagttaagatgctaatcgtaatccccagggtaactccagcgctatggactgaatagtgtccccctagatttcacaggctgaaacttgaattcccagtgtgatggtatcttgagatggggcctttgagaggtaactaggtttatatcaggtcatgagggtgggttcctcatgacgggcttggtgtccttttaaaaagagaccacagagcttgcttactctctgtttctcctcttccccacctccccagtccccaacacactgtgagaacacagcaagacagccatcaacaagccaggaagctctcttcctggctcttaacagaaactgaattggctggcaccttgatcttggacttcacagcttccagaactgtgcaaaataaatggctgttgtttaaaccacccggtctatcatattttattatggcagcccaaaataagacacccagaaaacaatttaaatatacaaaataatcctgcaggaattttaaacacacaaactgattctaaaacatatatcgaaagtaaaagagaaagaatagctaaaatacttttgggcaagaaaaataaagtctgaaaattatactatatggttttaaggtttatgataaagctacaaaaatcaagacagtgtggtatcaatgaaagaagagacaaatagatcagtgaagcctatttctatgtggagttcacagaaataaagcaaaaaaaaaatcaatgaaacaaagtagaaagtcatagacccaccaatatatggccttttatttatttattttatttttttaaatatatggttttaatgttgaaatatttatcatattatagtttttagaaacttggacaattatcaataaaatcagggctggtcttatgatttactagagtatatggctgctcgcttgccttttatttttaacaatggtgcaaaagaaattcagtgaagaaagcacagatttttcaacagatgtaattgaaacaataagccatccttattcaaaacaaaacaactaaatctcttcaattatacaaaaatttattcacgatgagccataggtctaaacagaaaatattaaactatataactttcagaaaaaaaacacagaattaaatttttgtgacctggggttagatacttaaagcacaatacaaagaaaatgacwaataaacattaccaaaattaaaatattttgttctatgaaagatacagttaagagaatgaaaagacaagctacagactgagaaaaaatatttgcaaactacatatccagtaaaaaacacacatcaggaatttaccaagaaatctaaaaattcaacactaagaagacaattcaattttaaaaatgagcaggagatttaaataggcacttcaccaagaggatatacagacggcaaataagcataagaaaaggtgggccaggcgtggtgactcatgtttgtaatcccagcaatttgggaagctgagatgggaagaggatcatttgagcccaggaattcaagaccagcctgagcaacatagtaagacccctgtctctacaaaaaaatttttaaaaaccagccatgcatggtggcacacactgatagtcccagctgctcaagtgggtaaagcaggaggaatcacttgagcccaggaggtagaggctacagtgagctagctataatcatgccactgtaccctagcctgggggatggagtgaaaccctttctctctaaaaaccaaaaaaaaggaaaaaagaaaaatgtgttcaacatcatcagccacatgggaaatgcaaattaaaataacaatgaaataacacaacaaatgtactagaaggctaaaataaaaaatactaagtgctgtcaggatacagaacaactgcaactcatgtgcattgctactggggaggcaaaatggtagtcattcggaatggccgtttggtggtttcttataaagcaaaacatacatttgccacattacccgataatctcactcctgggtatttactatagagaaatgaacatttaatgttcatacaaaaccctgtacataagtgtttagagcagccctattcaaaatcaccaaaaactgaaaacaaactaaacatccttcagttggagaatagagaaacaaactacggtgcagatatataactgattactactcagcactaaaaaaaataataaactgttgacataagcaacaatctggatgaatttcaaaggcattatgctgagtgaaagaagccaatctcaaaaaagtttatattgtgtaattcaatttttatgataatttcaaaaaataaaactatggtggttgaaaacagtgatttctatggattaagggttaggggagggtgtgataggatagagttctttggcttatagcacttttcagtatcccaattgtagtggtggttacaaaaatctatatatgtgttaaaatgcatagaactaaatagcaaaaactcagtaataataaaaataacaaacacatgctaatcaacattttagcacacaaaggtgcacagtaagcatttgttgtatcaatttaaaaatgatattaaagaccattactgctatgttccacattgccacagcctagtttaaattactgtgtctagctgaatactgaacatgttatatatacgttatgtgttaatgtgtacataagcaagaatgactgttggagggagggcaagtcaattatagacaaactttattgctgaaatacctggagttcagtcaagattgtgatgctccctgcacggaatgccaatcactaagtcaacaaggattgccagagaagaaggctttaatctagtcctgcagtcaaggaaagtgggagttcagtctcaaatctgtctccctgactgaccaaaattgatctgtttacatagcagggaaggtgcgaaaagaaattagggagggataaagaagaaatcctgatgaatcaggtatttggtatctcagtatcaggatgtggtgatctagtgagtttcagtcccttgcctgagggtcagtttcctgaggaaaaaactcagttaagacataagtttcaagttttaagacagagggcacatttctatgtttattcaaaaatccataaatatgggacaatttggccagtttcaacttcaggacattttaaccattgtggactcagtgacctgtgaagtgtacaggccagggaaacttcctctttgccttctgaagtttcactgaaaaatcaactcacaaaaggcagattaattggagaaaaggtattcaattttatttaactatatgtttacacagggagaaccacagagtgattacccacccacaacagggtttagaagcttatttactggtaaatcaggttatgggagaggggaaaagaggaattctgttgaggagatcactagggagaatgaatggatcagggagtagagattaacttgtacattaccttgtgaaagggtttgttcaggaaaggttacattcttagtcttacagggagaggaagaaaaacgaattgttccttttggtgggtctggatcttaggcagataaaggaacttcactttgggagaggtggtagggagtagaggtcagagggaccttgaggcttttccagttcagtatgtcaaagtgccatattttggggtatcagtttctgactcccaacacattctttgtcttctttttttgtaatggatcatgagataacaggtaggggaaaaagaacaattgtcctccttggtgggtccatcctatctttatgtagacaggggaaagtctcttccagagcccgttgatctctaagggtctttacttcaaaatcttcattataccagggagccatatgttggggtggaatttcctgcctccttcaacccccagctccaaatttggaaatggcttctaatttttttaaggaaatgtcttttatttcctttggccactgtgattgatttcacgatggatccatgaaccaagaaaggcaatcaaggctaacaagtttcaatttcaggactactgtttgagctactgagaaagtaaaatctctttttcgttgtttgagctggaaaccttgtcactccaaggacagtcagtaaacacttttcaatgttaagggaactgagagagagagtttcctgagagaacaggaaggcagagagacgaatgagaagtgagaaattggtcctggccatgttattgttcctctagtccagtttaactggtgataagcttaacttgtgataaagatcctagatccctttccagtcctgctgcatccaaatctcccaggaagtcctagaaaatgtctagtctcccctgaagctagccctactgccagaatttgaggaatatgaaccaataaatttccattatagtttaagagaatttaagatagatgtgtgtattagttcattctcacactgctaataaagacaaccaagactgggtaattaacaaagaaaaagagatttaatgggctcacagttccacatggctggggaggcctcacaatcatggcagaaggtgaaagaggagcaaaggcatgtcttacatggcaggaggcaagagagcatgtgcaggggaactgtccttcataaaaccatcagatcttgtgagacttattcactatcacaagagcagcatgggaaaaaaacacccccatgattcaattacctcccactgagtccctcccatgacattggggattgtgggagctacaattcaagatgagatttggttgaggacgcagccaaactatgtcagtctcttatttgccaacaaaagcatcctaactgatagaggccagacagatttgtttctttttgttttttcaatcttttgttgtgaagaagtaagcataaactctcaataggttacgttttacaagcctctgatgaagttcaaaggacaaccatgcttaggatttccaggacaacctggaaaaaaaaacaggttgagaaataggtgtgttaatctcccttccctctgctcctccctctggccttcctttctttgatggaataggccctaggacacctttctaaaaagactccctgtggtgttcagaatcactcctacagtcaggttctccacaatggatctcagtgctgcaagtcaccgcatacctctaagtgatggaaacagcattcccatcatcggacttggtacctactcagaacctaaatcggtaagcttattttttctctctttgcttgcttgtttgtttcttttaacatttgcctatagcayaatctgcaatttattttaagcagatctcattgacttactttttgtagtaatggaagcaacctcaatttgtaataatgaaaggactactatttactgaataggtattgagccaaaggttaaactaaatcaattcatgattaaaaattagtttggattagagaaggagaattttctgcttcctttactgaaatttagctaaatgctgattactagagtgaactgagccacatgaaattcgtgtgtttatgacttgtgttttttttatatgagataatttttagttcagtctaacaaacacctagtgaatacttgccatgcactaagcactaggcgatagaagtgtcatatatgaggaaaacaatgtctctgttatctagggattaaaaatcaaatagagggggcagattcttgacaactaattgtagaatgaccaagataaggatcaatgctattctagaactctctgtaaacagtctctgaaagcatatgtattggtccattctcatgctgctattaaagacataccctagagactgggtaatttataaaggaaagaggtttaattgactcagagttcagcatggctggtgatgcctcaagaaacttacaatcatggcagaagggaaagaaaacacgtccttcttcataagatggcagcaaggagaagtgctgagccaaaggggaaaagccccttataaaaccatcaaatgtcatgagaactcactcactatcctgagaacagcatggaagtaaccttccccatgattcaattacctctccctcggtccctcccacaacatgtggggataatgggaactacaattcaagataagatttgggaggggacacagccaaaccatatcagcatagaaatggaaataattaaatttgaccatgaagattgaaatgggcttcctttaaaacatagtaaagtttcagcttatgagaatatctgttccttgttgcagttcaacattaaatgctgattacgagaataaatagtgacatgtgtagaaatgctactgaaatttgagtggtcatgtatgaatgaactatttgaagctgagcatgaatgtaccagacagagaagcacagctaaagcaggacattttggcaatacgaagtatagagacattttagttagacagagaaggatatatgatatatccagtgaatgccaagcccatagtgcctggcacagggagttaatggtgatggcagctgaatctgaaaatgcagattaagacagggattaccaaggaccttgaacaccatgctaaggagttggaactctgtttgtttgtttaaggcagggtcttactctgtcacccaggctggagtgcaatgatgcaatcttggctcactgcaacctctgactcccagactcaagcaatcattctgactcaacctcctgagtagctgggaccacaggcaggtgccaccatgcccagctaatttttgtattttttgtagagaagggrtttcatcatattgcccaggttggtcttgaactcctgggttcaagcgatccgcccgcctcagcctcccaaagtgctggaattataggcgtgagacactatgctcagccaggagttggaacttcgttctatagtaatgagacatcatctaaagtttagaagcaaagaaagagcatcactagatctgtgtttttgaaagataaaactcaggttgtagcatggagaatggaaggcagatgaggagaaataaactacccatagcaagagtagttaaaacttggatcacaatcccacattccacttcaattgcacacctcccttgtttttggtaatgcaatggaaaattactcttggaacaattatatgagtttgatccttggcccctttctcttctttctttgcacaatgtctctttatgatctcattcataatcttggctccaaccacatatatgcagagattctcaaagctatattctctattgtttgttatctctcccccatgtaagtcccttacaggagataactattgttcaaagatgaaagaaatgatgaggaagtctaattatggggtacaagctatggagaaggcatggcctagaaagttaggtgggggaatattccttcctgagtggctctggttgagactgctgtagttgcagcaagttttcagaatctgaatgagccatggggcaaaggagaagtgtagtccaagctcttggtgagtacctaggagaagcctaaaacacccactacattttgcccctgagcaaagggaggtgggggtgcagggctcagaacccatttctcaggaatgtgccatcctttaaacattccttttattttatttattttatttttattagaggcaggtttttgctatgttgcccaggctggtctcaaactcctgggctcaagtgatccacctgccccagcctcccaaaatgctcggattacaggcgtgagccatgacacccggccctaaacattccttactttctctccaatgcccatagaattccccttttctgatcacccagggaactttgtttcacctggggaaaacaaagccttgctcttataccaagtaattttttcagatctggttttaagctgaggacagggtgaaggtctcataagctctacctaaggggaccaggggccaggcagaaagcataaatgagtagtttcagagagttaagtcttttctccattttgtcctacttccccattctgatactagacatgagggcaagcaatgccttattttcctctttatttctacaagaaaaaagaaaaaacacaagcaactaacactcgggggactattattgagaatataatagacatcacactacaagagggtggcagcttgtcctccagtacagccaatcatcatgaataataatccagttgttggccagtcttctaacactttttggagaatgctgtaaagtaattattaatttgtaagcaacagcaactcattcagattttggatgacatctggatggcatgctgtcttgtccaacttgtgtccaatcacaaatgtgccaattacatcttacaatggatttccactgacccacccaaacttacgttgtagtggatcttatataacccagctcataatgggcagctctggccacacagtcacatcatgtcccatggtcagatgtactatctctacaggactcagcagcaatgtcaacaatgtagatggcgtgacttgctccagaaccctacaggcttaccttgtaattctccaactggggcttgccataaactccatgccacatgtaaacaatagggcctgctgggtcatatggcccaagtggcagggatgcttgtggtaaagtctggagttctgctgagcccctccccattctgggcctaatgaaagctggtgtwttcatgtcacacagtaaatgggtaggaatagtactgcaagtatggaatatgctgcctctggagcctgagggcgccttttgggtactgtgcttccttcttaatgcttttcctagtatacagccatacctatgactttatcttgaaagaacttccatcagccttccaataatccattttttaaaattcttaatagagacgaggtatctctatgttgcccaggatggtctgaaactcctgaactcaagcaactctcccaccttggccttcaaaattgctgggattataggcatgagccactatgcccagcccaatgatccatgctgactgctttggtttctttaaattatgcaatgcacttgttggctgcctatgtaacttgcctttagggtgggggtgccagatttagcaagtaaaaatataagatgtccaggtaaatttgaacttcagatgaacaatgaataatttttaaatataagtatgttccatcccatttaatatttggaatatgcatatacaaaaaagtcttgcccatttgaatttcaaatgtaactgagcatcctgtatgttgcctgaaaactctagggatttcctgtctaattaaccatctctgcaaagcatckctgtgggttatgctctttggataccactcattttgataacagtgcccacttcacttctgaagttagtactaccatgtagcctctattattttaaaattccatcattcctagtttttaaaataaggacaggatctcactatgttgcccaggctggtcttgaactcctaggctcaagcaatcctcctgtcttggtctcctgaagtgctgatgttagaggtctgagccaccacacctggcccctaattttttagtaaacctagtttttcaacatctcccacagtctgccttgtctacagaggacagccgtaattgagctcaacaactctggtgtttttgttgctaaagcactgctgtctctttgataaaaggagtgttctctgggccctgckgcaaaacatagatcatccgtggatttccagccttacatagtatatctactatagtgggctcccttctctgagcttcctgagccctcttttgaccatctgccatggtatttctggaatgtctacttcatgtatgtggatgtcactttttccaagatttcaagagttatgctggcagtgtgttagcactgtttcctgaggtgttaagtcacgtatcagaagatggtgtttccatatcaataaactctcctttatccaacttgaaattccaccttcctcttgatgctgcaccccaagatccactctcacacacactctccacctccattgcatggtgtcttggtgtgcagctccctcagtgtatcaccctctttcttcctttatccagccaggagatctcataagggataatatccaaaatataaaaggaactcctaccttttttttttttttttttttttttttttttttttttgagacagactttcgctcttgttgccccggctggagtgcaatggcacgatcgatctcggctcaccaaaacctccacctcccgggttcaccaattctcctgcctcagcctcctgagtagctgggactacaggtgtgcaccacaacacccagctaatttttgtatttttagtagaaatagagtttcaccaagatggccatgcccagctaattctgtatttttagtagagacggggtttctccctgttgatcaggctggtctcgaactgccgacctcaggtgattcacctgcctcggcctcccaaagtgctgggattacaggcatgagacaacaagcccagccaagaactcctaccttttatatttagaaggatatattctaacatgactccatggctgtgaaattagtctccctaccaagtgatattcactggaagccttctcttggaacaactaattattggtctggtgactaggaggcaatatgcaggtagatcctgcctggagcacgtgttccaaggcagcagcttctgcgtcattttcaaaggacacagggaatgctggacattaacctggaggagcagtgctggatcatttctgctgatttaccttcttccttctacctaattccttcttgctatgtccgatatgctactgatgcgtccatttaattttagatatcttatcagatttttgtttgcttgtttgttttgtttatagaattgctgtgtttggttctttcctaaatcttctagggcacttttcatagtttcctgtcctctacagagattttcaagtttatttctttgtttttaaatttaattttcttttttttttattttaatagagatgggggtcttcttctgtcacccaggctggactrcagtggtgcaatcgtagctcactgaagatctcamctcctgggctcaagcaatcctcctgcctctgcctctcgagtagccaggactacagacaggtgtacatcaccatgcctggataattttttaatttttgtttttattttaytattttattgtaagacagggtcttactatattgcccaggccagtctcaaacccctagcatcaagcaattctgcatcagccttccaaagtgctgagattataggcatgagccaccatgcccagcctcaagcttatttctttaatcaaaacaatcatagttattttaacttttgactaataattccaatttttcattgtggtattactctgtgactgaattatttcacttagtataatgttctccaggttcatccatgttgtgtactgcagaatttccttcttttttgaggctgaataatattacattgtctatgtaccacattttctttacctgctcatctgtcagtgaacatttaggttgtttccatatcttagctattgtgaataatgctacagtgaacatggaagtgcaaatatttcctcaagatagtgattttatttcctttggatatataccctgaagtaggattgctggatcatatggtagttctatttttaattgtttttcttgaccaacatgttctaatatatctttaatttttttaggaacctccatactgttttccacagtagctgcaccattttacattttcaccaacagtgtacaagagttctaatttctctacatcctcaccaataattgttacctttcagttttttgataatagtcatcctaatgggtgtgaggtgttatttcattgtagttttgatttgcatttcccagatgaatagtgatattgatatttatatacctattggccatttgtatgtcttctttggagaaatgtctactcaagtcctttgtcaactttttaatcaggttaggtttttctttggggttttttgttttgttttgttttgtttgtttttgcttctttgctattgagttgtagaagttccttttaattatatcttggatattaaccccttgtgagatatacggtttrcaaatattttcttctattccataagttgccttttaactctgttgagtgtttccttttctgtgcagaggctttttagcttgatgtagtaccaacaacctatttttgcttttgtttcttatgcttttggtgtcatatccaagaaatcatcacctatcccaatgtcatgatgctttttcccttatgtttccttctaggagctttacagtttctggtcttaaaaatctttaatccattttgagttgactttttgygtatggtgtaagatacaggtccaatttcactctgatgacagttccaatattaggatctatggttctgtttaggctctcagttgtttctaccagtcttcctttatggaactttgttttctggggtacctgaattcttcagctgtgtgcaggttaatactacttttaaaaaagtatttgtgagcgagcatcaagggtgaaaaacaagtattttctttcagacaacatttgtgtgtgtttgctccaggttccctggaggcattgctacccagtgacgatgtgaaactggtcagcagactccagctacataggttatgaattctcccagggactggaggtggccatagcctgttagggagtttttttactttcctttttcatctcctacacctctcatttctgcattcagactttcccataaaatgtagtttgaattaataaatgcctactgtcttttcagtacttttatggtaatcttttcaaaagttttaatctagcttttttttttttttttctttttttgagacagggtcttgctccaacacccaggctgaagcgcagtggcatgattacggctccctgcaaattctgcctcccaggctcaagcgagtcaccagacccggctaatttctgtattttttatagagatggggttttgccatgttgcccaggctgttctcaaactcctgggctcaagcgatcctcctacctcagcctcccaaagcgctgggattacaggtgtgtgccactgcgccagcataatccagcatttttaattttcttaagtagaaggagatgctgtcagccattttaggaaaccagattttttgttttactgttcagtgagattgtctttaattgtggaatcaaatttttatattttagattctcctatcatatcatttatgtggtatcctatttgatctttccgatttttttcaaaactggttttcctaaaaaatgtgtcacaatttatgtagaatttttttgtgccacatttaagaattacaaagtgtgggccgggtgcagtggctcacgcctgtaatcccaacactttgggaggctgaggcgggcagatcacaaggtcaagagatcgagaccatcctggccaacatggtgaaaccccgtctctactgaaaatacaaaaattagctgggcttggtggcacacacctgcagtcccagctgctcggaaggctgaggtaggagaatcgcttgaacccgggaggcagaggtagcagtgagctgagatcatgccactgcactccagcctggtgacagagtgagactccgtctcaaaaaaaaaaaaaaaaaaaaaagaattacaaagtgtggtcctcatgtccacagtcccaactagttcctccatactgatgagaattaagtacaaaatagtaatacatctcactgctgcttctgccttctgagggacaatatttttcagcaagtatataaatataaacatataaataaataagtaaatagtagatatccagtaagtaaatatccagcttttagaagagactccctggtgatagctgaataattgaagattttcactactataacttgcttctgtgccataatccttattaaatgagtcatcatccaaatatacagcaccatggtggactacactcctaccttagcccttgcctttgccactttctttctttttcttttctttcctttttttttttttttttgagacagagtcttgctctgtcactcaggctggagtgcagtggcatgatctcagctcactgcaacctctgcctcccaggttcaagagattcccctgcctcagcctcccaagtagctgggattacaggtgtctaccaccacgcctggctacattttgtattttttagtagaaatggggtttcaccatgttggccaggctggtcttgaactcctgacctcaggtgatctgccccgcctgggcctccgaaagtgctgggattacaggtgtgagccaccatccccagctgtactttctttatcctaaatgctctcctctgtacttcattttttgggttaatcttcaaaaatacaagcacctactttaatacgcatttgtctggggctcccttcattgtgtactttagctcttcatttaaatgatcagttccagcccataaaatctcagtgatgtttctgagattctatttaccatctagtattaagcttcatatattaataatatgtagagggaggccaaggcaggaggatcacttgagcccaagagtttgagaccagcatgggcaacatggcaaaaccccatctctacaaaaatgtatgccaggcatggtggcacacgcctgtagtcccacttactcgggaggctgaggtggaagaatcacttgaatctgggaagccgaggctgcagtgagccataatcgtgccattgcactccagcctgggtgacggagaccctgtctctaataataataatgataataatgtagatacttgagaatgaaagtagatgtttattttcttccctgtaaatttctggacaccacgcctcacctccccttcccactgtactttggttgtcacacttgtcattcataacatctcattttacaggcttttttctggccttttgactcaattactgtccaagtcctattaatcatgttgttatttaattaaccaaacaaatatttctaatgttgctgaaatgtgtgtctccttttcccagctatttgatatttgtgactatgaatcttataatatcatctatgtagccagtttgttcatttttcgtatcctcttatcttctctatagtgatgacttccaactgtagcagggggaaaaaatacaatatatgtccccaaggctttctatatcctgcccaggactataaaatcactagaaatacatttcagatttattctctcgctcagcctacaacaaatcaataggtgtggaccagagttcacatgtctgatgtgatttgtccagcatttggttagaacactaaagaaagcacaagtagttaaccaacatttgttgagcaagatcagaacaatcaccctttgatatgaagtcagcacaaatcagaaaatagaatcaaccctctcacacacacacgctctaaaagatgctttgaaaattatatttgatgagactagatgtttgtcttcagagaaatctcattgctgtttctcattaagaaaaaatgtaactaaaagaaacacattcgtatatttaaatgccatcataactgaggcatagggaattatgtggaatctgaaaaatggtgtcttactctattttgtgctgctgtaacagaatgcctgagactggataactgataaagaacagaggtttattctcttacagttctggaggccgcaaagtccaagatcaagatgccggcaggttagggcccagtctctcacttcmaagggtgtaccttgattgctgcattctctggagaggagaaacactattactcacatgacagaagagggagcacccactctcacaagccctttttatggtgacattaatcctaaacacctcccattaggccctacctcccaacactgtttgtcaaattggagattaggtttcaacatgagttttggaggggacaaaaataatcaaaccatagcaaatgaaaaatcagtgttcagggaacaggatatgctcattcttatgtttaacgtgagttaataaaatgaacaaacctgtagctaccaaatgttattaaaatatatcctaaaacataaaatgttcctcaacaatattttttcctcagtttcattgagatataactgacatataataaactgtccatatttaaagtatacaatttgaagagtatgacatatatacatctgtgaggccatcaccacaatcaaaataatgaacatatctatcaactctataagcttcctcatgccactttgtaatccctccttccacccatacttcccccaactcctgaccccaggcaatcactgatctatgtctgtcaccacagactatgattccatttatataaaatgctagaagagaaaaactaaagtatttattctttttggtccggcttctttcactcagtataattattttgagattcatccatactatgtgttgtcatcaatgcyacatttcttttctttttttttttttttgagacagggtctgtctatgttgcccagtctggagtacagtggcatgatcatgactcactgcagccttcaactcccaggctcaagcaatccccctaccttaccctcccaagtaactgggaccacaggcgcatgccaccacatccagctaattactttactttttgtacagatggggtctccctgtgttgcccaggctggtctcaaactcctggcctcaagcaatcctcctgcctcagcctcccaaagtcctgggattacaggtgtgagccaccacaccaggcccacttcattcctttttattactgaggagtattccattctgtggatacatctcaatttgtttacccaaccttttgatttataatttagccttcttcaatcagcttgtgccctcctgtaaaaaggcttccatgaattctcttgtcacaggaaatattgatcaaatcacatttttgatgccacgaagctgagggcagacctgggacagatggtgtctcccactgagggagcggaggcccctgggaggtcagtttctcctgctgctgaacaccatcttccaatcacaacagcaaggaattgggaatgtgtcattttagctgtaaaggaatgtacatgcaaaatgtcctgattaatgatkattaaaggaaagaccatttctcttttccccaaacccaacctctttgtcacttcagacccctaagggagcctgtgcaacatcggtgaaggttgctattgacacagggtaccgacatattgatggggcctacatctaccaaaatgaacacgaagttggggaggccatcagggagaagatagcagaaggaaaggtgcggagggaagatatcttctactgtggaaaggtgagatcttgccttcagcctccactggggacagtgagaaggtttcagktgttcattttattattcatcttccktgtgtgtgtgtgtgtaattgcactcatgagtaggcagtacttaataacagtttgggtttgtttgtttgtttgtttgtttgaaagataagtgttcaaatgagaccaaaatcatgcaaaataggattttcaacattcttgtatcatattaacgaattatttattagtttgggagaagtaagcagagtagcatttaggggagagaaagagggttttaaaaatgtatttggctgggtgcggtgtctcacgcctctaatccgcacttcgggaggccgaggcaggtgttttgcttgagctcaggagttcaagaccaacctgggtaacatggcaaaaccttgtctctacaaaaaaawatacaaaaattagccaggcatggtaacttgcacctgtagtcccagatacttgggaggctgaggcaggaggatggcttgagccagggaggtcaaagctgcaatgagtcatgttcatatcactgcactccaacctgagtgacacagcgagaccctctctcaaaaaaaaaaaagcatttgagcaaatgtaattaactcagacatggtattcagattttgtttaataaaagcaaacaaacgtaaattaaaaaaaaaaaaaaacaagctcataaggtcaccaatccaaaagccagctatgtaggcttcctgggcaggcacattatgcaagccttttgcttaatgactcatattataggagtcatttcttactatgatagaggctaaagttagcatacaaggaaaaggtggtcaaaacatgctttaaattgtcctttaactttaatcctttaaattgtccaaaaagtacagttgtgaatagaaagcaatatttatacgtatacaatgtcaatatgggctgtatgtaataaagcatacttgggcgaaatattggtgtttacttacgtaaacagaaacagtgtgtgcagctgagttcatgtaatgtgccattgctattgcctcatcaggactgtcttcactgcagctcagcagcacctgagaggcaatgtgggggtgattaagagcctagactggtgcaaggttgcccaggtcagaggcccagatctgtcactattggctgagttgcctagcatttctggacctcaattttttttctctgtaaaatggggataataatgtcaactatttcataaagttgttatgagttcacatttacaaagcactcacaccgaacctggcacaaagctaatactatgtatgtttgttgaataaaagtaaattaaaatatcatcagcctatgcccaggaatgaaaaagaaagtaaaataaatatcaaacagaatttccacttagatgggattgcaataggaacaccaaagrgacccagagtagcaatcaaaacacacgtaacacatttttccactactctcttcatgttaaattttctctgtgtttttaaggcaagaaaaaaatcattgtccaacagaggaaaaaatcagatattaccaattttgcttaccctttcttgtgaccaaaaaaagtatgattcaggccgggtgcagtggctcaagcctgtaatcccagcactttggaaggcagaggaggaaggatcacttgaggtcagaagttcgagaccagactggccaacatggtgaaaccccatctctactaaaaatacaaaaattagccaggcgtggtagcaggtgcctgtaatcccagctacttgggaggctgaggcagcagaatcgcttgaacccgggaggcagaggttgcactaagccaagatcaagccactgcgctccagcctcagcaacacagcaagaccccgtctcaaaaaaaaaaaaaaaagaaaaaagaaaagtatgattctaaacttatatccccccaaaaaaatctgtgagcaaaactgatattccaaaagatgtactaatttgtcctgtgggtataagcaaccttggcaccgtatgtctcagacacttaagggtacacatgctccagtaggatcaaccaaaccttgatccttcattatgtaatgccttagcgaaagagtaatttaattgctctggggtctaagtaggaccaaataagaacaaaagatcagtgaaagcaaatctaaatctatgcactaatttaaaatttcaccaggctttcacaccacctgtcacaatgtgaaggacccagtgaagccacacgcataaccatattccttgctcattttatcagagtggcatgacaataaagtatcacgctaggtcaggacatctagaacattgtgtaaccctagttatacaatgaggaaaaatgcaagcactaagcrtcaggaaattcacccggaaatggggaagactgccatcaaattaggtactctgtggtcaaggaggatctgtaagtctcttgtggtagatttgcataaaattatgtctggagatgtgagggtgatctggctgtaacatatgtcaccccattagtcaccagggctaattcagctgatctggctgtctaggcaattgtacctcttgaagctgcactctcagtggaagaggacggctttccctgatgaaggaggagggtttttaggtcaagtgtatgtgagtagctgcactcccctactagaacctccaaacaagctctcaagctaggctctgagtgtcaagagttttatcagctcatcctatactcagatgacactgcatcataaacatatttttgtgaaatgaaatgtgtgaataaaatgtgtacaagcggctaggcacggtggctgatgcttataatcccagcactttgggaggctgaagtgggcagatcgcttsagcccaggagttaaagaccagcctgggcaacatagtgagaccccccatctcaaaaaaaaaaaatgtgtacgagtgttttacaaagaaaaaggggctgccttatcgtaaaaagcgtgtagacattagttaattctccctctttgattctttcagctatgggctacaaatcatgtcccagagatggtccgcccaaccctggagaggacactcagggtcctccagctagattatgtggatctttacatcattgaagtacccatggcctttaaggtgagttcagatgcccaaaggtcaggtctctgcaccctggcaaccatgagccaatagctatgtgcatgaagctctgcaccatgagccaatagctatgtgcatgaagctctgcaccatgagccaatagctatgtgcatgaagctctgcaccatgagccaatagctatgtgcatgaagctagcgtattacttggcaccacagaatattgtggtgttttgttaccacagatcagagagtactgacctagtctgacaaatacccgagaagattatgttagcagactcaggcttggtttccaagtttcttgattttttaattcaatgcaatttctattataccatgtttttacaactatagtttaagctctctgcatcaaaccaacatgtagtcctctaactgtagcccaccattgagacacacacccttcttcccactcacacagtcacaatctccgccctcatcctcactttgttaatgctgactcttgttcaaatgtcagatttctaacctaagtcttaaaaatttagaaagacccagtgtacaattatgtgttgcttagcaatgggatacattctgagaaatgtgtcatgaggtgactttgttgttctgcaaacatcatatagagtgtacttacacaaaccgaggtggtaaggttttatttaccatggtagactgcattacttttgtaataacatgaataaaacgcaaacacgttgtgcctaaatggtatagcctattacagacttaggctagatagcccagccgattgctcctaggctataaacctgcacagcatgttactattctgaatactgtagacgatggtaacacaatggtaaatatttgtgtatataaacataacatagaaaaggtacagtaaaaatatggcataaaagataagatacacctatacctggcacttaccatgaatggagcttgcaggataaaaattggatgagtcacggagtaagtggtgagtgaatgtgaaggcctaggtcattactgtacatgactggagactttataaacactgcacacttagggtacacaatgaatcacataatattttttcttcaataataaattaacattagcttattgtaactgttttcagcttataaatgttttaattttttaactttttgattctttgtaataatacttagtagtaacactaatactaattacttttttttttttttttgagacagagtctcgctctgttgccaggctgaagtgcagtggtgccatctcggctcactgcaacttccgcctcccgggttcaagcgattctcctgcctcagcctcccaagtagccgggactacaggcaagcaccatcacacccggctaagttttgtatttttagtagagacagggtttcaccatgttggccaggatggtctcgatctcctgacctcatgatccgcccacctcggcctcccaaagtgttgggattaattacttttttaataacatgaataaaacacaaacatgttgtacagctgtataaaaatattctttctttgtattcttattgtataagctcttgtctattaaatttttttttaaacttttttgttaaaaactaagacacaagcacacacattagtctaggcctacacagggtcagcatcatcaatatcagtgtcttccacgtccacatctcgtcccactggaggttcttccggagcaataacacgcatggagctgccatctcctgtgacaacagtgtcttcttctggaatccctcctgaaagacctgcctggcgtttttttacacttaacattttttaaaagtagaaggagaacattctaaaattatgataaagtgtagtagaacaaatatataagttgtatccatagtaaaaacagaaattgtttactatcattatcaagtattatatactatacatgattatgtgtgttctacttttatatacctggcagcacagttggtttgtttacaccagcaacaccacaaacatgatgtcactaggtgataggaattttaaactctattataatcttatgggccaccatcatacatgcagtccaccattgaccaaaatgtcattatgcagcacatgactctacttaaaagtgagaaaataaaatttacttctctgtgactaactaatgacatttacatctttttggacttgatagataatttctattcttatttttgatgggttcaaaggcacaaaaggtaaaattttaacagtgagaaatgacacaatatagtgacattaccttccaactgaacctataattgggaaatcaatatttgaagcttaagtacgacatgttttttggtgtttgtttgtttgtttgcttaaggtagggtcagccggggacagtggctcacayctgtagtcccagtactttgggaggctaaggctggcagatcacttgagtccaggagtttgagacaagcctgggcaacatggcaaaaccccatctctacaaaaaatacaaaaattagccaggcttggtggcatgtgcctgtggtctcagctacttgggagactaaggtgggaggatcacttgagctggggaggtggagggtgcagtgagccaagattgcgccactgcactccagcctgggtgacagagcaagaccctgtcttggaaaaaaaaagaaaaaagagtgggggggcagtcttgctctgtcacccaggctggactgcagtggtgtgtggctcactgtagccttgagatcctaggctcaagcaatcctcctgcctcagcctcccaagtagctgagactacaggtgtgtgccaccacactcacctaatttttcaatttttcttttgtagagacagggtctcgctatgttgaccatgctggtctggaactcctggcctcaagccattctcccacttcagcctcccaaagtgctgggattacaggcatgagccaccatacctgacttcacatgctttttgaatcttaagtttttttaaacaaaaaatcttttttgctaaaatatttttagcactttattattttttaagtgtcaagcagacagaattttagccaacaaaatattaaaaattatgacatgtttaaaagataaatgaacaagaatgagagtcaatagcatagatttttaaagggttgggttattcttccaataatacctgactgtgaggaagaggaatgaaggaaagagacaaagaggcttatcgggatgaaaggatgagtaaaataggcacaatggaaggtcaagggaaacacctagaggtatctaatgtgggttcaggcttgataaccacctgattagaatctgggaaagtaaaaatcacgtaacagaattcatgatggaggcataaggccattcagaaggtaagtaaaattaggaaacacaaggtaagaaatatggagcagaaatgtgggtcataagtgttgagaaattcaaagtgcttagaaatcagagacagaatggataattaacatgaataataatgtggcatcaaggagaaaagggactgttccctgctctcagggagatgggaggaagttgaaaagacattgtctttccctaaagcagacaatggggaaaatgttttccataaaggaaaactgagtttcacaaaggtgaaatgctagaggaaaaaattaaaatttttgttttgttttgttttgttttgttttgagatggagtcttgctcttgttgcccagactggagtgcagtggcatgatctcggctcactgcaatctccgcctcccgggttcaagcgattctcttgcctcagcctgctgagtagctgggattacaggcgcccgccatcatgcccggctaatttttgtatttttagtagagacagggttttgccatgttggccaggctggtctcgaactcctgacctcagctgatcggcccaccttggcctcccaaaatactgggattataggtgtgagccactgcgcctggccaaattaggaacaaatttaagagcataatggattttgtccaattgcttgattcccttctcagtctgttttgtgctgctataaaagcatgcctgaggcctggtgcagtggctcacacctgtattcccagcaatttgggaggccaaggcaggtggatcacttgagcctaggagttcgagaccagcctggacagcatggtgaaacctggtctctacaaaaaaaatacaaaaaaattagctaggtgtggtggtgcacacctgtagtcccagctgctcaggaggttgagatgggaggatcacctgagcctggggacatcgaggctacagtgagccataatcatgccaccgcactccagcctggacagcagagtaagaccttgtctcaaaaacaaacaaacaacaacaacggaaaaagaatgctatcattcagaaacatttcctttaaaagaaaaaaaaaagaatgcctgacactgggtaatagataataaacagaaatgtattggctcaaagttctagaagctggagagttcaagaccaaagtaccagcacctcactagagccttcttgctatgtcatcacatgctggaacgaggaagggcaaagagcacaagaaagcacccctcctcgtctgagccctttttacaatggcattaatccacgactgaacaactcccattaggccccacctcccaacacagttgcactggggattaagtttccaacacatgaattaggggggacacatttaaaccacagcaattcccaataagaaaatccctattaccaaagtcaacaaagactttcatcctgccaaattcaatagacattttgtcttcctattatttgatctctttcaatacagttgactaccaccttcttctgtaaacattttcttctcatggtgttcgtgacatctcatgaccctctcatggtctttggcagcttcttctctgccagcttccaaatgttgttatgcccagtcctctaccctcaatattcttgtcttactagctacactctctctataggtgacttaatccaatcatgtggatttaataccattttacatgctaatgactccaaattttatctgtagccatgacctctctctgagctcttgacttctctgttcaactgcctccctcaatatccacttgaatgtctagtgaccatttcaaagtcaaaatatccaaaatgatattctggattcctagccccaacctcaagaaatggttaccaccaaccacccaaggcatctgggatcatctttgatttctccctctccctcattcccaccaccccacctcatttccaagccaacattaaggcatgctggctctactactcattcatgtgctaatctgttcccttcttttcctctctactgcagttgccccagtcccagacaccatcagctctcccctattgcatacagcccgttaggttgatttccccagaagcagaccctgagatgaagagaatgcatacaagagtgatttatttcgaagtactgttaagggagtggggaaatgtggctgaaaaataagaggttaagcagatgtgaggtagaaatcagagtcctacagagagcaacttaggctaaatgtcacagaaagctctggagacaaagttgttcacatctcagaattacacagtcacaaggcaaagaaacaaatattgatacttgtaactttagttcaaaggctgtcccagcagggggagcagggtgtaaattcctgggcacatctaattgagtagatacacaagtcccagtagcctgaggtctgtcctctaacagatgcaggtgtcagctgtacagagtgagaggacagtgcacacaagacaggtactggcatcccaggaagcatgggcaggtgtcttaatccagctgggccgctatgacaaaatactttagactgggtgatttagaaacaatagacattgattgctcacaattatgaagactgggaagtctaaattctattatttaattcccagatataaataaaatgaattacatttattctttttttttttttttcagccaggagatgaaatataccctagagatgagaatggcaaatggttatatcacaagtcaaatctgtgtgccacttgggaggtaagttcaaatgtgcttcttattttaaaagacgatatttttaaaactgtgatctgattattcctgtcatatttatggagagagatgcaccctttactttcaatgaaaagtaacagtcagaacaggcattcctaaccataagtacaggtatatgaaatctccacttctgggtactaaataattcttacttttgttttgctggaatgccaaagaaaagagagaggggtggaaggaaaaacagtgtaaacaaaatatgttctaatataaaagtaattaaaatatatgaataagataaattcacaaatcaaaaaatatatatcaagttgttaatatgatgcctacaagaaacaaacttaaaatgatacataaaaaaactgaaaaacaggccagtcgcagtggctcacacttgtaatcccagcactttggaaggccaaggtgggcggatcatctgaggtcaggagttcgaaaccagcctggccaatgtggtgaaactctgtctctactaaaaataaaaaaattagccaggcgtggtggtgggcgcctataatcccggctactcaggaggctgaggcaggagaattgcttgaacctgggaggcagaggttgcagtgagccgagatcatgccactgcactccagcctgggcgacagagcaagatgccgtctcaaaaacaggaacaacaacaaaaacctgaaaagcaattctgttttttatttctgggaaagctgctggctcttttcccaagatcacaagagtagacaactataggaaaataataaataaacccttatggattcgtggtggggagggatattttgaacttgtttgcttagaggtggtgtggcagctccgacctagagtagaagtcaacccaacaagcaggaagaagataatacaggagaggatcggttggtccttttgcacttccttcacccctgccatagcctgggaacaaatgttgccgcacaggtggaaactcaggactcagttgtagagcagccttgagattctgaacttgtgaaaaactgaggaaaaacataagttacccactgacctctggcagtttttttttcccaccgatgtgattccaaactccaaaagtttggaaattacactctggtaagtacctctttctatatacttgcctgtgaggcaacagctgaaggtctgagctgtggagttgtttcgaggggcgaggaggaatgatttatttcccagtgcccggggctctgtccaaaagaacacgcagtcactcccgacctcattggagggaatcaggtttggacagttggacattttgaacattctgttctaagggactgcctaacaggatagccagtatccccaggaaaaaatgatttcacagcccaaagtaataaggcatttgtttcacaagaagacaatacatctcaattactgatccaatgtaaacagaacagagaaccaggaacttctaaattaaccaattaatatattagagaacataagaaaagatattagcaatataaaacgtgaacaaacaacattttaaaaaacaagctaaaataaaaattaaaaaataaaaacacaatgcaattggttgggataaatagaagaaaatggtcaaattgagatatcagaatgaggaaatctctcaatatgaagaagaaaaggacaagaattttttaaaatatgaaagaaaagctaagaaattcaaagaataaaattagaaattccaatatccacacaactggactctaagaaaaaagaaagaagaaaaaataaaaggaaacaagaaggtgggcatagtggctcatgcctgtaatcccaatgctttgggaggctgaggctggaggatcacttgagcacaggagttcaagaccatcctgggaaacatagtgagacacccatctctacaaaaaagaaaaaaaaaggggggtaatagttaaagaaaaaaaaaaacacgaagatcttaaagggaccatggagcacaaaagaggaaagatgaggaatatcacgggtgaggtgacctgtagtcccagctacttggaattctgaggtgggaggaccacttgaggccaagagttcaaggccacagtgtgctatagtcatgcctttgaacagccactgaactctaacctgggcaatatagcgagatttcatctcaaaaaaaaaaaaaaaaaaaaaaaaaaaaaacataaagagaaaatgttaaaacttccagagcataataaataatccaataaagaaggcaaaatggaataacaaaaataatcaatccaagacaaagcaraaaaaaaaagaaaaggggcaataaacagatgaraaaagtagcaaataaagggcaagatgggagatttaaactcactaatatcaataattgcagtatatataaatggtctaagcaccccaattaaaaggcatagattatcagaatggatataaaccaagtcccactatacattatacacaagaaatccatcttaaataaaaagtcaccaacaggttaaaagcaaaagtctttcaaaaagcaaaaggatagaaaaagatatattaggctaacactagtaaaaataaagctgcagtcgctattttaatatcaacaaatacttcagagcaatgagtattacatgggataaagaagattattatataatgataaaggagtcaatcctaaacatctatgcccctaataacagagcttcaaaatacatgaagcatcatctaagagaaccgaacagagaaagagaaaaatccacatttatagtcagagattctttttttttttttttttttttttgaggcggagtctcgctctgccgcccaggctggagtgcagtggcgcgatctcagctcactgcaagctccacctcccaggttcacgccattctcttgcctcagcctcccragtagctgggactataggtgcccgccaccacgcctggctaattttttgtacttttagtagagacggggtttcactgtgttagccaggatggtcttgatctcctgaccttgtgatccaccctcctccgcctctcaaagtgctgagattataggcatgagccaaygcgcccggcctatagtcagagattctattaaaatgatatcatactaaaatgataagtatacagaaagagctataggatataggagatttaaacattatcaaccttcttaacctgacatttatagaacacttcaccaaaatataagagtgttttctttccctccctccctccctycctycctyccttccttccttccttccttccttccacgagtctcgctctgtagcccaggctggagtgcagtggcgcaatctcagctcactgcaacctccgcctctygggttcaatcgattctcctgcctcagcctcctgagtagctgggattagaggctcacgccaccatgcccagctaatttttgtatttttagtagacatggggtttcaccatgttggtcaggctggtctcgaactcctgacctcgtgatcaacatgccttggcctttcaaagtgctgggattacagatgtgagccaccgcgcccggcaacataggccatttttcgagccataacataaatctcaataattcttcaagtattttaattatgcaaggtatgttgtctgatcaaacaggaggcacacatgtaaataacccataagacctaaaaaaattaaaatctttatctagatgtaatttatatattagcaacacacaattggaaattatttttaaaaacaatgctaaacattaaatatttaaagataaatctaaaagaatctgtgcaagagctatacagtaaaaacaacttattactgaaagaaataaaagatgatccaaaattcaatggagagatataccatgttccttgatcagaatatcaagatgttaattttccccaaattcatctgtagattcaatgtaatcccagtcaaaatcccaatagaaatggaaaacctacttctaaaatttatatggggcctggagcagtggattatgcctataaatcccagcactttgggaggccatggcaggtggatcacatgaggccaggagttcgagaccagcctgggcaacatggcaaaaccctgtctctactaaaaacacaaaaattagccaggcatagtggcgcccatctataatcccagctacttgaaaggctgcagcatgagaatcacttgaacctgagaggcggaggttgcagtgagccgagatcccaccactgcactccagcctgggtgacagagtgagattctgtctcaaaaaaataaaataaaatttatatggaagtacaaataacctataatagccacaacaactttttgaaaaagagcaatagccaagcacagtggctcatacctataatcccagcactttgagaggctgagtggggagaattacttgagcctaggagttcaagaccagcatggggaacactgagaccccgtctctacaaaaacatcaaacaattagtcgtgcatgggagttgcatgtgcctgtggtcccagctactcaggaggctgaggtaggaggatcacttgacctggtaggttgaggctgcagtgagctataccactgcaacccagcctcagtgacagagcaagactccatctcaaaaataaaaagcaataagtttggagggcttatactaatttcaagaattattatacaactattagaatcatgacagtgccatattagcataaagaggaacatatagatcaataaaacataatagagaatgttaaaatagacccatacacatatatggtcagttgattttcaacagaaatgccaacgcaattcaatggggaagggtaatcttgtactacaactggcccataccagcttgcaagaacccgttgtgcaaacctcttcctaactccacattcagtgatgtcgggttgttagcttgaatagcccggtgtgaatagttacatcacagacattctcaaatactacaaactggggagcttttttcttcctggatagctggttgttaaacatttatcagtattccactggaggtgttcatgatcttgattgtaatgatgattttacaggtgtatgcacacattaaaattcctcaaaatgtacacttcaaaaatgtgtagtttattgtayatcagttataactcaccaaactagaaggcaaaaataatgcatgataaaaagttgcacatctacacatgctcagaaattttgccacataaagactcacactggaaatcattaggtccgattgatgtactaagtgaaaggaacaaaaatctaacagatgctccaaaaaaaatgcataaagcaaaagtgatcaaattaaacttaaagtgtgtattatctataaaaatattaagatcaaataataaaaggaaaatgaacccataatacgctacaattaaagtttatatatatactattagcatcacagatgttgagggtagataaataccgtgtgaacatgctaagttattgtctttattagaaaacttcttaaaagtaataaagagttaagaagaaacaggataagtgggataaattgaaataaatcaagatggtagaaacagttcaaatatatgtatggttgcaataaatgtagataaaataaactcacctagacagagattgacaatttaaaaggaggcacctaagcaaaaagacatgtgaaagttaaaactttacaggtaaaaaaaaacacacactcaccaaataccggaaaaagytggtattactatattaatatcatataacacagacttaaaaattaaaagcattattagggataaaaagagttgtgcgtraagatgaaagattgaatttaccaaaaagatatactaattttaagcacatatatatcaaataaagtatcttcaaaatatataaaacaaaaaattgacagaatacaggaggacattggctcatgcctataatcccagcactttgggaggccaaggtaggaggatcacttgaggccaggagtttgaaatcaacctgggcaacataatgagacccccctcatctccaaaaaatattttaaaaacaaaatttagccagtgtggttgcagatgcttgtagtccagctactcaagaggctaaagagggaggatctcttgagcccagaagtcaaggctgcagtgagcaaagatcccaccacagcactccagcctgggtgacagagcaagatactgtttcaaaaaaaaacacagaagaacattaataaatcaccagtatagtaagagatttttgacatattcctttcagtttttgacatattccttctgttaattttgacatattaatttcagttactgagaagccaagaagagctagacctaattttatatataacatgtgtgtatgtatatttacatacatatatgtatgagagagagaggagagacagagtgttacatccaaaaatgggagaatgtatctatttcacatataccagaatgtttataaaaattgccagccaggcgcagtggctcatgcctataataccagcactttgggacactgaggcaggtggatcacctgaggtcaggagttcgagaccagcctaaccaacatggtgaaactccatctctactaaaaatataaaactagccgggcgtggtggtgcatgcctgtaatcccagctacttgggaggcttgaacctgcgagacagagtttgcagtgagccgagatcgtgccatcgcactctagcctgggcaacaagagcaaaactccatctcggaaaaaaaaaaaaaaaagtgcccaggtactatgccataaaaaaagtacccaaaaatttcaagaagtaggatcattttaaaaaattgtttttaattgagatagggtctcactctgttgctcaggctggagtgcagtgacacagttataactcactgcagcctcaatttccccagctcaagtggatcctcctacttcagcctcctaagtaactgggactacaggcatgcaccaccatgcctagttaattcttgatttttattagagatgaagtctcactctgttgcccaggctggtcttgaactcctgacctcaagtgatcctcctgccttggcctgccaaagtgctgggattacaggtgtgagccatcgcgccctacctgggatcactaaagtgtggtaaataccttgagaaaatacaaggggaagatatggcatacacatgttttccaaattcaatcatagaattactgccttttcccaccatccttcttttactttttttcgcaagatkcttattaacatacccaggaactttcctttttaaagaattcacagtcacccttataaacattcattcttgcttcttgtgaggcttgtttgttgacctgtggacatttactctacaggcgatggaagcttgcaaagaygctggcttggtgaaatccctgggagtgtccaattttaaccgcaggcagctggagctcatcctgaacaagccaggactcaaacacaagccagtcagcaaccaggtacagcctaatagcttycactakggtgtggggagtgggggcaggatttacatgacacaaagaagcctcagctgggagtcaggaaggctcatgattgctccacctaaatctcatcatgggaccctgtgcaagtctttagacttctttctattggtgtcactttaaaaaacggacttggggcctggtgcggtggctcacgcctgtaatcccagcactttgggaggccgaggcaggcgatcrcgaggtcgggagtttgagaccagcctgaccaacatggtgaaaccccgtctgtactaaaaatacaaaaattagctgggcttggtggcacatgcctgtaatcctagctactcagggctgaggcaggggaattgcttaaacccgggaggtggaggttgcagtgagccgagattgcgccactgcactccagcctgggcgacagagtgtgacttcgtctaacaacaacaacaacaacaamaamaaatctaatgaaaatcaatgaaaaaaaatgagaaaaaacactaaggctcaacagaaaaaggagtaaaaggaatgaacagaaattcacgaaagacaaattgcaagactggtacacatgaaaaaaaactcactattaattagagaaacttaaattgaagtgtgatttttctattgcacatcaaattagcaaagtttttgtcttattaatatttttaaatataatgcccccrtgtaggcaagtgattaaatgctagtgagtgcaaattggttcagccttactaaaaaaacaatttgtcaatatgtatcaagggccttaaaaaatgttcacagtcctttatttctgcaatctatgctaataaaaaaatatcagaatgcctagatagactgatgtgtgtttactacaacattgttcataatggaaaaaaatggaaacaacataatacaaaaaattaaggggatgattaaataagttacaagacattcatattatgtgaaatcttaacaaaagatgttcttgaatccattttaaggaagcaaaatgaacaagatatgaagggacagactaggacacgaaatgtatatagtatgaaggagattctattaataaaatggattttattgaagaattttttttaacagtacaattgcattcaacaacgtggccttgattttgtgctctgctctccaatgyaaccacataggttgagtgccatccgtatttcacccagccaaaactcttgaaattttgccaacaacatgacattgtcattactgcatatagccctttggggaccagtaggaatccaatctggtaagtaaaactttaggaagcatttcctttggtgtagagtgtgaggctcatgtgaactactgtatttgattggaatgccttttggtttgcctgtgcaacctcttcaagtcattatctgtatatatgaattagaacttttcatactttcctgactgagctgttgtaaaattgattacattataggtatgaaattgcctatcagtgcctgatatataggaatgctcagtaaaagttagtttaattattatttgacaaaggagtttctatggccatgttttgcaaattttcaatcttttgatctctgtattcamtagtgatacttctactatgatgtgctccataaacttaagtagaaatttttctactttaagatgattccaaaagttgtgtctctatttcttccacttcagtcttcctacctttccctgtatgccagctctctctataagactcatcaaaaaatattatttaccctctgaaggaggcagctccataaacttgccttgcttgatcttcccatactacgagtaactctccattcagtgcatactctgcactcagagaaactggttacaggtgacctgcagtgtcctggtaggtgactgggtgaatgggaagacagaggaggaggatggtttattaacctttggttctcattatgcaaactaattatgatgcatgttttgatatttttaagggtgaatgtttcttctccacctttgttaaaggatgcacttctaaactcattggggaaaaggtacaataagacagcagctcaaattgttttgcgtttcaacatccagcgaggggtggttgtcattcctaaaagctttaatcttgaaaggatcaaagaaaattttcaggtaagagaattgcttttggagatgtgaaaagatgggtatgtttgctatttttgcttttatagaaygtgttcagcttaataggaaacctgtaacrctctcatattttattttataccagccccttgacccatgtagcccatatctaggtttaattttcattcaatttgagacaattgctagtacttcagagattgctttgctacttgtacactatccagatctcttatattttctctttccttatctactttttattttttgttttaaattttttttttgtttgtttagagatagggtcttgctatattgcccaggctagtctggaactcctgtcttcaagcgatccttccaccttgacctcccaaagttctgggattacaggcgtgagccactgtacccagcctcttcccttatctattgacccttgacactacctactcacttctctaccagcacaacagaaattgagtgaataaaatttggaattcataatagtcaactttccaccttcttaatggctctggtaaaagttgaggacaaatttgaaaattattgaagaggaccatttagacttcatgaatgctaattgcctttayttccctctataagtaatctatgacttacgttgtaacttccaagtgaagaaagaactagacaaaggggtaattcatttattccgctactactaaagactaaactgctaggtaaacacaaccatagaaaagtgccatacaaaattaattaattacccattagctaatttacatttcaaaagtaaattgcctgtttagccctactcataattaaagataaataaaaagtaagatactagttgtcccttcatatcagaaaataatcaaaatacttggtaatatttggggaaacaggcgctttgacacactattgttagaaacattaatttgtatgagatatggaagagtaggttaaattatttcatgtccatcaaaattcaaatgtacatgttacatgatttatttatatgtggaacctaaaaaagttaatcacataaaagtaaggagtagaatagtggttaccggaggctgagattattgaagggagggtgctatgaggagatgttggtcaaaaaagttgtgattacagttagaaggaacaaatgtcaagagatctattgtacaaaaaggtgtctatagttgatgatgatatagtgtattcttgaaaaacataaagagagtgcatcttatgtgctcttaccacaaaaatgataactatatgaggtaatgcatttgttaattagctagatttaaccactccacaatttatatgtatgtcaaaacatcatgttgtatatgataaaaacatacaatgttatctgtcaaattaaataaattcaaatacacttatccattgactcagcagtcttaccctatagatgtatttgcacatatatacatgggtgcacacacacagacagatgtttattatagaattctttgtaattttttaaaaactcaaaacaatcttcaacaggattttataaaacaagctatgacatatttgtacactgaaatatcatatagccatttaaaaaatacaagtactgacataggaagatagccacaatattagacaattacatcttcagagcttttttgctacatgatagaatgcaactcaaactttagcaaaaaataaaagataatttattggcttgcrtaactggaaagtccatgagtagatcagaaatggctagacacaggtactcaaatgatttataaagagatttagtcctctctctctctccctcctttctctccacccacatggtggcacagacaattcctaacagctccaggataatcaattactcatactcagtgaagagtgaagatgatcagaaacaaagtcttctatcagggtctctatcaatccctgattagctcctgaaggtcaccctcatattacccactgtggccactgagtaggataccctgaccccagggctatatccctattcctgtgctgaagaagttaacagacagctccactagaagggggaaggaaagttcgtaaaaagaaaaarggcgaaaagatgctgaatagttacatcaactcctgacaataacatttgccaaaatgcctcatcctaaaaagtggttgacactcttttccacaatcttagaaagagatcaactgcattactaatgtgtaggytcattgaagattaaaacacattttgatggactttttgaggactgaaaattttgctgttcaaaaattatargagtgttacaagtgacctttgcgatggaaagcatttggactttatagcatctagcaaatcgcaattttgtaccagagaaaatgccactctccttgaaattttcattgtaactaattatgttatattccatatgtttccatagccttgataataaaagaatggaactcagaggtcacatattccaagaaaaaaacggatacagatttagaaggaaaatgagaatgaaaatcacagccaattctcactctttagggaatagactcacccaataaccatgaattttgctgggtatgaaagcaaggagcaacaaaataawaaattatgctctcttagaatgaaggtaaaataaactgttagaaatattttaaaagaatggcaaagatcaataaagcataaagaataaagggaaaaataaatattttgatgaaaaaagaaaagcaaaagaaaataaaaactatgtagtaaaaagttaagactgggcacagtggttcacacctgtaatcccagcactttgggaggccgaggcaggaagattgcttgagaccaggagtttgagagcagcctgggcaacaaagcgagatcccattgctttaaaattaaaaaaagttaagttaaatcatcagtttaggctgggtgcggtggctcactcctctaatcccagcaccttgggaggctgaggcaggtggatcacctgaggtctggagtttgagaccatcttggccaacatggcaaaaccccatctctactaaaaatacaaaaattagccgggcatggtcatgggcgcctgtaatcccagctgctcaggaggctgaggcaggagaatcgcttgaactagggatgcggagtttgcagtgagctgagatcataccatagcactccagcctggatgacaagagtgaaactttgtctcaaaacaaataaacaaaaaaccatgagtttaaaaactagataaaattaaaggtaaacatgaagaaagctaatacggagccaggatattttaaaagttaaaattttaaaaaaaagaaattataccaggtgtggtccagctttgttgccatcatccactggcctccattctttgaagatgttatctctgggctcactttcactttctccaacactcttcctctcataattcttagtgaattcaacatccacaccagtcgttctccacccttatccgacagctctttgacttcctctcccataagaatcttgtcctatatatttcagccactaattcccatgcctakcccttggaaattgcaataacaacttcctaataaatcctccatagcctcaatttcaaacatccccctctctttcctacactagcaattgttcctctctactgtgtaactcccaccaacattcacatatgtagtaacctcctatcttaaaaaataaaatccaacctagactcactttcctctccaagtattatccacttctctcttctgtttcaaacatctggaaagagaagttgttctcgctgcttcccattcccttcccccactatctcttgaagccattcaaaccaaacttttaccctgaccatcccactggaacagcccttgtcaaagttaccagtgacctccacattgctagatccagtaattctcagtccttgtcccacttggtctttcaaccacatctgatacagttaacaatatctccttcttcaaacatttactgaaagggaaaactgtaggggaagcagtttgagaagaactatcaggagctcagttttgtaatatgagatcctcattcacttaggataatttgtgccatgggagaaaaaaaagaccactgaaaattaatccacatacgacaagaaaaaacatgacacagaaataatgtagagagggtgaatttgaaagcttatattaagatcgaaaccaaagtttatgaaagtaagttcacttctattctcaacaaaatgtaggttacaattgcaagtttattaactcagaagaaacagtgaatcagtgttgattttttttaaatatgcttgacaaaattacataccacaacatgacatcctctatttcacaaaagttttgcagaatgttcataaagagaataattatcacmaaaattttggagggctttatctgaaggagatttttaattctttaatttttttttcaagtcacactcttttgacatatctatcaaagtagatttttaactgtgcaggattcttctttgaaaaagatcatacctataattagaacaaatctccaagatcattttctttgatttcataaaatcctgcatctttgcaaggtttgcmacctcactttgccattagattattccatatatttactggataagaggctgatcctccaagacttaaaggagaggaytagtgtttagcaaaaaagaagtctgagtaaggattcattttataggcgattcattcatttttatattgtgcacatttttgattccttatgtaatctcataaatgccaataattggataataaatcataaaagaaaatggttccctgaaaagagtacttggaaagaatccatggagggataattaagtaaatcgtgttccatctacacaatgaataccatggctaaatgaataaagtcaggttgcatattgtgatagaactatcactggggtcactaagatattatgtgaataaaggaaagttgtagaatcataaagatatggtccaattactgcattttcctcttaatgtgtgtagtatttgggaggaatatctgggaagggaaataagaatggggtgatgagtgacaagattttcattatttattccatatgggtctatgtacttctacagtgtttcatttctttgcaaagagcgtatatttatgtactacttatataattaaaatctattaatwattaaatatattaaaagttaaaggatagaaagataaaataataaagagaagataggttatatacagataatccaaatgttaaaaataaaaggaagtgaaaaaatatatataaatgttaataagggacaatcataaaaccagaatataaataaagtataaaatctaagaaaaataaaacaatggaaatgtaattagaataaaaaggtagaagagacataaaaaatgagagaaaggatttcaacatagcaaattaaaagttaaaaacaaagcaaattaaaagttttttwaaaaagcaaatttaggccaggcrtggtgaggctcatgcctgtaattgcagcactttgggaggctgaggtgggaggatcgcttgagttcagkagtttgagaccagcctgggcagcatggtgaaaccccatctctacaaaaattgaaaaattagccaggcatggcaaaacatgtctgtagtcccagctacttgggaaactgaggcatgagactagcttgaacccaggaggtggaggttgcagtgagccaagatgataccacagcactccagcctgggtgacagagtaagaccctgtctcaaaaaaaaaaaaaaatcatatttagagactcagaattttttaagtgtaagacagtagttcagaatcaaaagaccagcatttcatacagaaataagaattcttcacatttgaaattttaggggatttcattaacatttgtggtttcagagcatttggaatttcttgtaagatgtccccagaaagaccgtctcaaaaacaaagggcagaacagagtatccagctccacctcagtgggtagccccccaacaccagcctgactcctcttagacatttgcagagatattcatacatctttggaaggctcccaccggtggccccactttctgatcccaagcttgaccttcaaaaatgttctattatttccrttatttcagatctttgacttttctctcactgaagaagaaatgaaggacattgaagccttgaataaaaatgtccgctttgtagaattgctcatgtaagttccggggatcattaatgggtattgaccagtggtattgaatggtcatgtgtcaagcaacaaggctcatawgaaccctgacctatgtccatagcaccagggcaaagcatggtgggccgcatattctgaatgttaacatgcctgagggaaatacatccactacagggccttccacaaccctacactctcactgaaaagaagagtcctggcatctgtgacattttgtgacttcggtgaaggcatgcaggctaaggaacctgaggagaattaattcatcatgtacatatgctaaaacaacagcagcacaaatgttgaaacaacttatttatttattcctaaaaatgaaagtgatgcacaaattagagcaaagttataaaaaaaaatttctaagggagaggcatgatgatgttgtagaaagagcactagattgaaaccaagaacttagacttttagacaaatacttaagattttagtttccagctctacctattagctgacttcctacaagcaaaattccatatactccttcaaaatgtcaagttcagctaaccaactgaagtagctctttattctctaaatattacaggccctttaaaaaagaatatagttttggccaggcgtggtggctcacgccaatactttgggaggctaaggtgggcggatcaccttaggtcgggagttagagatcagcctggccaacatggagaaaccccgtctctactaaaaatacaaaaattagctgggtgtagtggcagttgcctgtaatyccagctactcaggaggctgaggcaggagaattgcytgaacccaggaggcagaggttgcagtgagccgagatcaygccattgcactccagcctgggcaacaagagcaaaactccatctcaaaaaaaaaaaaaaaaaaagaatatatttgctatatatgtgtgtatagatatacacacacatatacatatatatactcatatacacacacatgcatttttttcttcttaatcattctctattaatgtttccagttcttcaaatcacctgaatattcatcttcrtcttgaatctttaagtgaacattcagaaaatgctaagatgattcatatagyttggacacttactttactgatcctactgtttttcatgggtcagaaagtacagtgactggattaatattgaatttctgaattaataaaacaacttcctaatggaaatttttcagggggaaaattgtttgacatcaaaaggcaccaccacccaacctcaagaacaaaagagtaaacataaacacataaataacactttcctagaactaacagttataggttaattaatagctcttgaagataaatgacttctattgaatcaataatatatcattaagttaagaagagaaaccaggtgcagtgtctcacatctgtaattccagcactctgggaggctaagataggagaatcacttgatgctaggagttcgacaccagcctggacaacrtagcaagaccctatctctacaaaaaatttaaaaataagccatcatggtggcatgcacctgtagtactagctacttaggacgctgaggtgggaggatcacttggaccccagactttgagtgagctaaggctacgctccagcctggtagacagagcaaggccctgtctcaaaacaaaacaaaaaacaaacaaacaaaaacagtataatcaatccaccaatgtactaattgttttacagacagttggtgacattattcagtttgacatctgacatatttaaaagcaattctagcaacttcggggaaaaaaaaataactcttaccaggaaataactagaaaaatcagcaaggtggaacaagaattaggccccattaatcacaaatactgtatcatttagagatattggaccatgatttttttcagcttttatcaagttgatttttaacatttgaaaatcttaatattttccattttaatttacagtacatgcagaaaactaaatcaggaacacacacattccagacattttacagaccatttcatcattgttatttaagagctaaattcactgccatcatcatcgtcataatcatccagcaaacttattttgctactcatcacctttctagatctcaaactctcaacacgcaggaggtctagtkagaggggcaagtaaaaatgctaatgagactgggtgtggtggctcacacctatagtcccagcactttgggaggccgagacagggcgactgcttcagcccaggagttcagcttgggcaaccgtggtggcacatacctataatccctgctacttgggaggctgaggcaggaggcttgcttgggagcccaggagtttgaggctgcagtgagctatgatcatgccactgcactccaacctgagtgacagagtgagattccatctgtaaaaaaaagaagaaaaaaatgctaatcagcagagggtgacactggtaataagagttttgaagagaaatgcccatgtagtggattggagaaggaggcagccagcgtcaagggaacagaaagggggaaggagtagggaagaggcatgtgcacatgacatgcctaagacatgattcaccactggggattctgttctgagtaaaatgttgataaggtggccaccaaccttccctcaacacactcacattcaggaggctgtccagagcttcaggaaaaggtgctggcttgagggaaaacagaagaggaaagtaggtaagaaacagcagaggaatgaataggagagaggggtagtggtcagtgaaattctcaaaggatgctattgaaacatacagctgtgcaatttttgagtgaacttttttctgtgggggaattgttttggcaggtggcgcgatcatcctgaatacccatttcatgatgaatactgactgcmgggagttcctgaacagatttttcactcccaygagtgccaagacggtrcaatgsgtagtcccctagatgtgaaaatgaagagagagggttttaccatcctgagaagaaataatgatggaaacatgtttaatgtttgtgcagtgtaaatgactttgactcagtcacattgaagtaaaaatattaaaatctgttgaaataactcttaggaaattatcaactaattttttcagatcagtatcttctagattccagacagaaaaaaattacacttcagaaaagacatcaaaggcaacatatgacaacaagtaatttatgaatctgggtagtagcgttggtaatctgagttctttaagggttmacaggacaacgaagtgcatgtggcagtgtgctggcagtggccttgaggctttggaccattggttacaaaacagacacagccaagataagatccacacacacattattaacaaggaagtgatttgctgcaccttgagttgagaggrctacatgtagaaaagtcttaaaatagagctaaacaccacagtggtcaacaaagccatcataatgttggtgtttgtttccctccaatgtatgtatgtttagtttttatccaacctgaggaatgaaaacttaactggatctctcttgcatccttaaagggcctgagtctcaacatggctgctgatccatacttacacatcttactgtcaatcttgcctacattgattatagaaccactattacgtgaaaaggcttgaaacaaccaacatatacaaataaaaccctgccttgtaaaatagtaaaagagaagccatatattggcttttcttcttaacttgggagatatattgaaacaaggtgctttataagattattgtacttaagactttaatagtgttacttggatagcttatatgaattttgagaattttatatgaattttgagaaagcaagttcaaaagaactctggtaattttcctgtatgtacaatttaaagagtgaataagattattagaattcagcaatagagatatatctattttcaattcaactacagaaatatattttattggccgggygyggtggctsatgcctataatcccagcactttgggaggccaaggtgggcagatcaggaggtcaggagatcgagaccatcytggctaacaaggtgaaaccccgtctctactaaaaatacaaaaaattagccaggcgcggtggcgggggcctgtaatcccagctactcaggaggctgaggcagaagaatggcrtgaacccgggaggaggagcttgcagtgagccgagatagcgccactgcagtccggcctgggtgaaagagcgagactccgtctcaaaaacaaaaaaaaaagaaaagaaatatattttattcattcacattaggtcactgtcatactgtcataggatgagagagttcttcaaaaattatgttttcccaagatcagttgcttatagataatgttcaatgacctcaagacatatatttttgagaaattatcattttaaaaaatttggtctatactgattgttttcactgattccaatattattacttataacactgacctctggaaaatattttgttcacaagaaataataaagtataatgatttgttgcatcacatgaatctccattctgtttctaaggttggggcaggggaagaatcatctgaagccagttaaaaggcctttgatttaatcctgctgtacatttagcactgggaagagaggaaagaaaaggggatgtggtggctcatgcctataataccagcaatttgagaggccaaggcaggtggatggcatgaacccaggagttcaagaccagcctggaacaacatggcaaaaccccatctctaccaaaaaaaaaaaaaaaaaaatacaaaaattagccaggaatggtggcacacacctgtagtcccagctactcaggaggctgctatgggaggatcacttgggttggggaggcagaggttgcagtgagccaagattgtgccactgcactcgagcctgggtgacagagtgagattctgtctcaaaaaaaaggaaagattgaaggaaggaaggggaaaaaggaaggaaggaaggaaaaaagaaaggaaggaagggagggaggggaaagaaaaaggaaggaaggaagggagggagggagggagggaggggaaagaaaaagaaggagggagccgggcgcggtggctcacgcctgtaatcccagcactttgagaggccgaggcgggcggatcaagaggtcaggagatcgaggccatcctggctaacatgttgaaaccctgtctctactaaaaatacaaaaaattagccgggcatggtagcgggcgcctgtagtcccagccactcgggaggctgaggcaggagaatggcgcgaactcaggaggcggagattgcagtgagccgagatcatgccactacactccagcctgggcgacagagcaagattccgtctcaaaaaaagagaaaaagaaggaaggaaagaaagaaggaaggaaggaaggaaggagggaaggaaggaaggaagggagggagggagggaggcaggcagagagggaggtatggaaggagtgacggagggaggaaggaagaagaaaaaggtggtaccattatgaaagagcagaaacttgagtcctggtccctgttgtgaaagtccttaaaaatactttgagggtattagtgtagaggtgagaatggaaacaacacctatcgaagcatttttaaaagacagacattggaaaagagtcccatcatttgtcagcgaaaaggtatttctaaaaattgggggagcgaaatcctctcttagtcataacagagatggaggaaaaagatctggagacagaaagtaggaaggtcaggaaagaacaacagtctgatggaagcttctgcatgttccttctccctccactgtcacccctctcaagcttcccatctgttatgggttgaactgtgtcctctcaaaattcatatgttaaaaagcccagaccccagtacctcagaatgtgatcttatataaaaatagggccaggtgtggtggctcttgcctgttatctcagctatttgagaggctaaggtggaaggatcacttgaggccaggagtttgagaccaccctggtcaacagagtgataccttatctctacaaaaattttaaaattagctggatatggttgtgtacacatggctggttgtgcacacacatagcacccagctatttgggtggctgaggcaggaggactgtgtgagcctaggagtttgaggctgaagtgagctatgatcatgccactgcactctagcttggatgacaaagcaagacctcatctcttaaacataaataaaatagggtcactgcatatgtaattaattaagatgagatcatactggggtagggtggagtaaggtgaaccctaaaccaatgagactgtgtcctcataaaaaagggaaatttggacacagacaacacacagggtgaatgtcatgtgaagacgaaaacagagatcagggtgatgcttctacaaggtaagaaatgacaaagattgccaacaactacaagaaaccaggcaaaaagcatggaacagttacacctcagccctcagagggaatcaacattgccaacacctctatctcagacgtctagccttcaggactgtgaaacactacagttctgttctttaagccacccagtttgtggtacttagttatagcagttttacaaaagaaaacaccatccctcagtaaggatttcctgtctctccagttaacatcggctgtaaaaatggccttgccaaatcaatgctttactgagcccaagtattgacaaccaataatcttgatcttttggggacttacgcaaccccaaaaagatgtttgttaacccaaatcaatttttcttatcaatggcctctgatcagctatgtagaaagatccgtcaatagtgatgcaacctgcctgaaaaaggagaggagacccacggcatgccatgctcactggtccacagaaacataccgggctggagcggcaaggacatcctggcccagtgcacagaatgtttctggacctgcagtgtttcttgataagactgtttctttgctgggtacaatggctcacgcctttaatcccagcactttgggaggccgaagctggtggatgatatgaggtcaggagttcgagacaagcctgaccaacatggggaaaccctgtctctgctaagtacaaaaaaaaaaaaaaataataagatgggcatggtggcatatccctgtaatcccagctacttggaaggctgaggcaggggaatcacttgaacctgggaagcggaggttgcagtgagccgagattgtgccactgcactccagcctgggcaacacagtgaaactccactcaaaaaaaaaaaaggaatgtttcttgatctttttgtagttcatgagcgtgatgactgagtgttcatgtgcatgtgtgaggcgtgccacccttaaaccttgttataacatcagcacattacccacatgacacgaaaaaaaatgtttcttatccctgacagttctccaagagggcctccttcaggcattgtcattccgtccacagtaacaacacagcaccaggagaggccattagaggggcataggcaatgatcctgtcttcagccttcaacactttgaggtgtgtgcattctgaagccacagtcatagggattaacaaagataaacaaactcatatttctaagacttgatatttctcagaactctcaaaatttcaggcttctgctaacttcaatgtcttcttcttgaatcagaatcctccctgaatccaaatagtagccttaatgtttctgtctctacacatgaaatccccaaattctcactttagcttcttccaccctagtctctgcctcccattcatgagaaacaggatgagagggtgatgcccaactaataggcttactctctcatctaaagggcattttggtaaaaggctttttctgttgggtcatatctcctctggcaggagctatatccccctggcttcctatttggattcttcagaatctcggcttgagctccggctgccctccctagatgtactaactgcctagcttggggcaaaattctccttttgcacagcacgtgcttgcctgattcagctcaaagcagatcagactttcttaataaggccacattctcttccctcgttgccttctgcactccaggcttgaaccaaaacttggttcctttatgaaggacttcaccgaaggccacaggaagcatccagcacaatcttctaacccagcaccaaagcctgagccttggcagacacatggtccaagttccaaaatataagttacactttaagtgaatctggtgaatgggctggagccttggtctggtggggagtgctggggggtgctggggaggagaggaagggacaggggtgtagggggaagcccttctatccgtctttttttaacagttacttctcttcctttttctgtctggtttctcataactccaaccagcagagacaagcccaggatgaagactgggcagtagcctgggaagaaccgggcttcggtaaccacaggggccccaggcggcccgggaagcgtggaggtcccagcgtgcgggcagaaagcccaagaggccgagcgctgtggcagctccatggggccctggcggaggcaagggcacagcgtggctggctgcatatgtgaacaaggtgagcggcggggccgcggtcgtcgcggagtctgagcacaccaaggagcgcatcagacttcaagggtcgaagtgcaaaggggcagtttttgatttcggggtcaaccaactaggactcgatgggtggaaaagaagtgcctaaacagcaagctgcttacctcaatctcggtcagaatttgtgggggccccatagatgtgggtgcctggcggggtcctggtgcggacagcggtctcgggtttgcgcactgcgcacagtatcctcatcacgacacgatggaagctgcggagctggggtcaaaataagaaggcgcagctgggacctggcgacaccaagagaatggaagcccccagactcattgcgggtctctgccgggaagtgagtatgtaggcagcctgtgggcggaacctcaccttggccttgacggaaacgggctctgcgtttgcctttggggagaacaagatggggcagctgagcctcagcaaccacgcaggagcatccccagcaccgcacagatcatggacaacgggcagccaattactagaatggccagtggaaatgaattccgtataatgggcgacaaaggagacctctgttccttcgtgtgccctcaatgtggtcagctgggacccaggcacagtgaatagttaaggctgtgagctggtgctggtgccacgatgagtggcccaccttcactgagaatgaaagatgggtagattctgcctgtaccaaaggtggttgtgagacccccagagcaaggcagggacccctccccatttcccttacatgctgtgctgactgaagctacattcaaccttgcagccacacaaccacaaacgtttcctttcacaaaatagaccaatcaaatctgagacagagtattctgagcacaagcatcttggctaacagtgggcactttgcaaaagatgctccccaatgcacttgcccagtaatgtcctagcctgtcctaacctggcctttgcttcatttcagtagtaaaaagcacacccctgggtggagatttaagatgctaatgagacatgcatcacatgaagaagcatgtccagagactgcataggtgcaactgccaaaccaccccaaacatgcaatgatgtcacatggaggagctccaaagcaaatgaaaccccaaactaacctgcagtcagggagctagctgcaggtctcttcctgctgctacctccccttctgctcaagctgagagctccaataaactgccttgctcaagcccatctcagattcttggtctatttctatttactaagggtcaagaacccaccagccaataacggttgtgtaagacgtgacctgtaatgctaaccacacattgattctggactccaagaaatgagtcttctcctggggctttggtggctatggttgactgggccactcagagcagaaggatgagatggtccccgcttggtgaggttggagtctgacttccttgggtgtggggcatcccagatccatgttggttacacctggtcctttgctgtctgtgaagttggtagtctctttttctgggggagcccaatatctcccatgaatcttccatgtacctgaaagcagtgcaggacctctgcggctgcagaatccagagcctggcttgtgggaagagcagcaacattgtggccgccaatgagaacaccatcagctgagggccataaccaacctttaggtaattgggatacagggaccatgagcccaagtcttccactgcagcccaagaggtgaagactctgaatggcatcttttcaaagcaggtctccataggctactcacactccttggtgatagtgcgagatgaaagtgagaccaggaaagagaagatcaagaaactgctagagccggttgcggtggctcacttgtaatcccaacactttgggaggccgag
